(19) United States
(12) Patent Application Publication
(10) Pub. No.: US 2012/0046346 A1
(43) Pub. Date: Feb. 23, 2012

(54) SUSTAINED POLYPEPTIDE EXPRESSION FROM SYNTHETIC, MODIFIED RNAS AND USES THEREOF

(75) Inventors: Derrick Rossi, Roslindale, MA (US); Luigi Warren, Cambridge, MA (US)

(73) Assignee: IMMUNE DISEASE INSTITUTE, INC., Boston, MA (US)

(21) Appl. No.: 13/088,009

(22) Filed: Apr. 15, 2011

Related U.S. Application Data
(60) Provisional application No. 61/325,003, filed on Apr. 16, 2010.
(60) Provisional application No. 61/387,220, filed on Sep. 28, 2010.

(51) Int. Cl. A61K 48/00; B65D 85/00; C12N 5/00

(52) U.S. Cl. 514/44 R; 435/375; 435/377; 206/570

(57) ABSTRACT

Described herein are synthetic, modified RNAs for changing the phenotype of a cell, such as expressing a polypeptide or altering the developmental potential. Accordingly, provided herein are compositions, methods, and kits comprising synthetic, modified RNAs for changing the phenotype of a cell or cells. These methods, compositions, and kits comprising synthetic, modified RNAs can be used either to express a desired protein in a cell or tissue, or to change the differentiated phenotype of a cell to that of another, desired cell type.

### CROSS-REFERENCE TO RELATED APPLICATIONS

[0001] This application claims benefit under 35 U.S.C. §119(e) of U.S. Provisional Patent Application Ser. No. 61/325,003 filed on Apr. 16, 2010 and U.S. Provisional Patent Application Ser. No. 61/387,220 filed on Sep. 28, 2010, the contents of which are incorporated herein by reference in their entirety.

### SEQUENCE LISTING

[0002] The instant application contains a Sequence Listing which has been submitted in ASCII format via EFS-Web and is hereby incorporated by reference in its entirety. Said ASCII copy, created on Apr. 8, 2011, is named 67443US1.txt and is 7,196,077 bytes in size.

### FIELD OF THE INVENTION

[0003] The field of the invention relates to synthetic, modified RNAs and uses thereof.

### BACKGROUND

[0004] The ability to change the phenotype of a cell or cells, either to express a desired protein or to change the differentiated phenotype of the cell to that of another, desired cell type, has applications in both research and therapeutic settings. The phenotype of a cell is most commonly modified by expression of protein(s) from exogenous DNA or from recombinant viral vectors. These approaches have the potential for unintended mutagenic effects.

[0005] One area of interest is the modification of cellular differentiation such that cells are directed to different developmental lineages. As one example, generating insulin-producing pancreatic β cells from acinar pancreatic cells or other somatic cell types, has the potential to treat diabetes. As but one other example, the ability to redifferentiate a tumor cell or tumor stem cell to a non-cancerous cell type can provide a therapy for cancer. Current protocols for altering cell fate tend to focus on the expression of factors, such as differentiation factors, dedifferentiation factors, transdifferentiation factors, and reprogramming factors, using viral- or DNA-mediated expression.

[0006] An area of recent focus is the production of pluripotent or multipotent stem cells from non-embryonic sources. Induction of pluripotency was originally achieved by Yamanaka and colleagues using retroviral vectors to enforce expression of four transcription factors, KLF4, c-MYC, OCT4, and SOX2 (KMOS) (Takahashi, K. and S. Yamanaka, Cell, 2006. 126(4): p. 663-76; Takahashi, K., et al., Cell, 2007. 131(5): p. 861-72). Attempts to derive induced pluripotent stem (iPS) cells have also been made using excisable lentiviral and transposon vectors, or through repeated application of transient plasmid, episomal, and adenovirus vectors (Chang, C.-W., et al., Stem Cells, 2009. 27(5): p. 1042-1049; Kaji, K., et al., Nature, 2009. 458(7239): p. 771-5; Okita, K., et al., Science, 2008. 322(5903): p. 949-53; Stadtfeld, M., et al., Science, 2008. 322(5903): p. 945-9; Woltjen, K., et al., Nature, 2009; Yu, J., et al., Science, 2009: p. 1172482; Fusaki, N., et al., Proc Jpn Acad Ser B Phys Biol Sci, 2009. 85(8): p. 348-62). Human pluripotent cells have also been derived using two DNA-free methods: serial protein transduction with recombinant proteins incorporating cell-penetrating peptide moieties (Kim, D., et al., Cell Stem Cell, 2009. 4(6): p. 472-476; Zhou, H., et al., Cell Stem Cell, 2009. 4(5): p. 381-4), and infectious transgene delivery using the Sendai virus, which has a completely RNA-based reproductive cycle (Fusaki, N., et al., Proc Jpn Acad Ser B Phys Biol Sci, 2009. 85(8): p. 348-62).

### SUMMARY

[0007] Provided herein are compositions, methods, and kits for changing the phenotype of a cell or cells. These methods, compositions, and kits can be used either to express a desired protein in a cell or tissue, or to change the differentiated phenotype of a cell to that of another, desired cell type. Significantly, the methods, compositions, and kits described herein do not utilize exogenous DNA or viral vector-based methods for the expression of protein(s), and thus, do not cause permanent modification of the genome or have the potential for unintended mutagenic effects.

[0008] The compositions, methods, and kits described herein are based upon the direct introduction of synthetic RNAs into a cell, which, when translated, provide a desired protein or proteins. Higher eukaryotic cells have evolved cellular defenses against foreign, “non-self,” RNA that ultimately result in the global inhibition of cellular protein synthesis, resulting in cellular toxicity. This response involves, in part, the production of Type I or Type II interferons, and is generally referred to as the “interferon response” or the “cellular innate immune response.” The cellular defenses normally recognize synthetic RNAs as foreign, and induce this cellular innate immune response. The inventors have recognized that the ability to achieve sustained or repeated expression of an exogenously directed protein using synthetic RNA is hampered by the induction of this innate immune response. In the methods described herein, the effect of the cellular innate immune response is mitigated by using synthetic RNAs that are modified in a manner that avoids or reduces the response. Avoidance or reduction of the innate immune response permit sustained expression from exogenously introduced RNA necessary, for example, to modify the developmental phenotype of a cell. In one aspect, sustained expression is achieved by repeated introduction of synthetic, modified RNAs into a target cell or its progeny.

[0009] The modified, synthetic RNAs described herein, in one aspect, can be introduced to a cell in order to induce exogenous expression of a protein of interest in a cell. The ability to direct exogenous expression of a protein of interest using the modified, synthetic RNAs described herein is useful, for example, in the treatment of disorders caused by an endogenous genetic defect in a cell or organism that impairs or prevents the ability of that cell or organism to produce the protein of interest. Accordingly, in some embodiments, compositions and methods comprising the modified, synthetic RNAs described herein can be used for the purposes of gene therapy.

[0010] The modified, synthetic RNAs described herein can advantageously be used in the alteration of cellular fates and/or developmental potential. The ability to express a protein from an exogenous RNA permits both the alteration or reversal of the developmental potential of a cell, i.e., the reprogramming of the cell, and the directed differentiation of a cell to a more differentiated phenotype. A critical aspect in altering the developmental potential of a cell is the requirement for sustained and prolonged expression of one or more developmental potential altering factors in the cell or its immediate progeny. Traditionally, such sustained expression has been achieved by introducing DNA or viral vectors to a cell. These traditional approaches have limited therapeutic utility due to the potential for insertional mutagenesis. The compositions and methods described herein completely avoid such risks related to genomic alterations.

[0011] One of the areas that can most benefit from the ability to express a desired protein or proteins over a sustained period of time from exogenous synthetic, modified RNAs as described herein is the generation of pluripotent or multipotent cells from cells initially having a more differentiated phenotype. In this aspect, synthetic, modified RNAs encoding a reprogramming factor or factors are used to reprogram cells to a less differentiated phenotype, i.e., having a greater developmental potential. Unexpectedly, the inventors have discovered that the synthetic, modified RNAs described herein permit both dramatically enhanced efficiency and rate of cellular reprogramming relative to DNA- or viral vector-mediated reprogramming methods.

[0012] A major goal of stem cell technology is to make the stem cell differentiate into a desired cell type, i.e., directed differentiation. Not only are the compositions and methods described herein useful for reprogramming cells, they are also applicable to this directed differentiation of cells to a desired phenotype. That is, the same technology described herein for reprogramming is directly applicable to the differentiation of the reprogrammed cell, or any other stem cell or precursor cell, for that matter, to a desired cell type.

[0013] Accordingly, in one aspect, provided herein are synthetic, modified RNA molecules encoding a polypeptide, where the synthetic, modified RNA molecule comprises one or more modifications, such that introducing the synthetic, modified RNA molecule to a cell results in a reduced innate immune response relative to a cell contacted with a synthetic RNA molecule encoding the polypeptide not comprising the one or more modifications.

[0014] In some embodiments of this aspect and all such aspects described herein, the synthetic, modified RNA molecule comprises at least two modified nucleosides. In one such embodiment, the two modified nucleosides are selected from the group consisting of 5-methylcytidine (5mC), N6-methyladenosine (m6A), 3,2′-O-dimethyluridine (m4U), 2-thiouridine (s2U), 2′ fluorouridine, pseudouridine, 2′-O-methyluridine (Um), 2′ deoxy uridine (2′ dU), 4-thiouridine (s4U), 5-methyluridine (m5U), 2′-O-methyladenosine (m6A), N6,2′-O-dimethyladenosine (m6Am), N6,N6,2′-O-trimethyladenosine (m62Am), 2′-O-methylcytidine (Cm), 7-methylguanosine (m7G), 2′-O-methylguanosine (Gm), N2,7-dimethylguanosine (m2,7G), N2,N2,7-trimethylguanosine (m2,2,7G), and inosine (I). In one such embodiment of this aspect and all such aspects described herein, the at least two modified nucleosides are 5-methylcytidine (5mC) and pseudouridine.

[0015] In some embodiments of this aspect and all such aspects described herein, the synthetic, modified RNA molecule further comprises a 5′ cap. In one such embodiment, the 5′ cap is a 5′ cap analog. In one embodiment, the 5′ cap analog is a 5′ diguanosine cap.

[0016] In some embodiments of this aspect and all such aspects described herein, the synthetic, modified RNA molecule does not comprise a 5′ triphosphate.

[0017] In some embodiments of this aspect and all such aspects described herein, the synthetic, modified RNA molecule further comprises a poly(A) tail, a Kozak sequence, a 3′ untranslated region, a 5′ untranslated region, or any combination thereof. In one embodiment, the poly(A) tail, the Kozak sequence, the 3′ untranslated region, the 5′ untranslated region, or the any combination thereof comprises one or more modified nucleosides.

[0018] In some embodiments of this aspect and all such aspects described herein, the synthetic, modified RNA molecule is further treated with an alkaline phosphatase.

[0019] In some embodiments of this aspect and all such aspects described herein, the innate immune response comprises expression of a Type I or Type II interferon.

[0020] In some embodiments of this aspect and all such aspects described herein, the innate immune response comprises expression of one or more IFN signature genes selected from the group consisting of IFNα, IFNB1, IFIT, OAS1, PKR, RIGI, CCL5, RAP1A, CXCL10, IFIT1, CXCL11, MX1, RP11-167P23.2, HERC5, GALR3, IFIT3, IFIT2, RSAD2, and CDC20.

[0021] In another aspect, provided herein is a cell contacted with a synthetic, modified RNA molecule encoding a polypeptide, or a progeny cell of the contacted cell, where the synthetic, modified RNA molecule comprises one or more modifications, such that introducing the synthetic, modified RNA molecule to the cell results in a reduced innate immune response relative to the cell contacted with a synthetic RNA molecule encoding the polypeptide not comprising the one or more modifications.

[0022] In some embodiments of this aspect and all such aspects described herein, the synthetic, modified RNA molecule contacted with the cell comprises at least two modified nucleosides. In one such embodiment, the two modified nucleosides are selected from the group consisting of 5-methylcytidine (5mC), N6-methyladenosine (m6A), 3,2′-O-dimethyluridine (m4U), 2-thiouridine (s2U), 2′ fluorouridine, pseudouridine, 2′-O-methyluridine (Um), 2′ deoxy uridine (2′ dU), 4-thiouridine (s4U), 5-methyluridine (m5U), 2′-O-methyladenosine (m6A), N6,2′-O-dimethyladenosine (m6Am), N6,N6,2′-O-trimethyladenosine (m62Am), 2′-O-methylcytidine (Cm), 7-methylguanosine (m7G), 2′-O-methylguanosine (Gm), N2,7-dimethylguanosine (m2,7G), N2,N2,7-trimethylguanosine (m2,2,7G), and inosine (I). In one such embodiment of this aspect and all such aspects described herein, the at least two modified nucleosides are 5-methylcytidine (5mC) and pseudouridine.

[0023] In some embodiments of this aspect and all such aspects described herein, the synthetic, modified RNA molecule contacted with the cell further comprises a 5′ cap. In one such embodiment, the 5′ cap is a 5′ cap analog. In one embodiment, the 5′ cap analog is a 5′ diguanosine cap.

[0024] In some embodiments of this aspect and all such aspects described herein, the synthetic, modified RNA molecule contacted with the cell does not comprise a 5′ triphosphate.

[0025] In some embodiments of this aspect and all such aspects described herein, the synthetic, modified RNA molecule contacted with the cell further comprises a poly(A) tail, a Kozak sequence, a 3′ untranslated region, a 5′ untranslated region, or any combination thereof. In one embodiment, the poly(A) tail, the Kozak sequence, the 3′ untranslated region, the 5′ untranslated region, or the any combination thereof comprises one or more modified nucleosides.

[0026] In some embodiments of this aspect and all such aspects described herein, the synthetic, modified RNA molecule contacted with the cell is further treated with an alkaline phosphatase.

[0027] In some embodiments of this aspect and all such aspects described herein, the innate immune response comprises expression of a Type I or Type II interferon, and the expression of the Type I or Type II interferon is not increased more than three-fold compared to a reference from a cell which has not been contacted with the synthetic modified RNA molecule.

[0028] In some embodiments of this aspect and all such aspects described herein, the innate immune response comprises expression of one or more IFN signature genes selected from the group consisting of IFNα, IFNB1, IFIT, OAS1, PKR, RIGI, CCL5, RAP1A, CXCL10, IFIT1, CXCL11, MX1, RP11-167P23.2, HERC5, GALR3, IFIT3, IFIT2, RSAD2, and CDC20, and where the expression of the one of more IFN signature genes is not increased more than six-fold compared to a reference from a cell which has not been contacted with the synthetic modified RNA molecule.

[0029] In some embodiments of this aspect and all such aspects described herein, the polypeptide encoded by the synthetic, modified RNA molecule introduced to the cell alters a function or a developmental phenotype of the cell. In some such embodiments, the developmental phenotype is a developmental potential. In some embodiments, the developmental potential is decreased. In some embodiments, the developmental potential is increased.

[0030] In some embodiments of this aspect and all such aspects described herein, the polypeptide encoded by the synthetic, modified RNA molecule is a reprogramming factor, a differentiation factor, or a de-differentiation factor.

[0031] In another aspect, provided herein is a cell contacted with a synthetic, modified RNA molecule encoding a polypeptide, or a progeny cell of the contacted cell, where expression of the encoded polypeptide in the cell alters a function or a developmental phenotype of the cell, and where the synthetic, modified RNA molecule comprises one or more modifications, such that introducing the synthetic, modified RNA molecule to the cell results in a reduced innate immune response relative to the cell contacted with a synthetic RNA molecule encoding the polypeptide not comprising the one or more modifications.

[0032] In some embodiments of this aspect and all such aspects described herein, the developmental phenotype altered by expression of the polypeptide encoded by the synthetic, modified RNA molecule is a developmental potential. In some such embodiments of this aspect, the developmental potential is decreased. In other such embodiments of this aspect, the developmental potential is increased.

[0033] In some embodiments of these aspects and all such aspects described herein, the polypeptide encoded by the synthetic, modified RNA molecule is a reprogramming factor, a differentiation factor, or a de-differentiation factor.

[0034] In another aspect, provided herein is a pluripotent cell, where the pluripotent cell is not an embryonic stem cell, and where the cell was not induced by viral expression of one or more reprogramming factors, and where the cell, when subjected to an unsupervised hierarchical cluster analysis, clusters more closely to an embryonic stem cell than does a pluripotent cell induced by viral expression of one or more reprogramming factors, exogenous protein introduction of one or more reprogramming factors, small molecule mediated expression or induction of one or more reprogramming factors, or any combination thereof.

[0035] In one such aspect, provided herein is pluripotent cell, where the pluripotent cell is not an embryonic stem cell, and where the cell was not induced by viral expression of one or more reprogramming factors, and where the cell subjected to an unsupervised hierarchical cluster analysis clusters more closely to a human embryonic stem cell than does a pluripotent cell induced by viral expression of one or more reprogramming factors.

[0036] In some embodiments of these aspects and all such aspects described herein, the unsupervised hierarchical cluster analysis is performed on the pluripotent cells using a Euclidean distance with average linkage method, in which the similarity metric for comparison between different cells is indicated on the height of cluster dendrogram.

[0037] In some embodiments of these aspects and all such aspects described herein, the unsupervised hierarchical cluster analysis is performed on the pluripotent cells using a data set selected from the group consisting of gene expression data, protein expression data, DNA methylation data, histone modification data, and microRNA data.

[0038] In some embodiments of these aspects and all such aspects described herein, the pluripotent cell is generated from a precursor somatic cell contacted with at least one synthetic, modified RNA encoding a reprogramming factor.

[0039] In some embodiments of these aspects and all such aspects described herein, the pluripotent cell is generated from a precursor human somatic cell.

[0040] Another aspect provides a cell comprising an exogenously introduced modified, synthetic RNA encoding a developmental potential altering factor.

[0041] In some embodiments of this aspect and all such aspects described herein, the cell is a human cell. In other embodiments of this aspect and all such aspects described herein, the cell is not a human cell.

[0042] In some embodiments of this aspect and all such aspects described herein, the cell or its immediate precursor cell(s) has been subjected to at least 3 separate rounds of contacting with the exogenously introduced modified synthetic RNA encoding the developmental potential altering factor.

[0043] In some embodiments of this aspect and all such aspects described herein, the cell has a reduced expression of a Type I or Type II IFN relative to a cell subjected to at least 3 separate rounds of contacting with an exogenously introduced non-modified, synthetic RNA encoding the developmental potential altering factor.

[0044] In some embodiments of this aspect and all such aspects described herein, the cell has a reduced expression of at least one IFN-signature gene relative to a cell subjected to at least 3 separate rounds of contacting with an exogenously introduced non-modified synthetic RNA encoding the developmental potential altering factor.

[0045] In one such embodiment of this aspect and all such aspects described herein, the IFN-signature gene is selected from the group consisting of IFNα, IFNB1, IFIT, OAS1, PKR, RIGI, CCL5, RAP1A, CXCL10, IFIT1, CXCL11, MX1, RP11-167P23.2, HERC5, GALR3, IFIT3, IFIT2, RSAD2, and CDC20.

[0046] In some embodiments of this aspect and all such aspects described herein, the developmental potential altering factor is a reprogramming factor, a differentiation factor, or a de-differentiation factor.

[0047] In one such embodiment of this aspect and all such aspects described herein, the reprogramming factor is selected from the group consisting of: OCT4 (SEQ ID NO: 788), SOX1, SOX 2 (SEQ ID NO: 941 or SEQ ID NO: 1501), SOX 3, SOX15, SOX 18, NANOG, KLF1, KLF 2, KLF 4 (SEQ ID NO: 501), KLF 5, NR5A2, c-MYC (SEQ ID NO: 636), 1-MYC, n-MYC, REM2, TERT, and LIN28 (SEQ ID NO: 524). In some embodiments of this aspect and all such aspects described herein, the reprogramming factor is not c-MYC.

[0048] In some embodiments of this aspect and all such aspects described herein, the synthetic, modified RNA molecule encoding the developmental potential altering factor comprises at least two modified nucleosides. In one such embodiment, the two modified nucleosides are selected from the group consisting of 5-methylcytidine (5mC), N6-methyladenosine (m6A), 3,2′-O-dimethyluridine (m4U), 2-thiouridine (s2U), 2′ fluorouridine, pseudouridine, 2′-O-methyluridine (Um), 2′ deoxy uridine (2′ dU), 4-thiouridine (s4U), 5-methyluridine (m5U), 2′-O-methyladenosine (m6A), N6,2′-O-dimethyladenosine (m6Am), N6,N6,2′-O-trimethyladenosine (m62Am), 2′-O-methylcytidine (Cm), 7-methylguanosine (m7G), 2′-O-methylguanosine (Gm), N2,7-dimethylguanosine (m2,7G), N2,N2,7-trimethylguanosine (m2,2,7G), and inosine (I). In one such embodiment of this aspect and all such aspects described herein, the at least two modified nucleosides are 5-methylcytidine (5mC) and pseudouridine.

[0049] In some embodiments of this aspect and all such aspects described herein, the synthetic, modified RNA molecule encoding the developmental potential altering factor further comprises a 5′ cap. In one such embodiment, the 5′ cap is a 5′ cap analog. In one embodiment, the 5′ cap analog is a 5′ diguanosine cap.

[0050] In some embodiments of this aspect and all such aspects described herein, the synthetic, modified RNA molecule encoding the developmental potential altering factor does not comprise a 5′ triphosphate.

[0051] In some embodiments of this aspect and all such aspects described herein, the synthetic, modified RNA molecule encoding the developmental potential altering factor further comprises a poly(A) tail, a Kozak sequence, a 3′ untranslated region, a 5′ untranslated region, or any combination thereof. In one embodiment, the poly(A) tail, the Kozak sequence, the 3′ untranslated region, the 5′ untranslated region, or the any combination thereof comprises one or more modified nucleosides.

[0052] In some embodiments of this aspect and all such aspects described herein, the synthetic, modified RNA molecule encoding the developmental potential altering factor is further treated with an alkaline phosphatase.

[0053] In some embodiments of this aspect and all such aspects described herein, the cell or its immediate precursor cell(s) is derived from a somatic cell, a partially reprogrammed somatic cell, a pluripotent cell, a multipotent cell, a differentiated cell, or an embryonic cell.

[0054] In another aspect, provided herein is a composition comprising at least one modified, synthetic RNA encoding a reprogramming factor, and cell growth media.

[0055] In some embodiments of this aspect and all such aspects described herein, the composition permits an efficiency of pluripotent cell generation from a starting population of somatic cells of at least 1%.

[0056] In some embodiments of this aspect and all such aspects described herein, the composition permits a rate of pluripotent cell generation from a starting population of somatic cells of less than 25 days and greater than 7 days.

[0057] In one embodiment of this aspect and all such aspects described herein, the reprogramming factor is selected from the group consisting of: OCT4, SOX1, SOX 2, SOX 3, SOX15, SOX 18, NANOG, KLF1, KLF 2, KLF 4, KLF 5, NR5A2, c-MYC, 1-MYC, n-MYC, REM2, TERT, and LIN28. In some embodiments of this aspect and all such aspects described herein, the reprogramming factor is not c-MYC.

[0058] In some embodiments of this aspect and all such aspects described herein, the composition comprises at least 3 synthetic, modified, RNAs encoding at least 3 different reprogramming factors. In one such embodiment, the at least 3 different reprogramming factors encoded by the at least 3 synthetic, modified RNAs are selected from the group consisting of OCT4, SOX2, KLF4, c-MYC, and LIN-28.

[0059] In some embodiments of this aspect and all such aspects described herein, the synthetic, modified RNA molecule encoding the developmental potential altering factor comprises at least two modified nucleosides. In one such embodiment, the two modified nucleosides are selected from the group consisting of 5-methylcytidine (5mC), N6-methyladenosine (m6A), 3,2′-O-dimethyluridine (m4U), 2-thiouridine (s2U), 2′ fluorouridine, pseudouridine, 2′-O-methyluridine (Um), 2′ deoxy uridine (2′ dU), 4-thiouridine (s4U), 5-methyluridine (m5U), 2′-O-methyladenosine (m6A), N6,2′-O-dimethyladenosine (m6Am), N6,N6,2′-O-trimethyladenosine (m62Am), 2′-O-methylcytidine (Cm), 7-methylguanosine (m7G), 2′-O-methylguanosine (Gm), N2,7-dimethylguanosine (m2,7G), N2,N2,7-trimethylguanosine (m2,2,7G), and inosine (I). In one such embodiment of this aspect and all such aspects described herein, the at least two modified nucleosides are 5-methylcytidine (5mC) and pseudouridine.

[0060] In some embodiments of this aspect and all such aspects described herein, the synthetic, modified RNA molecule encoding the developmental potential altering factor further comprises a 5′ cap. In one such embodiment, the 5′ cap is a 5′ cap analog. In one embodiment, the 5′ cap analog is a 5′ diguanosine cap.

[0061] In some embodiments of this aspect and all such aspects described herein, the synthetic, modified RNA molecule encoding the developmental potential altering factor does not comprise a 5′ triphosphate.

[0062] In some embodiments of this aspect and all such aspects described herein, the synthetic, modified RNA molecule encoding the developmental potential altering factor further comprises a poly(A) tail, a Kozak sequence, a 3′ untranslated region, a 5′ untranslated region, or any combination thereof. In one embodiment, the poly(A) tail, the Kozak sequence, the 3′ untranslated region, the 5′ untranslated region, or the any combination thereof comprises one or more modified nucleosides.

[0063] In some embodiments of this aspect and all such aspects described herein, the synthetic, modified RNA molecule encoding the developmental potential altering factor is further treated with an alkaline phosphatase.

[0064] Another aspect provides a pluripotent cell generated using any of the compositions described herein.

[0065] In one aspect, provided herein is a cell composition comprising a pluripotent cell clone isolated from a population of somatic cells contacted a plurality of times with at least one synthetic, modified RNA encoding a developmental potential altering factor.

[0066] In some embodiments of this aspect and all such aspects described herein, the population of somatic cells is a population of human somatic cells.

[0067] In some embodiments of this aspect and all such aspects described herein, the pluripotent cell clone subjected to an unsupervised hierarchical cluster analysis clusters more closely to a human embryonic stem cell than does a pluripotent cell clone induced by viral expression of one or more reprogramming factors, exogenous protein introduction of one or more reprogramming factors, small molecule mediated expression or induction of one or more reprogramming factors, or any combination thereof.

[0068] Provided herein are methods of altering the developmental potential of a cell. In one aspect, the method comprises contacting with or introducing to a cell population or progeny cells thereof at least one synthetic, modified RNA encoding a developmental potential altering factor. In some embodiments of this aspect and all such aspects described herein, the contacting with or introducing to is performed at least three times.

[0069] In some embodiments of this aspect and all such aspects described herein, the synthetic, modified RNA molecule encoding the developmental potential altering factor comprises at least two modified nucleosides. In one such embodiment, the two modified nucleosides are selected from the group consisting of 5-methylcytidine (5mC), N6-methyladenosine (m6A), 3,2′-O-dimethyluridine (m4U), 2-thiouridine (s2U), 2′ fluorouridine, pseudouridine, 2′-O-methyluridine (Um), 2′ deoxy uridine (2′ dU), 4-thiouridine (s4U), 5-methyluridine (m5U), 2′-O-methyladenosine (m6A), N6,2′-O-dimethyladenosine (m6Am), N6,N6,2′-O-trimethyladenosine (m62Am), 2′-O-methylcytidine (Cm), 7-methylguanosine (m7G), 2′-O-methylguanosine (Gm), N2,7-dimethylguanosine (m2,7G), N2,N2,7-trimethylguanosine (m2,2,7G), and inosine (I). In one such embodiment of this aspect and all such aspects described herein, the at least two modified nucleosides are 5-methylcytidine (5mC) and pseudouridine.

[0070] In some embodiments of this aspect and all such aspects described herein, the synthetic, modified RNA molecule encoding the developmental potential altering factor further comprises a 5′ cap. In one such embodiment, the 5′ cap is a 5′ cap analog. In one embodiment, the 5′ cap analog is a 5′ diguanosine cap.

[0071] In some embodiments of this aspect and all such aspects described herein, the synthetic, modified RNA molecule encoding the developmental potential altering factor does not comprise a 5′ triphosphate.

[0072] In some embodiments of this aspect and all such aspects described herein, the synthetic, modified RNA molecule encoding the developmental potential altering factor further comprises a poly(A) tail, a Kozak sequence, a 3′ untranslated region, a 5′ untranslated region, or any combination thereof. In one embodiment, the poly(A) tail, the Kozak sequence, the 3′ untranslated region, the 5′ untranslated region, or the any combination thereof comprises one or more modified nucleosides.

[0073] In some embodiments of this aspect and all such aspects described herein, the synthetic, modified RNA molecule encoding the developmental potential altering factor is further treated with an alkaline phosphatase.

[0074] In some embodiments of this aspect and all such aspects described herein, the method further comprises a step of determining that the cell population or progeny cells thereof maintain increased viability by measuring viability of the cell population or progeny cells thereof, where the viability of at least 50% of the contacted cell population or progeny cells thereof indicates that the cells maintain increased viability.

[0075] In some embodiments of this aspect and all such aspects described herein, the method further comprises a step of determining that the cell population or progeny cells thereof does not have a significant increase in expression of a Type I or a Type II IFN by measuring expression of a Type I or a Type II IFN in the contacted cell population or progeny cells thereof, where a less than three-fold increase in expression of Type I or Type II IFN in the contacted cell population or progeny cells thereof compared to cells that have not been contacted with the synthetic and modified RNA indicates that the cell population does not have a significant increase in expression of Type I or Type II IFN.

[0076] In some such embodiments of this aspect and all such aspects described herein, measuring the expression of Type I or Type II IFN is performed by measuring expression of at least one IFN-signature gene selected from IFNα, IFNB1, IFIT, OAS1, PKR, RIGI, CCL5, RAP1A, CXCL10, IFIT1, CXCL11, MX1, RP11-167P23.2, HERC5, GALR3, IFIT3, IFIT2, RSAD2, and CDC20, where a less than six-fold increase in expression of the at least one IFN-signature gene compared to the cell population or progeny cells thereof prior to contacting the cell population or progeny cells thereof with the at least one modified and synthetic RNA.

[0077] In some embodiments of this aspect and all such aspects described herein, contacting of the cell population or progeny cells thereof is performed in vitro, ex vivo, or in vivo.

[0078] Also provided herein are methods for reprogramming a somatic cell into a pluripotent cell. In one aspect, the method comprises contacting a somatic cell population or progeny cells thereof with at least one modified, synthetic RNA encoding at least one reprogramming factor at least five consecutive times.

[0079] In some embodiments of this aspect and all such aspects described herein, the at least five consecutive times occur within 25 days.

[0080] In some embodiments of this aspect and all such aspects described herein, the at least one synthetic, modified RNA encoding the reprogramming factor comprises at least two modified nucleosides. In one such embodiment, the at least two modified nucleosides are selected from the group consisting of 5-methylcytidine (5mC), N6-methyladenosine (m6A), 3,2′-O-dimethyluridine (m4U), 2-thiouridine (s2U), 2′ fluorouridine, pseudouridine, 2′-O-methyluridine (Um), 2′ deoxy uridine (2′ dU), 4-thiouridine (s4U), 5-methyluridine (m5U), 2′-O-methyladenosine (m6A), N6,2′-O-dimethyladenosine (m6Am), N6,N6,2′-O-trimethyladenosine (m62Am), 2′-O-methylcytidine (Cm), 7-methylguanosine (m7G), 2′-O-methylguanosine (Gm), N2,7-dimethylguanosine (m2,7G), N2,N2,7-trimethylguanosine (m2,2,7G), and inosine (I). In one such embodiment, the at least two modified nucleosides are 5-methylcytidine (5mC) and pseudouridine.

[0081] In one such embodiment of this aspect and all such aspects described herein, the at least two modified nucleosides are 5-methylcytidine (5mC) and pseudouridine.

[0082] In some embodiments of this aspect and all such aspects described herein, the synthetic, modified RNA molecule encoding the reprogramming factor further comprises a 5′ cap. In one such embodiment, the 5′ cap is a 5′ cap analog. In one embodiment, the 5′ cap analog is a 5′ diguanosine cap.

[0083] In some embodiments of this aspect and all such aspects described herein, the synthetic, modified RNA molecule encoding the reprogramming factor does not comprise a 5′ triphosphate.

[0084] In some embodiments of this aspect and all such aspects described herein, the synthetic, modified RNA molecule encoding the reprogramming factor further comprises a poly(A) tail, a Kozak sequence, a 3′ untranslated region, a 5′ untranslated region, or any combination thereof. In one embodiment, the poly(A) tail, the Kozak sequence, the 3′ untranslated region, the 5′ untranslated region, or the any combination thereof comprises one or more modified nucleosides.

[0085] In some embodiments of this aspect and all such aspects described herein, the synthetic, modified RNA molecule encoding th reprogramming factor is further treated with an alkaline phosphatase.

[0086] In some embodiments of this aspect and all such aspects described herein, the at least one reprogramming factor is selected from: OCT4 (SEQ ID NO: 788), SOX1, SOX 2 (SEQ ID NO: 941 or SEQ ID NO: 1501), SOX 3, SOX15, SOX 18, NANOG, KLF1, KLF 2, KLF 4 (SEQ ID NO: 501), KLF 5, NR5A2, c-MYC (SEQ ID NO: 636), 1-MYC, n-MYC, REM2, TERT, and LIN28 (SEQ ID NO: 524). In some embodiments of this aspect and all such aspects described herein, the reprogramming factor is not c-MYC.

[0087] In some embodiments of this aspect and all such aspects described herein, the at least one reprogramming factor comprises a synthetic and modified RNA encoding OCT4, a synthetic and modified RNA encoding SOX2, a synthetic and modified RNA encoding c-MYC, and a synthetic and modified RNA encoding KLF4. In some embodiments of this aspect and all such aspects described herein, the at least one reprogramming factor further comprises a synthetic and modified RNA molecule encoding LIN28.

[0088] In some embodiments of this aspect and all such aspects described herein, a combination of at least three reprogramming selected from the group consisting of a synthetic, modified RNA encoding OCT4, a synthetic, modified RNA encoding SOX2, a synthetic, modified RNA encoding c-MYC, a synthetic, modified RNA encoding KLF4, and a synthetic, modified RNA molecule encoding LIN28, are used in the methods described herein.

[0089] In some embodiments of this aspect and all such aspects described herein, the method further comprises determining increased reprogramming efficiency of the somatic cell by measuring efficiency of reprogramming, where efficiency of at least 1% is indicative of increased reprogramming efficiency.

[0090] In some embodiments of this aspect and all such aspects described herein, the method further comprises a step of determining that the somatic cell or progeny cells thereof maintain increased viability by measuring viability of the somatic cell or progeny cells thereof, where viability of at least 50% of the contacted somatic cell or progeny cells thereof indicates that the cells maintain increased viability.

[0091] In some embodiments of this aspect and all such aspects described herein, the method further comprises the step of determining that the reprogrammed somatic cell produced by the method has an increased likeness to the potency of an embryonic stem cell by subjecting the pluripotent cell or pluripotent cell population generated by the method to an unsupervised hierarchical cluster analysis and comparing it to a reference from an unsupervised cluster analysis of a pluripotent cell produced by viral expression of one or more of the reprogramming factors, exogenous protein introduction of one or more reprogramming factors, small molecule mediated expression or induction of one or more reprogramming factors, such that if the reprogrammed somatic cell clusters more closely to an embryonic stem cell than it does to a the reference, it has an increased likeness to the potency of embryonic stem cell.

[0092] In some embodiments of this aspect and all such aspects described herein, the method further comprises a step of determining that the reprogrammed somatic cell or progeny cell thereof does not have a significant increase in expression of IFN by measuring expression of at least one IFN-signature gene in the reprogrammed somatic cell or progeny cell thereof, such that if the increase in expression of the at least one IFN-signature gene is less than six-fold compared to a reference from a somatic cell prior to it being subjected to reprogramming indicates that the reprogrammed somatic cell or progeny cell thereof does not have a significant increase in expression of IFN.

[0093] In some such embodiments of this aspect and all such aspects described herein, the method further comprises the IFN-signature gene is selected from the group consisting of IFNα, IFNB1, IFIT, OAS1, PKR, RIGI, CCL5, RAP1A, CXCL10, IFIT1, CXCL11, MX1, RP11-167P23.2, HERC5, GALR3, IFIT3, IFIT2, RSAD2, and CDC20.

[0094] In some embodiments of this aspect and all such aspects described herein, the somatic cell population or progeny cells thereof are contacted under a low-oxygen condition.

[0095] In some embodiments of this aspect and all such aspects described herein, the method further comprises determining that the reprogrammed somatic cell or progeny thereof expresses sufficient levels of genes to determine pluripotency by measuring expression of at least two genes selected from the group consisting of SOX2, REX1, DNMT3B, TRA-1-60, TRA-1-81, SSEA3, SSEA4, OCT4, and NANOG and comparing the result to a reference from an embryonic stem cell, such that if at least two of the genes are expressed at the level they are expressed in the embryonic stem cell, it indicates that the reprogrammed somatic cell or progeny thereof expresses sufficient levels of genes to determine pluripotency.

[0096] In some embodiments of this aspect and all such aspects described herein, contacting of the somatic cell population or progeny cells thereof is performed in vitro, ex vivo, or in vivo.

[0097] In some embodiments of this aspect and all such aspects described herein, the somatic cell is a human somatic cell.

[0098] Other aspects described herein provide methods of treating subjects in need of cellular therapies. In such aspects, an effective amount of a population of any of the progenitor, multipotent, oligopotent, lineage-restricted, fully or partially differentiated cells, generated using any of the compositions or methods comprising synthetic, modified RNAs described herein, is administered to a subject in need of a cellular therapy.

[0099] Accordingly, in one aspect, provided herein is a method of treating a subject in need of a cellular therapy, comprising: administering to a subject in need of a cellular therapy an effective amount of a population of cells having altered developmental potential produced by contacting a cell population or progeny cells thereof with at least one synthetic, modified RNA encoding a developmental potential altering factor for at least three consecutive times.

[0100] In some embodiments of this aspect and all such aspects described herein, the at least one synthetic and modified RNA encoding a developmental potential altering factor comprises at least two modified nucleosides. In one embodiment of this aspect, the at least two modified nucleosides are selected from the group consisting of 5-methylcytidine (5mC), N6-methyladenosine (m6A), 3,2′-O-dimethyluridine (m4U), 2-thiouridine (s2U), 2′ fluorouridine, pseudouridine, 2′-O-methyluridine (Um), 2′ deoxy uridine (2′ dU), 4-thiouridine (s4U), 5-methyluridine (m5U), 2′-O-methyladenosine (m6A), N6,2′-O-dimethyladenosine (m6Am), N6,N6,2′-O-trimethyladenosine (m62Am), 2′-O-methylcytidine (Cm), 7-methylguanosine (m7G), 2′-O-methylguanosine (Gm), N2,7-dimethylguanosine (m2,7G), N2,N2,7-trimethylguanosine (m2,2,7G), and inosine (I). In one embodiment of this aspect, the at least two modified nucleosides are 5-methylcytidine (5mC) and pseudouridine.

[0101] In some embodiments of this aspect and all such aspects described herein, the at least one synthetic and modified RNA encoding a developmental potential altering factor at least one synthetic, modified RNA further comprises a 5′ cap. In one embodiment of this aspect, the 5′ cap is a 5′ cap analog. In one such embodiment, the 5′ cap analog is a 5′ diguanosine cap.

[0102] In some embodiments of this aspect and all such aspects described herein, the at least one synthetic and modified RNA encoding a developmental potential altering factor does not comprise a 5′ triphosphate.

[0103] In some embodiments of this aspect and all such aspects described herein, the at least one synthetic, modified RNA encoding a developmental potential altering factor further comprises a poly(A) tail, a Kozak sequence, a 3′ untranslated region, a 5′ untranslated region, or any combination thereof.

[0104] In some embodiments of this aspect and all such aspects described herein, the contacting at least three consecutive times are at least 24 hours apart. In some embodiments of this aspect and all such aspects described herein, the contacting at least three consecutive times occur within 15 days.

[0105] In some embodiments of this aspect and all such aspects described herein, the method further comprises a step of obtaining an autologous cell from the subject and generating a population of cells having altered developmental potential from the autologous cell by contacting the cell population or progeny cells thereof with at least one synthetic, modified RNA encoding a developmental potential altering factor for at least three consecutive times.

[0106] In some embodiments of this aspect and all such aspects described herein, the method further comprises a step of determining that the population of cells having altered developmental potential does not have a significant increase in expression of Type I or Type II IFN prior to administering the population of cells having altered developmental potential to the subject, the step comprising measuring expression of Type I or Type II IFN, where expression that is less than three-fold compared to a reference from a cell that has not been subject to a treatment to alter developmental potential indicates that the population of cells having altered developmental potential does not have a significant increase in expression of Type I or Type II IFN.

[0107] In some such embodiments of this aspect and all such aspects described herein, the expression of Type I or Type II IFN expression is measured by measuring expression of at least one IFN-signature gene selected from the group consisting of IFNα, IFNB1, IFIT, OAS1, PKR, RIGI, CCL5, RAP1A, CXCL10, IFIT1, CXCL11, MX1, RP11-167P23.2, HERC5, GALR3, IFIT3, IFIT2, RSAD2, and CDC20, and where increase of less than six-fold of the at least two IFN-signature genes indicates that the population of cells having altered developmental potential does not have a significant increase in expression of Type I or Type II IFN.

[0108] In some embodiments of this aspect and all such aspects described herein, the altered developmental potential is pluripotency.

[0109] In some such embodiments of this aspect and all such aspects described herein, the developmental potential altering factor is a reprogramming factor selected from the group consisting of: OCT4 (SEQ ID NO: 788), SOX1, SOX 2 (SEQ ID NO: 941 or SEQ ID NO: 1501), SOX 3, SOX15, SOX 18, NANOG, KLF1, KLF 2, KLF 4 (SEQ ID NO: 501), KLF 5, NR5A2, c-MYC (SEQ ID NO: 636), 1-MYC, n-MYC, REM2, TERT, and LIN28 (SEQ ID NO: 524). In some embodiments of this aspect and all such aspects described herein, the reprogramming factor is not c-MYC.

[0110] In some embodiments of this aspect and all such aspects described herein, the population of cells having altered developmental potential is of a lineage selected from one of an ecotodermal lineage, a mesodermal lineage, or an endodermal lineage.

[0111] In some embodiments of this aspect and all such aspects described herein, the population of cells having altered developmental potential is multipotent. In some embodiments of this aspect and all such aspects described herein, the population of cells having altered developmental potential is oligopotent. In some embodiments of this aspect and all such aspects described herein, the population of cells being administered is partially or fully differentiated.

[0112] In some embodiments of this aspect and all such aspects described herein, the population of cells having altered developmental potential is differentiated into at least one differentiated cell population.

[0113] Also provided herein are methods for identifying agents that have effects on a cellular phenotype or cellular parameter. In some aspects, provided herein are methods for identifying an agent that has an effect on a cellular phenotype. In one aspect, the method comprises: (a) contacting a cell with a synthetic, modified RNA encoding a polypeptide in an amount and frequency sufficient to alter the phenotype of the cell to that of a desired phenotype; (b) contacting the altered cell with a candidate agent; (c) assaying the desired phenotype in the presence of the candidate agent, where a change in the phenotype in the presence of the candidate agent indicates the agent has an effect on the phenotype.

[0114] In some embodiments of this aspect and all such aspects described herein, the polypeptide encoded by the synthetic, modified RNA is a reprogramming factor. In some embodiments of this aspect and all such aspects described herein, the polypeptide encoded by the synthetic, modified RNA is a differentiating factor.

[0115] In some embodiments of this aspect and all such aspects described herein, the cell is a pluripotent or multipotent cell.

[0116] In some embodiments of this aspect and all such aspects described herein, the cellular phenotype is viability, cell growth, expression of a cell-surface marker, or a functional parameter. In some such embodiments of this aspect and all such aspects described herein, the functional parameter is an electrophysiological parameter, an immunological parameter, or a metabolic parameter. In some embodiments, the metabolic parameter is insulin synthesis or insulin secretion. In some embodiments, the electrophysiological parameter is contractibility.

[0117] Also provided herein are kits for altering the phenotype or developmental potential of a cell. In one aspect, provided herein is a kit comprising: a) a container with at least one synthetic, modified RNA molecule comprising at least two modified nucleosides, and b) packaging and instructions therefor.

[0118] In some embodiments of this aspect and all such aspects described herein, the kit further comprises a container with cell culture medium.

[0119] In some embodiments of this aspect and all such aspects described herein, the kit further comprises an IFN inhibitor. In some embodiments of this aspect and all such aspects described herein, the kit further comprises valproic acid.

[0120] In some embodiments of this aspect and all such aspects described herein, the at least one synthetic, modified RNA encodes a developmental potential altering factor.

[0121] In some embodiments of this aspect and all such aspects described herein, the developmental potential altering factor is a reprogramming factor, a differentiation factor, or a de-differentiation factor.

[0122] In some embodiments of this aspect and all such aspects described herein, the synthetic, modified RNA encoding a reprogramming factor in the container has a concentration of 100 ng/μl. In some such embodiments of this aspect and all such aspects described herein, the reprogramming factor is selected from the group consisting of OCT4 (SEQ ID NO: 788), SOX1, SOX 2 (SEQ ID NO: 941 or SEQ ID NO: 1501), SOX 3, SOX15, SOX 18, NANOG, KLF1, KLF 2, KLF 4 (SEQ ID NO: 501), KLF 5, NR5A2, c-MYC (SEQ ID NO: 636), 1-MYC, n-MYC, REM2, TERT, and LIN28 (SEQ ID NO: 524). In some such embodiments of this aspect and all such aspects described herein, the kit comprises at least three of the reprogramming factors. In some such embodiments of this aspect and all such aspects described herein, the at least three reprogramming factors comprise a synthetic, modified RNA encoding OCT4, a synthetic, modified RNA encoding SOX2, a synthetic, modified RNA encoding c-MYC, and a synthetic, modified RNA encoding KLF4. In some such embodiments of this aspect and all such aspects described herein, such that the total concentration of the reprogramming factors in the container is 100 ng/μl, and where OCT4 is provided in molar excess of about three times the concentration of KLF4, SOX-2, and c-MYC. In some such embodiments of this aspect and all such aspects described herein, the kit further comprises a synthetic, modified RNA molecule encoding LIN28.

[0123] In some embodiments of this aspect and all such aspects described herein, the kit does not comprise a synthetic, modified RNA encoding c-MYC.

[0124] In some embodiments of this aspect and all such aspects described herein, the at least two modified nucleosides of the synthetic, modified RNA are selected from the group consisting of 5-methylcytidine (5mC), N6-methyladenosine (m6A), 3,2′-O-dimethyluridine (m4U), 2-thiouridine (s2U), 2′ fluorouridine, pseudouridine, 2′-O-methyluridine (Um), 2′ deoxy uridine (2′ dU), 4-thiouridine (s4U), 5-methyluridine (m5U), 2′-O-methyladenosine (m6A), N6,2′-O-dimethyladenosine (m6Am), N6,N6,2′-O-trimethyladenosine (m62Am), 2′-O-methylcytidine (Cm), 7-methylguanosine (m7G), 2′-O-methylguanosine (Gm), N2,7-dimethylguanosine (m2,7G), N2,N2,7-trimethylguanosine (m2,2,7G), and inosine (I). In some embodiments of this aspect and all such aspects described herein, the at least two modified nucleosides are 5-methylcytidine (5mC) and pseudouridine.

[0125] In some embodiments of this aspect and all such aspects described herein, the at least one synthetic, modified RNA further comprises a 5′ cap. In some such embodiments of this aspect and all such aspects described herein, the 5′ cap is a 5′ cap analog. In one embodiment of this aspect and all such aspects described herein, the 5′ cap analog is a 5′ diguanosine cap.

[0126] In some embodiments of this aspect and all such aspects described herein, the at least one synthetic, modified RNA does not comprise a 5′ triphosphate.

[0127] In some embodiments of this aspect and all such aspects described herein, the at least one synthetic and modified RNA further comprises a poly(A) tail, a Kozak sequence, a 3′ untranslated region, a 5′ untranslated regions, or any combination thereof. In some such embodiments of this aspect and all such aspects described herein, the poly(A) tail, the Kozak sequence, the 3′ untranslated region, the 5′ untranslated region, or the any combination thereof, comprises one or more modified nucleosides.

[0128] In some embodiments of this aspect and all such aspects described herein, the kit further comprises a non-implantable delivery device or an implantable delivery device to deliver the at least one synthetic, modified RNA. In some such embodiments of this aspect and all such aspects described herein, the non-implantable delivery device is a pen device. In some such embodiments, the implantable delivery device is a pump, semi-permanent stent, or reservoir.

[0129] Another aspect provides a kit for reprogramming a somatic cell to an induced pluripotent stem cell, the kit comprising: a) a vial comprising a synthetic, modified RNA encoding an OCT4 reprogramming factor and a buffer; b) a vial comprising a synthetic, modified RNA encoding a SOX2 reprogramming factor and a buffer; c) a vial comprising a synthetic, modified RNA encoding a c-MYC reprogramming factor and a buffer; d) a vial comprising a synthetic, modified RNA encoding a KLF4 reprogramming factor and a buffer; and e) packaging and instructions therefor; where each of the synthetic, modified RNAs encoding a reprogramming factor comprise at least two modified nucleosides.

[0130] In some embodiments of this aspect and all such aspects described herein, the at least two modified nucleosides are pseudouridine and 5-methylcytidine.

[0131] In some embodiments of this aspect and all such aspects described herein, the concentration in the vial of each of the synthetic, modified RNAs encoding reprogramming factors is 100 ng/μl.

[0132] In some embodiments of this aspect and all such aspects described herein, the kit further comprises a vial comprising a synthetic, modified RNA molecule encoding a LIN28 reprogramming factor and a buffer.

[0133] In some embodiments of this aspect and all such aspects described herein, the buffer is RNase-free TE buffer at pH 7.0.

[0134] In some embodiments of this aspect and all such aspects described herein, the kit further a synthetic, modified RNA encoding a positive control.

[0135] In one embodiment of those aspects where a kit is provided to induce reprogramming of a somatic cell to an induced pluripotent stem cell, the kit comprises: a vial comprising a synthetic, modified RNA encoding OCT4 and a buffer; a vial comprising a synthetic, modified RNA encoding SOX2 and a buffer; a vial comprising a synthetic, modified RNA encoding c-MYC and a buffer; a vial comprising a synthetic, modified RNA encoding KLF4 and a buffer; a vial comprising a synthetic, modified RNA molecule encoding LIN28 and a buffer; a vial comprising a synthetic, modified RNA encoding a positive control GFP molecule; and packaging and instructions therefor; where the buffers in each of the vials is RNase-free TE buffer at pH 7.0; and where the synthetic, modified RNAs encoding OCT4, SOX2, c-MYC, KLF-4, LIN28 and GFP all comprise pseudouridine and 5-methylcytidine nucleoside modifications. In one embodiment, the concentration of the synthetic, modified RNAs encoding OCT4, SOX2, c-MYC, KLF-4, LIN28 and GFP in each of the vials is 100 ng/μl.

[0136] Also provided, in another aspect, is a kit for reprogramming a somatic cell to an induced pluripotent stem cell, the kit comprising: a) a container comprising a synthetic, modified RNA encoding an OCT4 reprogramming factor; a synthetic, modified RNA encoding a SOX2 reprogramming factor; a synthetic, modified RNA encoding a c-MYC reprogramming factor; a synthetic, modified RNA encoding a KLF4 reprogramming factor; and a buffer, where each of the synthetic, modified RNAs encoding a reprogramming factor comprises at least two modified nucleosides; and b) packaging and instructions therefor.

[0137] In some embodiments of this aspect and all such aspects described herein, the at least two modified nucleosides are pseudouridine and 5-methylcytidine.

[0138] In some embodiments of this aspect and all such aspects described herein, the concentration in the container of the synthetic, modified RNAs encoding reprogramming factors is 100 ng/μl.

[0139] In some embodiments of this aspect and all such aspects described herein, the kit further comprises a synthetic, modified RNA molecule encoding a LIN28 reprogramming actor.

[0140] In some embodiments of this aspect and all such aspects described herein, the kit further comprises a synthetic, modified RNA encoding a positive control.

[0141] In some embodiments of this aspect and all such aspects described herein, the buffer is RNase-free TE buffer at pH 7.0.

[0142] In some embodiments of this aspect and all such aspects described herein, each of the synthetic, modified RNAs encoding a reprogramming factor further comprise a ligand. In some such embodiments of this aspect and all such aspects described herein, the ligand is a lipid or lipid-based molecule.

### DEFINITIONS

[0143] For convenience, certain terms employed herein, in the specification, examples and appended claims are collected here. Unless stated otherwise, or implicit from context, the following terms and phrases include the meanings provided below. Unless explicitly stated otherwise, or apparent from context, the terms and phrases below do not exclude the meaning that the term or phrase has acquired in the art to which it pertains. The definitions are provided to aid in describing particular embodiments, and are not intended to limit the claimed invention, because the scope of the invention is limited only by the claims. Unless otherwise defined, all technical and scientific terms used herein have the same meaning as commonly understood by one of ordinary skill in the art to which this invention belongs.

[0144] As used herein, the terms “developmental potential” or “developmental potency” refer to the total of all developmental cell fates or cell types that can be achieved by a cell upon differentiation. Thus, a cell with greater or higher developmental potential can differentiate into a greater variety of different cell types than a cell having a lower or decreased developmental potential. The developmental potential of a cell can range from the highest developmental potential of a totipotent cell, which, in addition to being able to give rise to all the cells of an organism, can give rise to extra-embryonic tissues; to a “unipotent cell,” which has the capacity to differentiate into only one type of tissue or cell type, but has the property of self-renewal, as described herein; to a “terminally differentiated cell,” which has the lowest developmental potential. A cell with “parental developmental potential” refers to a cell having the developmental potential of the parent cell that gave rise to it.

[0145] The term “totipotency” refers to a cell with a developmental potential to make all of the cells in the adult body as well as the extra-embryonic tissues, including the placenta. The fertilized egg (zygote) is totipotent, as are the cells (blastomeres) of the morula (up to the 16-cell stage following fertilization).

[0146] The term “pluripotent” as used herein refers to a cell with the developmental potential, under different conditions, to differentiate to cell types characteristic of all three germ cell layers, i.e., endoderm (e.g., gut tissue), mesoderm (including blood, muscle, and vessels), and ectoderm (such as skin and nerve). A pluripotent cell has a lower developmental potential than a totipotent cell. The ability of a cell to differentiate to all three germ layers can be determined using, for example, a nude mouse teratoma formation assay. In some embodiments, pluripotency can also evidenced by the expression of embryonic stem (ES) cell markers, although the preferred test for pluripotency of a cell or population of cells generated using the compositions and methods described herein is the demonstration that a cell has the developmental potential to differentiate into cells of each of the three germ layers. In some embodiments, a pluripotent cell is termed an “undifferentiated cell.” Accordingly, the terms “pluripotency” or a “pluripotent state” as used herein refer to the developmental potential of a cell that provides the ability for the cell to differentiate into all three embryonic germ layers (endoderm, mesoderm and ectoderm). Those of skill in the art are aware of the embryonic germ layer or lineage that gives rise to a given cell type. A cell in a pluripotent state typically has the potential to divide in vitro for a long period of time, e.g., greater than one year or more than 30 passages.

[0147] The term “multipotent” when used in reference to a “multipotent cell” refers to a cell that has the developmental potential to differentiate into cells of one or more germ layers, but not all three. Thus, a multipotent cell can also be termed a “partially differentiated cell.” Multipotent cells are well known in the art, and examples of multipotent cells include adult stem cells, such as for example, hematopoietic stem cells and neural stem cells. “Multipotent” indicates that a cell may form many types of cells in a given lineage, but not cells of other lineages. For example, a multipotent hematopoietic cell can form the many different types of blood cells (red, white, platelets, etc. . . . ), but it cannot form neurons. Accordingly, the term “multipotency” refers to a state of a cell with a degree of developmental potential that is less than totipotent and pluripotent.

[0148] The terms “stem cell” or “undifferentiated cell” as used herein, refer to a cell in an undifferentiated or partially differentiated state that has the property of self-renewal and has the developmental potential to differentiate into multiple cell types, without a specific implied meaning regarding developmental potential (i.e., totipotent, pluripotent, multipotent, etc.). A stem cell is capable of proliferation and giving rise to more such stem cells while maintaining its developmental potential. In theory, self-renewal can occur by either of two major mechanisms. Stem cells can divide asymmetrically, which is known as obligatory asymmetrical differentiation, with one daughter cell retaining the developmental potential of the parent stem cell and the other daughter cell expressing some distinct other specific function, phenotype and/or developmental potential from the parent cell. The daughter cells themselves can be induced to proliferate and produce progeny that subsequently differentiate into one or more mature cell types, while also retaining one or more cells with parental developmental potential. A differentiated cell may derive from a multipotent cell, which itself is derived from a multipotent cell, and so on. While each of these multipotent cells may be considered stem cells, the range of cell types each such stem cell can give rise to, i.e., their developmental potential, can vary considerably. Alternatively, some of the stem cells in a population can divide symmetrically into two stem cells, known as stochastic differentiation, thus maintaining some stem cells in the population as a whole, while other cells in the population give rise to differentiated progeny only. Accordingly, the term “stem cell” refers to any subset of cells that have the developmental potential, under particular circumstances, to differentiate to a more specialized or differentiated phenotype, and which retain the capacity, under certain circumstances, to proliferate without substantially differentiating. In some embodiments, the term stem cell refers generally to a naturally occurring parent cell whose descendants (progeny cells) specialize, often in different directions, by differentiation, e.g., by acquiring completely individual characters, as occurs in progressive diversification of embryonic cells and tissues. Some differentiated cells also have the capacity to give rise to cells of greater developmental potential. Such capacity may be natural or may be induced artificially upon treatment with various factors. Cells that begin as stem cells might proceed toward a differentiated phenotype, but then can be induced to “reverse” and re-express the stem cell phenotype, a term often referred to as “dedifferentiation” or “reprogramming” or “retrodifferentiation” by persons of ordinary skill in the art.

[0149] The term “embryonic stem cell” as used herein refers to naturally occurring pluripotent stem cells of the inner cell mass of the embryonic blastocyst (see, for e.g., U.S. Pat. Nos. 5,843,780; 6,200,806; 7,029,913; 7,584,479, which are incorporated herein by reference). Such cells can similarly be obtained from the inner cell mass of blastocysts derived from somatic cell nuclear transfer (see, for example, U.S. Pat. Nos. 5,945,577, 5,994,619, 6,235,970, which are incorporated herein by reference). Embryonic stem cells are pluripotent and give rise during development to all derivatives of the three primary germ layers: ectoderm, endoderm and mesoderm. In other words, they can develop into each of the more than 200 cell types of the adult body when given sufficient and necessary stimulation for a specific cell type. They do not contribute to the extra-embryonic membranes or the placenta, i.e., are not totipotent.

[0150] As used herein, the distinguishing characteristics of an embryonic stem cell define an “embryonic stem cell phenotype.” Accordingly, a cell has the phenotype of an embryonic stem cell if it possesses one or more of the unique characteristics of an embryonic stem cell, such that that cell can be distinguished from other cells not having the embryonic stem cell phenotype. Exemplary distinguishing embryonic stem cell phenotype characteristics include, without limitation, expression of specific cell-surface or intracellular markers, including protein and microRNAs, gene expression profiles, methylation profiles, deacetylation profiles, proliferative capacity, differentiation capacity, karyotype, responsiveness to particular culture conditions, and the like. In some embodiments, the determination of whether a cell has an “embryonic stem cell phenotype” is made by comparing one or more characteristics of the cell to one or more characteristics of an embryonic stem cell line cultured within the same laboratory.

[0151] The term “somatic stem cell” is used herein to refer to any pluripotent or multipotent stem cell derived from non-embryonic tissue, including fetal, juvenile, and adult tissue. Natural somatic stem cells have been isolated from a wide variety of adult tissues including blood, bone marrow, brain, olfactory epithelium, skin, pancreas, skeletal muscle, and cardiac muscle. Each of these somatic stem cells can be characterized based on gene expression, factor responsiveness, and morphology in culture. Exemplary naturally occurring somatic stem cells include, but are not limited to, neural stem cells, neural crest stem cells, mesenchymal stem cells, hematopoietic stem cells, and pancreatic stem cells. In some aspects described herein, a “somatic pluripotent cell” refers to a somatic cell, or a progeny cell of the somatic cell, that has had its developmental potential altered, i.e., increased, to that of a pluripotent state by contacting with, or the introduction of, one or more reprogramming factors using the compositions and methods described herein.

[0152] The term “progenitor cell” is used herein to refer to cells that have greater developmental potential, i.e., a cellular phenotype that is more primitive (e.g., is at an earlier step along a developmental pathway or progression) relative to a cell which it can give rise to by differentiation. Often, progenitor cells have significant or very high proliferative potential. Progenitor cells can give rise to multiple distinct cells having lower developmental potential, i.e., differentiated cell types, or to a single differentiated cell type, depending on the developmental pathway and on the environment in which the cells develop and differentiate.

[0153] As used herein, the term “somatic cell” refers to any cell other than a germ cell, a cell present in or obtained from a pre-implantation embryo, or a cell resulting from proliferation of such a cell in vitro. Stated another way, a somatic cell refers to any cell forming the body of an organism, as opposed to a germline cell. In mammals, germline cells (also known as “gametes”) are the spermatozoa and ova which fuse during fertilization to produce a cell called a zygote, from which the entire mammalian embryo develops. Every other cell type in the mammalian body—apart from the sperm and ova, the cells from which they are made (gametocytes) and undifferentiated, pluripotent, embryonic stem cells—is a somatic cell: internal organs, skin, bones, blood, and connective tissue are all made up of somatic cells. In some embodiments the somatic cell is a “non-embryonic somatic cell,” by which is meant a somatic cell that is not present in or obtained from an embryo and does not result from proliferation of such a cell in vitro. In some embodiments the somatic cell is an “adult somatic cell,” by which is meant a cell that is present in or obtained from an organism other than an embryo or a fetus or results from proliferation of such a cell in vitro. Unless otherwise indicated, the compositions and methods for reprogramming a somatic cell described herein can be performed both in vivo and in vitro (where in vivo is practiced when a somatic cell is present within a subject, and where in vitro is practiced using an isolated somatic cell maintained in culture).

[0154] The term “differentiated cell” encompasses any somatic cell that is not, in its native form, pluripotent, as that term is defined herein. Thus, the term a “differentiated cell” also encompasses cells that are partially differentiated, such as multipotent cells, or cells that are stable, non-pluripotent partially reprogrammed, or partially differentiated cells, generated using any of the compositions and methods described herein. In some embodiments, a differentiated cell is a cell that is a stable intermediate cell, such as a non-pluripotent, partially reprogrammed cell. It should be noted that placing many primary cells in culture can lead to some loss of fully differentiated characteristics. Thus, simply culturing such differentiated or somatic cells does not render these cells non-differentiated cells (e.g. undifferentiated cells) or pluripotent cells. The transition of a differentiated cell (including stable, non-pluripotent partially reprogrammed cell intermediates) to pluripotency requires a reprogramming stimulus beyond the stimuli that lead to partial loss of differentiated character upon placement in culture. Reprogrammed and, in some embodiments, partially reprogrammed cells, also have the characteristic of having the capacity to undergo extended passaging without loss of growth potential, relative to parental cells having lower developmental potential, which generally have capacity for only a limited number of divisions in culture. In some embodiments, the term “differentiated cell” also refers to a cell of a more specialized cell type (i.e., decreased developmental potential) derived from a cell of a less specialized cell type (i.e., increased developmental potential) (e.g., from an undifferentiated cell or a reprogrammed cell) where the cell has undergone a cellular differentiation process.

[0155] The term “reprogramming” as used herein refers to a process that reverses the developmental potential of a cell or population of cells (e.g., a somatic cell). Stated another way, reprogramming refers to a process of driving a cell to a state with higher developmental potential, i.e., backwards to a less differentiated state. The cell to be reprogrammed can be either partially or terminally differentiated prior to reprogramming. In some embodiments of the aspects described herein, reprogramming encompasses a complete or partial reversion of the differentiation state, i.e., an increase in the developmental potential of a cell, to that of a cell having a pluripotent state. In some embodiments, reprogramming encompasses driving a somatic cell to a pluripotent state, such that the cell has the developmental potential of an embryonic stem cell, i.e., an embryonic stem cell phenotype. In some embodiments, reprogramming also encompasses a partial reversion of the differentiation state or a partial increase of the developmental potential of a cell, such as a somatic cell or a unipotent cell, to a multipotent state. Reprogramming also encompasses partial reversion of the differentiation state of a cell to a state that renders the cell more susceptible to complete reprogramming to a pluripotent state when subjected to additional manipulations, such as those described herein. Such manipulations can result in endogenous expression of particular genes by the cells, or by the progeny of the cells, the expression of which contributes to or maintains the reprogramming. In certain embodiments, reprogramming of a cell using the synthetic, modified RNAs and methods thereof described herein causes the cell to assume a multipotent state (e.g., is a multipotent cell). In some embodiments, reprogramming of a cell (e.g. a somatic cell) using the synthetic, modified RNAs and methods thereof described herein causes the cell to assume a pluripotent-like state or an embryonic stem cell phenotype. The resulting cells are referred to herein as “reprogrammed cells,” “somatic pluripotent cells,” and “RNA-induced somatic pluripotent cells.” The term “partially reprogrammed somatic cell” as referred to herein refers to a cell which has been reprogrammed from a cell with lower developmental potential by the methods as disclosed herein, such that the partially reprogrammed cell has not been completely reprogrammed to a pluripotent state but rather to a non-pluripotent, stable intermediate state. Such a partially reprogrammed cell can have a developmental potential lower that a pluripotent cell, but higher than a multipotent cell, as those terms are defined herein. A partially reprogrammed cell can, for example, differentiate into one or two of the three germ layers, but cannot differentiate into all three of the germ layers.

[0156] The term “developmental potential altering factor,” as used herein, refers to a factor such as a protein or RNA, the expression of which alters the developmental potential of a cell, e.g., a somatic cell, to another developmental state, e.g., a pluripotent state. Such an alteration in the developmental potential can be a decrease (i.e., to a more differentiated developmental state) or an increase (i.e., to a less differentiated developmental state). A developmental potential altering factor, can be for example, an RNA or protein product of a gene encoding a reprogramming factor, such as SOX2, an RNA or protein product of a gene encoding a cell-type specific polypeptide transcription factor, such as myoD, a microRNA, a small molecule, and the like.

[0157] The term a “reprogramming factor,” as used herein, refers to a developmental potential altering factor, as that term is defined herein, such as a protein, RNA, or small molecule, the expression of which contributes to the reprogramming of a cell, e.g. a somatic cell, to a less differentiated or undifferentiated state, e.g. to a cell of a pluripotent state or partially pluripotent state. A reprogramming factor can be, for example, transcription factors that can reprogram cells to a pluripotent state, such as SOX2, OCT3/4, KLF4, NANOG, LIN-28, c-MYC, and the like, including as any gene, protein, RNA or small molecule, that can substitute for one or more of these in a method of reprogramming cells in vitro. In some embodiments, exogenous expression of a reprogramming factor, using the synthetic modified RNAs and methods thereof described herein, induces endogenous expression of one or more reprogramming factors, such that exogenous expression of one or more reprogramming factors is no longer required for stable maintenance of the cell in the reprogrammed or partially reprogrammed state. “Reprogramming to a pluripotent state in vitro” is used herein to refer to in vitro reprogramming methods that do not require and/or do not include nuclear or cytoplasmic transfer or cell fusion, e.g., with oocytes, embryos, germ cells, or pluripotent cells. A reprogramming factor can also be termed a “de-differentiation factor,” which refers to a developmental potential altering factor, as that term is defined herein, such as a protein or RNA, that induces a cell to de-differentiate to a less differentiated phenotype, that is a de-differentiation factor increases the developmental potential of a cell.

[0158] As used herein, the term “differentiation factor” refers to a developmental potential altering factor, as that term is defined herein, such as a protein, RNA, or small molecule, that induces a cell to differentiate to a desired cell-type, i.e., a differentiation factor reduces the developmental potential of a cell. In some embodiments, a differentiation factor can be a cell-type specific polypeptide, however this is not required. Differentiation to a specific cell type can require simultaneous and/or successive expression of more than one differentiation factor. In some aspects described herein, the developmental potential of a cell or population of cells is first increased via reprogramming or partial reprogramming using synthetic, modified RNAs, as described herein, and then the cell or progeny cells thereof produced by such reprogramming are induced to undergo differentiation by contacting with, or introducing, one or more synthetic, modified RNAs encoding differentiation factors, such that the cell or progeny cells thereof have decreased developmental potential.

[0159] In the context of cell ontogeny, the term “differentiate”, or “differentiating” is a relative term that refers to a developmental process by which a cell has progressed further down a developmental pathway than its immediate precursor cell. Thus in some embodiments, a reprogrammed cell as the term is defined herein, can differentiate to a lineage-restricted precursor cell (such as a mesodermal stem cell), which in turn can differentiate into other types of precursor cells further down the pathway (such as a tissue specific precursor, for example, a cardiomyocyte precursor), and then to an end-stage differentiated cell, which plays a characteristic role in a certain tissue type, and may or may not retain the capacity to proliferate further.

[0160] As used herein, the term “cell-type specific polypeptide” refers to a polypeptide that is expressed in a cell having a particular phenotype (e.g., a muscle cell, a pancreatic β cell) but is not generally expressed in other cell types with different phenotypes. As but one example, MyoD is expressed specifically in muscle cells but not in non-muscle cells, thus MyoD is a cell-type specific polypeptide.

[0161] As used herein, the term “without the formation of a pluripotent intermediate cell” refers to the transdifferentiation of one cell type to another cell type, preferably, in one step; thus a method that modifies the differentiated phenotype or developmental potential of a cell without the formation of a pluripotent intermediate cell does not require that the cell be first dedifferentiated (or reprogrammed) and then differentiated to another cell type. Instead, the cell type is merely “switched” from one cell type to another without going through a less differentiated phenotype. Accordingly, transdifferentiation refers to a change in the developmental potential of a cell whereby the cell is induced to become a different cell having a similar developmental potential, e.g., a liver cell to a pancreatic cell, a pancreatic α cell into a pancreatic β cell, etc.

[0162] The term “expression” refers to the cellular processes involved in producing RNA and proteins and as appropriate, secreting proteins, including where applicable, but not limited to, for example, transcription, translation, folding, modification and processing. “Expression products” include RNA transcribed from a gene, and polypeptides obtained by translation of mRNA transcribed from a gene. In some embodiments, an expression product is transcribed from a sequence that does not encode a polypeptide, such as a microRNA.

[0163] As used herein, the term “transcription factor” refers to a protein that binds to specific parts of DNA using DNA binding domains and is part of the system that controls the transcription of genetic information from DNA to RNA.

[0164] As used herein, the term “small molecule” refers to a chemical agent which can include, but is not limited to, a peptide, a peptidomimetic, an amino acid, an amino acid analog, a polynucleotide, a polynucleotide analog, an aptamer, a nucleotide, a nucleotide analog, an organic or inorganic compound (e.g., including heterorganic and organometallic compounds) having a molecular weight less than about 10,000 grams per mole, organic or inorganic compounds having a molecular weight less than about 5,000 grams per mole, organic or inorganic compounds having a molecular weight less than about 1,000 grams per mole, organic or inorganic compounds having a molecular weight less than about 500 grams per mole, and salts, esters, and other pharmaceutically acceptable forms of such compounds.

[0165] The term “exogenous” as used herein refers to a nucleic acid (e.g., a synthetic, modified RNA encoding a transcription factor), or a protein (e.g., a transcription factor) that has been introduced by a process involving the hand of man into a biological system such as a cell or organism in which it is not normally found, or in which it is found in lower amounts. A factor (e.g. a synthetic, modified RNA encoding a transcription factor, or a protein, e.g., a polypeptide) is considered exogenous if it is introduced into an immediate precursor cell or a progeny cell that inherits the substance. In contrast, the term “endogenous” refers to a factor or expression product that is native to the biological system or cell (e.g., endogenous expression of a gene, such as, e.g., SOX2 refers to production of a SOX2 polypeptide by the endogenous gene in a cell). In some embodiments, the introduction of one or more exogenous factors to a cell, e.g., a developmental potential altering factor, using the compositions and methods comprising synthetic, modified RNAs described herein, induces endogenous expression in the cell or progeny cell(s) thereof of a factor or gene product necessary for maintenance of the cell or progeny cell(s) thereof in a new developmental potential.

[0166] The term “isolated” or “partially purified” as used herein refers, in the case of a nucleic acid or polypeptide, to a nucleic acid or polypeptide separated from at least one other component (e.g., nucleic acid or polypeptide) that is present with the nucleic acid or polypeptide as found in its natural source and/or that would be present with the nucleic acid or polypeptide when expressed by a cell, or secreted in the case of secreted polypeptides. A chemically synthesized nucleic acid or polypeptide or one synthesized using in vitro transcription/translation is considered “isolated”.

[0167] The term “isolated cell” as used herein refers to a cell that has been removed from an organism in which it was originally found, or a descendant of such a cell. Optionally the cell has been cultured in vitro, e.g., in the presence of other cells. Optionally, the cell is later introduced into a second organism or re-introduced into the organism from which it (or the cell or population of cells from which it descended) was isolated.

[0168] The term “isolated population” with respect to an isolated population of cells as used herein refers to a population of cells that has been removed and separated from a mixed or heterogeneous population of cells. In some embodiments, an isolated population is a “substantially pure” population of cells as compared to the heterogeneous population from which the cells were isolated or enriched. In some embodiments, the isolated population is an isolated population of pluripotent cells which comprise a substantially pure population of pluripotent cells as compared to a heterogeneous population of somatic cells from which the pluripotent cells were derived.

[0169] The term “immediate precursor cell” is used herein to refer to a parental cell from which a daughter cell has arisen by cell division.

[0170] As used herein, the terms “synthetic, modified RNA” or “modified RNA” refer to an RNA molecule produced in vitro, which comprise at least one modified nucleoside as that term is defined herein below. The synthetic, modified RNA composition does not encompass mRNAs that are isolated from natural sources such as cells, tissue, organs etc., having those modifications, but rather only synthetic, modified RNAs that are synthesized using in vitro techniques. The term “composition,” as applied to the terms “synthetic, modified RNA” or “modified RNA,” encompasses a plurality of different synthetic, modified RNA molecules (e.g., at least 2, at least 3, at least 4, at least 5, at least 6, at least 7, at least 8, at least 9, at least 10, at least 11, at least 12, at least 13, at least 14, at least 15, at least 16, at least 17, at least 18, at least 19, at least 20, at least 25, at least 30, at least 40, at least 50, at least 75, at least 90, at least 100 synthetic, modified RNA molecules or more). In some embodiments, a synthetic, modified RNA composition can further comprise other agents (e.g., an inhibitor of interferon expression or activity, a transfection reagent, etc.). Such a plurality can include synthetic, modified RNA of different sequences (e.g., coding for different polypeptides), synthetic, modified RNAs of the same sequence with differing modifications, or any combination thereof.

[0171] As used herein the term “modified nucleoside” refers to a ribonucleoside that encompasses modification(s) relative to the standard guanine (G), adenine (A), cytidine (C), and uridine (U) nucleosides. Such modifications can include, for example, modifications normally introduced post-transcriptionally to mammalian cell mRNA, and artificial chemical modifications, as known to one of skill in the art.

[0172] As used herein, the term “polypeptide” refers to a polymer of amino acids comprising at least 2 amino acids (e.g., at least 5, at least 10, at least 20, at least 30, at least 40, at least 50, at least 60, at least 70, at least 80, at least 90, at least 100, at least 125, at least 150, at least 175, at least 200, at least 225, at least 250, at least 275, at least 300, at least 350, at least 400, at least 450, at least 500, at least 600, at least 700, at least 800, at least 900, at least 1000, at least 2000, at least 3000, at least 4000, at least 5000, at least 6000, at least 7000, at least 8000, at least 9000, at least 10,000 amino acids or more). The terms “protein” and “polypeptide” are used interchangeably herein. As used herein, the term “peptide” refers to a relatively short polypeptide, typically between about 2 and 60 amino acids in length.

[0173] As used herein, the term “added co-transcriptionally” refers to the addition of a feature, e.g., a 5′ diguanosine cap or other modified nucleoside, to a synthetic, modified RNA during transcription of the RNA molecule (i.e., the modified RNA is not fully transcribed prior to the addition of the 5′ cap).

[0174] The term “contacting” or “contact” as used herein in connection with contacting a cell with one or more synthetic, modified RNAs as described herein, includes subjecting a cell to a culture medium which comprises one or more synthetic, modified RNAs at least one time, or a plurality of times, or to a method whereby such a synthetic, modified RNA is forced to contact a cell at least one time, or a plurality of times, i.e., a transfection system. Where such a cell is in vivo, contacting the cell with a synthetic, modified RNA includes administering the synthetic, modified RNA in a composition, such as a pharmaceutical composition, to a subject via an appropriate administration route, such that the compound contacts the cell in vivo.

[0175] The term “transfection” as used herein refers the use of methods, such as chemical methods, to introduce exogenous nucleic acids, such as the synthetic, modified RNAs described herein, into a cell, preferably a eukaryotic cell. As used herein, the term transfection does not encompass viral-based methods of introducing exogenous nucleic acids into a cell. Methods of transfection include physical treatments (electroporation, nanoparticles, magnetofection), and chemical-based transfection methods. Chemical-based transfection methods include, but are not limited to, cyclodextrin, polymers, liposomes, and nanoparticles. In some embodiments, cationic lipids or mixtures thereof can be used to transfect the synthetic, modified RNAs described herein, into a cell, such as DOPA, Lipofectamine and UptiFectin. In some embodiments, cationic polymers such as DEAE-dextran or polyethylenimine, can be used to transfect a synthetic, modified RNAs described herein.

[0176] The term “transduction” as used herein refers to the use of viral particles or viruses to introduce exogenous nucleic acids into a cell.

[0177] As used herein, the term “transfection reagent” refers to any agent that induces uptake of a synthetic, modified RNA into a host cell. Also encompassed are agents that enhance uptake e.g., by at least 10%, at least 20%, at least 30%, at least 40%, at least 50%, at least 60%, at least 70%, at least 80%, at least 90%, at least 95%, at least 99%, at least 1-fold, at least 2-fold, at least 5-fold, at least 10-fold, at least 25-fold, at least 500-fold, at least 100-fold, at least 1000-fold, or more, compared to a synthetic, modified RNA administered in the absence of such a reagent. In one embodiment, a cationic or non-cationic lipid molecule useful for preparing a composition or for co-administration with a synthetic, modified RNA is used as a transfection reagent. In other embodiments, the synthetic, modified RNA comprises a chemical linkage to attach e.g., a ligand, a peptide group, a lipophilic group, a targeting moiety etc. In other embodiments, the transfection reagent comprises a charged lipid, an emulsion, a liposome, a cationic or non-cationic lipid, an anionic lipid, or a penetration enhancer as known in the art or described herein.

[0178] As used herein, the term “repeated transfections” refers to repeated transfection of the same cell culture with a synthetic, modified RNA a plurality of times (e.g., more than once or at least twice). In some embodiments, the cell culture is transfected at least twice, at least 3 times, at least 4 times, at least 5 times, at least 6 times, at least 7 times, at least 8 times, at least 9 times, at least 10 times, at least 11 times, at least 12 times, at least 13 times, at least 14 times, at least 15 times, at least 16 times, at least 17 times at least 18 times, at least 19 times, at least 20 times, at least 25 times, at least 30 times, at least 35 times, at least 40 times, at least 45 times, at least 50 times or more. The transfections can be repeated until a desired phenotype of the cell is achieved.

[0179] The time between each repeated transfection is referred to herein as the “frequency of transfection.” In some embodiments, the frequency of transfection occurs every 6 h, every 12 h, every 24 h, every 36 h, every 48 h, every 60 h, every 72 h, every 96 h, every 108 h, every 5 days, every 7 days, every 10 days, every 14 days, every 3 weeks, or more during a given time period in any developmental potential altering regimen, such as a reprogramming, transdifferentiation or differentiation regimen. The frequency can also vary, such that the interval between each dose is different (e.g., first interval 36 h, second interval 48 h, third interval 72 h etc). It should be understood depending upon the schedule and duration of repeated transfections, it will often be necessary to split or passage cells or change or replace the media during the transfection regimen to prevent overgrowth and replace nutrients. For the purposes of the methods described herein, transfections of a culture resulting from passaging an earlier transfected culture is considered “repeated transfection,” “repeated contacting” or “contacting a plurality of times,” unless specifically indicated otherwise.

[0180] As used herein, the term “permits repeated transfections” refers to a synthetic, modified RNA or synthetic, modified RNA composition that can be transfected into a given cell culture with reduced cytotoxicity compared to an RNA or RNA composition having the same sequence(s) which lacks modifications to the RNA. As used herein, the term “reduced cytotoxicity” refers to the death of less than 50% of the cells in a cell culture repeatedly transfected with a synthetic, modified RNA or synthetic, modified RNA composition, e.g., less than 40%, less than 30%, less than 20%, less than 10%, less than 5%, less than 1%, less than 0.1% or fewer compared to transfection with a composition having the same sequence(s) but lacking modifications to the RNA. The amount of cell death in a culture can be determined using a standard Trypan Blue Exclusion assay, which turns dead cells blue while leaving living cells uncolored. Alternatively “reduced cytotoxicity” can be assessed by measuring apoptosis using e.g., a TUNEL assay. Other useful measures for determining “reduced cytotoxicity” include e.g., flow cytometric and bead based measurements of viability, cell growth, cellularity (measured e.g., microscopically and quantitated by a hemocytometer), global protein production, secretion of cytokines (e.g., Type 1 IFNs), and expression level of interferon response signature genes (e.g., IFIT1, IFITM1, OAS1, IFNα1, IFNB1, PKR, RIG-I, TLR7, TLR8 etc).

[0181] As used herein, the term “targeting moiety” refers to an agent that homes to or preferentially associates or binds to a particular tissue, cell type, receptor, infecting agent or other area of interest. The addition of a targeting moiety to an RNA delivery composition will enhance the delivery of the composition to a desired cell type or location. The addition to, or expression of, a targeting moiety in a cell enhances the localization of that cell to a desired location within an animal or subject.

[0182] As used herein, the terms “innate immune response” or “interferon response” refers to a cellular defense response initiated by a cell in response to recognition of infection by a foreign organism, such as a virus or bacteria or a product of such an organism, e.g., an RNA lacking the modifications characteristic of RNAs produced in the subject cell. The innate immune response protects against viral and bacterial infection by inducing the death of cells that detect exogenous nucleic acids e.g., by detection of single- or double-stranded RNA that are recognized by pattern recognition receptors such as RIG-I, protein kinase R (PKR), MDA5, or nucleic acid-recognizing Toll-like receptors, e.g., TLR3, TLR7, TLR8, and TLR9, and activating an interferon response. As used herein, the innate immune response or interferon response operates at the single cell level causing cytokine expression, cytokine release, global inhibition of protein synthesis, global destruction of cellular RNA, upregulation of major histocompatibility molecules, and/or induction of apoptotic death, induction of gene transcription of genes involved in apoptosis, anti-growth, and innate and adaptive immune cell activation. Some of the genes induced by type I IFNs include PKR, ADAR (adenosine deaminase acting on RNA), OAS (2′,5′-oligoadenylate synthetase), RNase L, and Mx proteins. PKR and ADAR lead to inhibition of translation initiation and RNA editing, respectively. OAS is a dsRNA-dependent synthetase that activates the endoribonuclease RNase L to degrade ssRNA.

[0183] Accordingly, as used herein, the phrases “innate immune response signature” or “interferon response signature” genes refer to the set of genes that are expressed or up-regulated upon an interferon response of a cell, and include, but are not limited to, IFNα, IFNB1, IFIT, OAS1, PKR, RIGI, CCL5, RAP1A, CXCL10, IFIT1, CXCL11, MX1, RP11-167P23.2, HERC5, GALR3, IFIT3, IFIT2, RSAD2, CDC20, TLR3, TLR7, TLR8, and TLR9.

[0184] As used herein, the term “inhibitor of interferon expression or activity” refers to an agent (e.g., small molecule, antibody, antibody fragment, soluble receptor, RNA interference molecule etc.) that: (a) inhibits translation of an interferon polypeptide from an mRNA transcript, (b) inactivates an interferon polypeptide, (c) prevents interferon binding to its receptor or (d) binds/sequesters an interferon polypeptide e.g., for degradation.

[0185] As used herein, the term “unsupervised clustering analysis” or “unsupervised cluster analysis” refers to methods used in multivariate analysis to divide up objects into similar groups, or, in some embodiments, groups whose members are all close to one another on various dimensions being measured in the various objects. In cluster analysis, one does not start with any a priori notion of group characteristics. As used herein, “hierarchical cluster analysis” or “hierarchical clustering” refer to a general approach to unsupervised cluster analysis, in which the purpose is to group together objects or records that are “close” to one another. A key component of the analysis is repeated calculation of distance measures between objects, and between clusters once objects begin to be grouped into clusters. The outcome is typically represented graphically as a dendrogram. Hierarchical cluster analysis can be performed using any of a variety of unbiased computational methods, algorithms and software programs known to one of skill in the art that identify clusters or natural data structures from large data sets, such as, for example, gene expression data sets. Such methods include, but are not limited to, bottom-up hierarchical clustering, K-means clustering Affinity Propagation, non-Negative Matrix Factorization, spectral clustering, Self-Organizing Map (SOM) algorithms, and the like. In some embodiments of the aspects described herein, a SOM-based method for use in unsupervised hierarchical clustering analysis of cells contacted with the synthetic, modified RNAs described herein is the Automatic clustering using density-equalized SOM Ensembles (AUTOsome) method as described in A. M. Newman and J. B. Cooper (2010, Cell Stem Cell, 7:258-262) and A. M. Newman and J. B. Cooper (2010, BMC Bioinformatics 2010, 11:117), the contents of each of which are herein incorporated in their entireties by reference. After a clustering analysis of a given data set, such as a gene expression data set, appropriate class-based statistical tests like Student's t-test, ANOVA, or Gene Set Enrichment Analysis can be used to evaluate significance.

[0186] As used herein the term “comprising” or “comprises” is used in reference to compositions, methods, and respective component(s) thereof, that are essential to the invention, yet open to the inclusion of unspecified elements, whether essential or not.

[0187] As used herein the term “consisting essentially of” refers to those elements required for a given embodiment. The term permits the presence of elements that do not materially affect the basic and novel or functional characteristic(s) of that embodiment of the invention.

[0188] The term “consisting of” refers to compositions, methods, and respective components thereof as described herein, which are exclusive of any element not recited in that description of the embodiment.

### BRIEF DESCRIPTION OF THE FIGURES

[0189] This patent application file contains at least one drawing executed in color. Copies of this patent or patent application publication with color drawing(s) will be provided by the Patent Office upon request and payment of the necessary fee.

[0190] FIG. 1 depicts a synthetic, modified RNA production flowchart. To construct a template for RNA transcription reactions, the ORF of a gene of interest is first PCR amplified from a cDNA. Long oligonucleotides containing UTR sequences are then joined to the top strand of ORF amplicons by a thermostable DNA ligase, mediated by annealing to splint oligos which bring the desired single-stranded DNA (ssDNA) ends together. An upstream T7 promoter is incorporated in the 5′ UTR fragment. The ssDNA product is amplified using generic primers and TA cloned. A polyA tail is added with a PCR reaction using a T₁₂₀-heeled reverse primer, and the amplicons are used to template IVT reactions. Modified and unmodified nucleobases are used in the IVT reaction. An anti-reverse di-guanosine cap analog (ARCA) is included in the IVT reaction at four-fold higher concentration than guanosine triphosphate (GTP), as a result of which an estimated 80% of the product is capped. Spin-column purified IVT product is DNase-treated to eliminate the DNA template. Treatment with a phosphatase is used to remove immunonogenic 5′ triphosphate moieties from the uncapped RNA fraction. The completed synthetic, modified RNA is then re-purified for use in transfections.

[0191] FIGS. 2A-2R demonstrate that synthetic, modified RNA overcomes cellular anti-viral responses and can be used to direct and alter cell fate and developmental potential. FIGS. 2A-2D show microscopy images showing keratinocytes transfected 24 hours earlier with 400 ng/well of synthetic, unmodified (No Mods) (FIG. 2A), 5-methyl-cytosine modified (5mC) (FIG. 2B), pseudouridine modified (Psi) (FIG. 2C), or 5mC+Psi modified RNA encoding GFP (FIG. 2D). FIG. 2E shows percent viability and FIG. 2L depicts mean fluorescence intensity of the cells shown in FIGS. 2A-2D as measured by flow cytometry. FIGS. 2F-2K demonstrate quantitative RT-PCR data showing expression of six interferon-regulated genes in BJ fibroblasts 24 hours after transfection with unmodified (No Mods), or synthetic, modified (5mC+Psi) RNA encoding GFP (1200 ng/well), and vehicle and untransfected controls. FIG. 2M depicts flow cytometry histograms showing GFP expression in keratinocytes transfected with 0-160 ng of modified RNA, 24 hours post transfection. FIG. 2N shows microscopy images of keratinocytes co-transfected with synthetic, modified RNAs encoding GFP with a nuclear localization signal, and cytosolic mCherry proteins. FIG. 2O shows growth kinetics of BJ fibroblasts transfected daily with unmodified, or synthetic, modified RNAs encoding a destabilized nuclear-localized GFP, and vehicle and untransfected controls for 10 days. FIG. 2P shows immunostaining for the muscle-specific proteins myogenin and myosin heavy chain (MyHC) in murine C3H/10T1/2 cell cultures 3 days after 3 consecutive daily transfections with a synthetic, modified RNA encoding MYOD. FIGS. 2Q-2R demonstrate sustained GFP expression of synthetic, modified RNA transfected cells described in FIG. 2O at day 10 of transfection shown by fluorescence imaging with bright field overlay (FIG. 2Q), and flow cytometry (FIG. 2R). Error bars indicate s.d., n=3 for all panels.

[0192] FIGS. 3A-3F demonstrate penetrant and sustained protein expression mediated by synthetic, modified RNA transfection in diverse human cell types, and effects on cell viability and global gene expression. FIG. 3A depicts analysis of representative flow cytometry data showing penetrance of GFP expression 24-hour post-transfection of six human cell types transfected with 1000 ng of synthetic, modified RNA encoding GFP. Cell types included: human epidermal keratinocytes (HEKs), adipose-derived stem cells (ADSCs), and four different human fibroblast types (BJ, Detroit 551, MRC-5 and dH1f). Error bars show s.d. for triplicate wells. FIGS. 3B and 3D show representative expression time courses for cells transfected with synthetic, modified RNAs encoding high- and low-stability GFP variants (eGFP and d2eGFP, respectively), assayed by flow cytometry. FIG. 3C shows Annexin V staining at indicated days of BJ fibroblasts transfected daily over the course of 10 days. FIG. 3E depicts heatmap data from microarray analysis of BJ fibroblasts transfected for 10 consecutive days with synthetic, modified RNA encoding GFP, vehicle, or untransfected controls. A number of cell stress pathways are shown demonstrating that prolonged transfection with synthetic, modified-RNA does not significantly impact the molecular profile of transfected cells beyond upregulation of a limited number of interferon/NFκB genes highlighted in FIG. 3F. FIG. 3F depicts all genes upregulated greater than 2-fold in synthetic, modified RNA transfected cells versus untransfected cells (right) or vehicle transfected (left) showing induction of number of interferon/NFκB signaling genes consistent with the near but not absolute attenuation of interferon response shown in FIG. 2D.

[0193] FIGS. 4A-4F demonstrate generation of RNA-induced pluripotent stem cells (RiPS) using the synthetic, modified RNAs described herein. FIG. 4A shows immunostaining for human KLF4, OCT4, and SOX2 proteins in keratinocytes 15 hours post-transfection with synthetic, modified RNA encoding KLF4, OCT4, or SOX2. FIGS. 4B-4D depicts a time course analysis showing kinetics and stability of KLF4, OCT4, and SOX2 proteins after synthetic, modified RNA transfection, as assayed by flow cytometry following intracellular staining of reach protein. FIG. 4E shows brightfield images taken during the derivation of RNA-iPS cells (RiPS) from dH1f fibroblasts showing early epitheliod morphology (day 6), small hES-like colonies (day 17), and appearance of mature iPS clones after mechanical picking and expansion (day 24). FIG. 4F depicts immunohistochemistry data showing expression of a panel of pluripotency markers in expanded RiPS clones derived from dH1f fibroblasts, Detroit 551 (D551) and MRC-5 fetal fibroblasts, BJ post-natal fibroblasts, and cells derived from a skin biopsy taken from an adult cystic fibrosis patient (CF), shown also in high magnification. BG01 hES cells and BJ1 fibroblasts are included as positive and negative controls, respectively.

[0194] FIGS. 5A-5C demonstrate iPS-derivation from five human cell types. FIGS. 5A-5B show an expression time course of low-stability nuclear GFP after a single transfection into keratinocytes, assessed by flow cytometry. Bright-field and GFP images taken at four different time points during a reprogramming experiment are shown. RNA-encoding the low-stability GFP analyzed in the left panel was spiked into the reprogramming cocktail (KMOSL) to visualize sustained protein expression from transfected synthetic, modified RNAs during iPS reprogramming (bottom panel, FIG. 5B). FIG. 5C shows antibody stains of independent RiPS clones derived from cells taken from an adult cystic fibrosis patient (CF cells), BJ postnatal fibroblasts, MRC-5 and Detroit 551 fetal fibroblasts, and human ES-derived dH1f fibroblasts. FIG. 5C panels show cell-surface staining for SSEA-3, SSEA-4, TRA-1-60 and TRA-1-81, and intracellular staining for OCT4 and NANOG. Control stains of BG01 hES cells, dH1f and BJ fibroblasts are shown. Additional control stains show the specificity of the secondary antibody used for the OCT4 and NANOG intracellular stains.

[0195] FIGS. 6A-6B demonstrate efficient RiPS derivation from BJ fibroblasts without passaging. FIG. 6A depicts immunohistochemistry showing expression of pluripotency markers SSEA-4 and TRA-1-60 in a BJ fibroblast reprogramming experiment transfected for 16 days with 600 ng per day of a KMOSL modified RNA cocktail containing a destabilized GFP spike-in. Cultures were fixed for staining at day 18. 50,000 BJ cells were originally seeded onto feeder cells and went unpassaged throughout the course of the experiment. FIG. 6B shows quantification of TRA-1-60 colony count relative to the number of cells seeded.

[0196] FIGS. 7A-7I demonstrate a molecular characterization of RiPS cells. FIG. 7A depicts a heatmap showing results of qRT-PCR analysis measuring the expression of pluripotency-associated genes in RiPS cell lines, parental fibroblasts and viral-derived iPS cells relative to hES cell controls. FIG. 7B depicts a heatmap showing results of OCT4 promoter methylation analysis of RiPS cell lines, parental fibroblasts, and hES cell controls. FIGS. 7C-7H demonstrate global gene expression profiles of BJ-, MRC5- and dH1F-derived RiPS cells shown in scatter plots against parental fibroblasts and hES cells with pluripotency-associated transcripts indicated. FIG. 7I depicts a dendrogram showing unsupervised hierarchical clustering of the global expression profiles for RiPS cells, parental fibroblasts, hES cells, and virus-derived iPS cells. The similarity metric for comparison between different cell lines is indicated on the height of cluster dendrogram. One of skill in the art can use these methods to determine the similarity between a RiPS cell and a human embryonic stem cell, or to determine differences between a RiPS cell and a iPS cell made by another method. This figure indicates that a RiPS cell has a higher degree of similarity to an embryonic stem cell than iPS cells derived using retroviruses, i.e., a RiPS cell has an “embryonic stem cell phenotype.”

[0197] FIGS. 8A-8C demonstrate trilineage differentiation of RiPS cells. FIG. 8A shows yield and typology of blood-lineage colonies produced by directed differentiation of embryoid bodies in methylcellulose assays with RiPS clones derived from BJ, CF, D551 and MCR5 fibroblasts, and a human ES (H1) control. FIG. 8B depicts immunostaining showing expression of the lineage markers Tuj1 (neuronal, ectodermal), and alpha-fetoprotein (epithelial, endodermal) in RiPS clones from 3 independent RiPS derivations subjected to directed differentiation. FIG. 8C shows hematoxylin and eosin staining of BJ- and dH1F-RiPS-derived teratomas showing histological overview, ectoderm (pigmented epithelia (BJ), neural rosettes (dH1F)), mesoderm (cartilage and muscle, both), and endoderm (gut-like endothelium, both). For blood formation and methylcellulose assays, n=3 for each clone.

[0198] FIG. 9 demonstrates teratoma formation and trilineage differentiation of synthetic, modified RNA derived iPS clones in vivo.

[0199] FIGS. 10A-10E demonstrates high and surprising efficiency of pluripotency induction by synthetic, modified RNAs. FIG. 10A shows TRA-1-60 horseradish peroxidase (HRP) staining conducted at day 18 of a BJ-RiPS derivation with modified RNAs encoding KMOSL and FIG. 10B shows frequency of TRA-1-60-positive colonies produced in the experiment relative to number of cells initially seeded. Error bars show s.d., n=6 for each condition. FIG. 10C shows TRA-181 HRP, TRA-160 immunofluorescence and Hoechst staining, and FIG. 10D shows colony frequencies for dH1f-RiPS experiments done using 4-factor (KMOS) and 5-factor (KMOSL) synthetic, modified RNA cocktails under 5% O2 or ambient oxygen culture conditions quantified at day 18. Control wells were transfected with equal doses of synthetic, modified RNA encoding GFP. FIGS. 10E-10G compare kinetics and efficiency of retroviral and synthetic, modified RNA reprogramming. Timeline of colony formation (FIG. 10E), TRA-1-60 HRP immuno-staining (FIG. 10F), and TRA-1-60 positive colony counts (FIG. 10G) of dH1f cells reprogrammed using KMOS retroviruses (MOI=5 of each) or synthetic, modified RNA KMOS cocktails (n=3 for each condition).

[0200] FIGS. 11A-11C demonstrate efficient directed differentiation of RiPS cells to terminally differentiated myogenic fate using synthetic, modified RNA. FIG. 11A shows a schematic of experimental design. FIG. 11B shows bright-field and immunostained images showing large, multi-nucleated, myosin heavy chain (MyHC) and myogenin positive myotubes in cells fixed three days after cessation of MYOD synthetic, modified RNA transfection. Synthetic, modified RNA encoding GFP was administered to the controls. FIG. 11C shows a penetrance of myogenic conversion relative to daily RNA dose. Black bars refer to an experiment in which cultures were plated at 10⁴ cells/cm², grey bars to cultures plated at 5×10³ cells/cm². Error bars show s.d. for triplicate wells.

### DETAILED DESCRIPTION

[0201] Described herein are novel compositions, methods, and kits for changing the phenotype of a cell or cells. These methods, compositions, and kits can be used either to express a desired protein in a cell or tissue, or to change the developmental potential or differentiated phenotype of a cell to that of another, desired cell type. Significantly, the methods and compositions described herein do not utilize exogenous DNA or viral vector-based methods for the expression of protein(s), and thus, do not cause permanent modification of the genome or unintended mutagenic effects.

### RNAs and RNA Modification

[0202] Described herein are synthetic, modified RNAs for changing the phenotype of a cell, such as expressing a polypeptide or altering the developmental potential. As used herein, the term “synthetic, modified RNA” refers to a nucleic acid molecule encoding a factor, such as a polypeptide, to be expressed in a host cell, which comprises at least one modified nucleoside and has at least the following characteristics as the term is used herein: (i) it can be generated by in vitro transcription and is not isolated from a cell; (ii) it is translatable in a mammalian (and preferably human) cell; and (iii) it does not provoke or provokes a significantly reduced innate immune response or interferon response in a cell to which it is introduced or contacted relative to a synthetic, non-modified RNA of the same sequence. A synthetic, modified RNA as described herein permits repeated transfections in a target cell; that is, a cell or cell population transfected with a synthetic, modified RNA molecule as described herein tolerates repeated transfection with such synthetic, modified RNA without significant induction of an innate immune response or interferon response. These three primary criteria for a synthetic, modified RNA molecule described above are described in greater detail below.

[0203] First, the synthetic, modified RNA must be able to be generated by in vitro transcription of a DNA template. Methods for generating templates are well known to those of skill in the art using standard molecular cloning techniques. An additional approach to the assembly of DNA templates that does not rely upon the presence of restriction endonuclease cleavage sites is also described herein (termed “splint-mediated ligation”). The transcribed, synthetic, modified RNA polymer can be modified further post-transcription, e.g., by adding a cap or other functional group.

[0204] To be suitable for in vitro transcription, the modified nucleoside(s) must be recognized as substrates by at least one RNA polymerase enzyme. Generally, RNA polymerase enzymes can tolerate a range of nucleoside base modifications, at least in part because the naturally occurring G, A, U, and C nucleoside bases differ from each other quite significantly. Thus, the structure of a modified nucleoside base for use in generating the synthetic, modified RNAs described herein can generally vary more than the sugar-phosphate moieties of the modified nucleoside. That said, ribose and phosphate-modified nucleosides or nucleoside analogs are known in the art that permit transcription by RNA polymerases. In some embodiments of the aspects described herein, the RNA polymerase is a phage RNA polymerase.

[0205] The modified nucleotides pseudouridine, m5U, s2U, m6A, and m5C are known to be compatible with transcription using phage RNA polymerases, while N1-methylguanosine, N1-methyladenosine, N7-methylguanosine, 2′-)-methyluridine, and 2′-O-methylcytidine are not. Polymerases that accept modified nucleosides are known to those of skill in the art.

[0206] It is also contemplated that modified polymerases can be used to generate synthetic, modified RNAs, as described herein. Thus, for example, a polymerase that tolerates or accepts a particular modified nucleoside as a substrate can be used to generate a synthetic, modified RNA including that modified nucleoside.

[0207] Second, the synthetic, modified RNA must be translatable by the translation machinery of a eukaryotic, preferably mammalian, and more preferably, human cell. Translation generally requires at least a ribosome binding site, a methionine start codon, and an open reading frame encoding a polypeptide. Preferably, the synthetic, modified RNA also comprises a 5′ cap, a stop codon, a Kozak sequence, and a polyA tail. In addition, mRNAs in a eukaryotic cell are regulated by degradation, thus a synthetic, modified RNA as described herein can be further modified to extend its half-life in the cell by incorporating modifications to reduce the rate of RNA degradation (e.g., by increasing serum stability of a synthetic, modified RNA).

[0208] Nucleoside modifications can interfere with translation. To the extent that a given modification interferes with translation, those modifications are not encompassed by the synthetic, modified RNA as described herein. One can test a synthetic, modified RNA for its ability to undergo translation and translation efficiency using an in vitro translation assay (e.g., a rabbit reticulocyte lysate assay, a reporter activity assay, or measurement of a radioactive label in the translated protein) and detecting the amount of the polypeptide produced using SDS-PAGE, Western blot, or immunochemistry assays etc. The translation of a synthetic, modified RNA comprising a candidate modification is compared to the translation of an RNA lacking the candidate modification, such that if the translation of the synthetic, modified RNA having the candidate modification remains the same or is increased then the candidate modification is contemplated for use with the compositions and methods described herein. It is noted that fluoro-modified nucleosides are generally not translatable and can be used herein as a negative control for an in vitro translation assay.

[0209] Third, the synthetic, modified RNA provokes a reduced (or absent) innate immune response or interferon response by the transfected cell or population of cells thereof. mRNA produced in eukaryotic cells, e.g., mammalian or human cells, is heavily modified, the modifications permitting the cell to detect RNA not produced by that cell. The cell responds by shutting down translation or otherwise initiating an innate immune or interferon response. Thus, to the extent that an exogenously added RNA can be modified to mimic the modifications occurring in the endogenous RNAs produced by a target cell, the exogenous RNA can avoid at least part of the target cell's defense against foreign nucleic acids. Thus, in some embodiments, synthetic, modified RNAs as described herein include in vitro transcribed RNAs including modifications as found in eukaryotic/mammalian/human RNA in vivo. Other modifications that mimic such naturally occurring modifications can also be helpful in producing a synthetic, modified RNA molecule that will be tolerated by a cell. With this as a background or threshold understanding for the requirements of a synthetic, modified RNA, the various modifications contemplated or useful in the synthetic, modified RNAs described herein are discussed further herein below.

### RNA Modifications

[0210] In some aspects, provided herein are synthetic, modified RNA molecules encoding polypeptides, where the synthetic, modified RNA molecules comprise one or more modifications, such that introducing the synthetic, modified RNA molecules to a cell results in a reduced innate immune response relative to a cell contacted with synthetic RNA molecules encoding the polypeptides not comprising the one or more modifications.

[0211] The synthetic, modified RNAs described herein include modifications to prevent rapid degradation by endo- and exo-nucleases and to avoid or reduce the cell's innate immune or interferon response to the RNA. Modifications include, but are not limited to, for example, (a) end modifications, e.g., 5′ end modifications (phosphorylation dephosphorylation, conjugation, inverted linkages, etc.), 3′ end modifications (conjugation, DNA nucleotides, inverted linkages, etc.), (b) base modifications, e.g., replacement with modified bases, stabilizing bases, destabilizing bases, or bases that base pair with an expanded repertoire of partners, or conjugated bases, (c) sugar modifications (e.g., at the 2′ position or 4′ position) or replacement of the sugar, as well as (d) internucleoside linkage modifications, including modification or replacement of the phosphodiester linkages. To the extent that such modifications interfere with translation (i.e., results in a reduction of 50% or more in translation relative to the lack of the modification—e.g., in a rabbit reticulocyte in vitro translation assay), the modification is not suitable for the methods and compositions described herein. Specific examples of synthetic, modified RNA compositions useful with the methods described herein include, but are not limited to, RNA molecules containing modified or non-natural internucleoside linkages. Synthetic, modified RNAs having modified internucleoside linkages include, among others, those that do not have a phosphorus atom in the internucleoside linkage. In other embodiments, the synthetic, modified RNA has a phosphorus atom in its internucleoside linkage(s).

[0212] Non-limiting examples of modified internucleoside linkages include phosphorothioates, chiral phosphorothioates, phosphorodithioates, phosphotriesters, aminoalkylphosphotriesters, methyl and other alkyl phosphonates including 3′-alkylene phosphonates and chiral phosphonates, phosphinates, phosphoramidates including 3′-amino phosphoramidate and aminoalkylphosphoramidates, thionophosphoramidates, thionoalkylphosphonates, thionoalkylphosphotriesters, and boranophosphates having normal 3′-5′ linkages, 2′-5′ linked analogs of these, and those) having inverted polarity wherein the adjacent pairs of nucleoside units are linked 3′-5′ to 5′-3′ or 2′-5′ to 5′-2′. Various salts, mixed salts and free acid forms are also included.

[0213] Representative U.S. patents that teach the preparation of the above phosphorus-containing linkages include, but are not limited to, U.S. Pat. Nos. 3,687,808; 4,469,863; 4,476,301; 5,023,243; 5,177,195; 5,188,897; 5,264,423; 5,276,019; 5,278,302; 5,286,717; 5,321,131; 5,399,676; 5,405,939; 5,453,496; 5,455,233; 5,466,677; 5,476,925; 5,519,126; 5,536,821; 5,541,316; 5,550,111; 5,563,253; 5,571,799; 5,587,361; 5,625,050; 6,028,188; 6,124,445; 6,160,109; 6,169,170; 6,172,209; 6,239,265; 6,277,603; 6,326,199; 6,346,614; 6,444,423; 6,531,590; 6,534,639; 6,608,035; 6,683,167; 6,858,715; 6,867,294; 6,878,805; 7,015,315; 7,041,816; 7,273,933; 7,321,029; and U.S. Pat. RE39464, each of which is herein incorporated by reference in its entirety.

[0214] Modified internucleoside linkages that do not include a phosphorus atom therein have internucleoside linkages that are formed by short chain alkyl or cycloalkyl internucleoside linkages, mixed heteroatoms and alkyl or cycloalkyl internucleoside linkages, or one or more short chain heteroatomic or heterocyclic internucleoside linkages. These include those having morpholino linkages (formed in part from the sugar portion of a nucleoside); siloxane backbones; sulfide, sulfoxide and sulfone backbones; formacetyl and thioformacetyl backbones; methylene formacetyl and thioformacetyl backbones; alkene containing backbones; sulfamate backbones; methyleneimino and methylenehydrazino backbones; sulfonate and sulfonamide backbones; amide backbones; and others having mixed N, O, S and CH₂ component parts.

[0215] Representative U.S. patents that teach the preparation of modified oligonucleosides include, but are not limited to, U.S. Pat. Nos. 5,034,506; 5,166,315; 5,185,444; 5,214,134; 5,216,141; 5,235,033; 5,64,562; 5,264,564; 5,405,938; 5,434,257; 5,466,677; 5,470,967; 5,489,677; 5,541,307; 5,561,225; 5,596,086; 5,602,240; 5,608,046; 5,610,289; 5,618,704; 5,623,070; 5,663,312; 5,633,360; 5,677,437; and 5,677,439, each of which is herein incorporated by reference in its entirety.

[0216] Some embodiments of the synthetic, modified RNAs described herein include nucleic acids with phosphorothioate internucleoside linkages and oligonucleosides with heteroatom internucleoside linkage, and in particular —CH2-NH—CH2-, —CH2-N(CH3)-O—CH2-[known as a methylene (methylimino) or MMI], —CH2-O—N(CH3)-CH2-, —CH2-N(CH3)-N(CH3)-CH2- and —N(CH3)-CH2-CH2- [wherein the native phosphodiester internucleoside linkage is represented as —O—P—O—CH2-] of the above-referenced U.S. Pat. No. 5,489,677, and the amide backbones of the above-referenced U.S. Pat. No. 5,602,240, both of which are herein incorporated by reference in their entirety. In some embodiments, the nucleic acid sequences featured herein have morpholino backbone structures of the above-referenced U.S. Pat. No. 5,034,506, herein incorporated by reference in its entirety.

[0217] Synthetic, modified RNAs described herein can also contain one or more substituted sugar moieties. The nucleic acids featured herein can include one of the following at the 2′ position: H (deoxyribose); OH (ribose); F; O—, S—, or N-alkyl; O—, S—, or N-alkenyl; O—, S- or N-alkynyl; or O-alkyl-O-alkyl, wherein the alkyl, alkenyl and alkynyl can be substituted or unsubstituted C1 to C10 alkyl or C2 to C10 alkenyl and alkynyl. Exemplary modifications include O[(CH2)nO]mCH3, O(CH2).nOCH3, O(CH2)nNH2, O(CH2)nCH3, O(CH2)nONH2, and O(CH2)nON[(CH2)nCH3)]2, where n and m are from 1 to about 10. In some embodiments, synthetic, modified RNAs include one of the following at the 2′ position: C1 to C10 lower alkyl, substituted lower alkyl, alkaryl, aralkyl, O-alkaryl or O-aralkyl, SH, SCH3, OCN, Cl, Br, CN, CF3, OCF3, SOCH3, SO2CH3, ONO2, NO2, N3, NH2, heterocycloalkyl, heterocycloalkaryl, aminoalkylamino, polyalkylamino, substituted silyl, a reporter group, an intercalator, a group for improving the pharmacokinetic properties of an RNA, or a group for improving the pharmacodynamic properties of a synthetic, modified RNA, and other substituents having similar properties. In some embodiments, the modification includes a 2′ methoxyethoxy (2′-O—CH2CH2OCH3, also known as 2′-O-(2-methoxyethyl) or 2′-MOE) (Martin et al., Helv. Chim. Acta, 1995, 78:486-504) i.e., an alkoxy-alkoxy group. Another exemplary modification is 2′-dimethylaminooxyethoxy, i.e., a O(CH2)2ON(CH3)2 group, also known as 2′-DMAOE, and 2′-dimethylaminoethoxyethoxy (also known in the art as 2′-O-dimethylaminoethoxyethyl or 2′-DMAEOE), i.e., 2′-O—CH2-O—CH2-N(CH2)2.

[0218] Other modifications include 2′-methoxy (2′-OCH3), 2′-aminopropoxy (2′-OCH2CH2CH2NH2) and 2′-fluoro (2′-F). Similar modifications can also be made at other positions on the nucleic acid sequence, particularly the 3′ position of the sugar on the 3′ terminal nucleotide or in 2′-5′ linked nucleotides and the 5′ position of 5′ terminal nucleotide. A synthetic, modified RNA can also have sugar mimetics such as cyclobutyl moieties in place of the pentofuranosyl sugar. Representative U.S. patents that teach the preparation of such modified sugar structures include, but are not limited to, U.S. Pat. Nos. 4,981,957; 5,118,800; 5,319,080; 5,359,044; 5,393,878; 5,446,137; 5,466,786; 5,514,785; 5,519,134; 5,567,811; 5,576,427; 5,591,722; 5,597,909; 5,610,300; 5,627,053; 5,639,873; 5,646,265; 5,658,873; 5,670,633; and 5,700,920, certain of which are commonly owned with the instant application, and each of which is herein incorporated by reference in its entirety.

[0219] As non-limiting examples, synthetic, modified RNAs described herein can include at least one modified nucleoside including a 2′-O-methyl modified nucleoside, a nucleoside comprising a 5′ phosphorothioate group, a 2′-amino-modified nucleoside, 2′-alkyl-modified nucleoside, morpholino nucleoside, a phosphoramidate or a non-natural base comprising nucleoside, or any combination thereof.

[0220] In some embodiments of this aspect and all other such aspects described herein, the at least one modified nucleoside is selected from the group consisting of 5-methylcytidine (5mC), N6-methyladenosine (m6A), 3,2′-O-dimethyluridine (m4U), 2-thiouridine (s2U), 2′ fluorouridine, pseudouridine, 2′-O-methyluridine (Um), 2′ deoxyuridine (2′ dU), 4-thiouridine (s4U), 5-methyluridine (m5U), 2′-O-methyladenosine (m6A), N6,2′-O-dimethyladenosine (m6Am), N6,N6,2′-O-trimethyladenosine (m6₂Am), 2′-O-methylcytidine (Cm), 7-methylguanosine (m7G), 2′-O-methylguanosine (Gm), N2,7-dimethylguanosine (m2,7G), N2,N2,7-trimethylguanosine (m2,2,7G), and inosine (I).

[0221] Alternatively, a synthetic, modified RNA can comprise at least two modified nucleosides, at least 3, at least 4, at least 5, at least 6, at least 7, at least 8, at least 9, at least 10, at least 15, at least 20 or more, up to the entire length of the oligonucleotide. At a minimum, a synthetic, modified RNA molecule comprising at least one modified nucleoside comprises a single nucleoside with a modification as described herein. It is not necessary for all positions in a given synthetic, modified RNA to be uniformly modified, and in fact more than one of the aforementioned modifications can be incorporated in a single synthetic, modified RNA or even at a single nucleoside within a synthetic, modified RNA. However, it is preferred, but not absolutely necessary, that each occurrence of a given nucleoside in a molecule is modified (e.g., each cytosine is a modified cytosine e.g., 5mC). However, it is also contemplated that different occurrences of the same nucleoside can be modified in a different way in a given synthetic, modified RNA molecule (e.g., some cytosines modified as 5mC, others modified as 2′-O-methylcytidine or other cytosine analog). The modifications need not be the same for each of a plurality of modified nucleosides in a synthetic, modified RNA. Furthermore, in some embodiments of the aspects described herein, a synthetic, modified RNA comprises at least two different modified nucleosides. In some such preferred embodiments of the aspects described herein, the at least two different modified nucleosides are 5-methylcytidine and pseudouridine. A synthetic, modified RNA can also contain a mixture of both modified and unmodified nucleosides.

[0222] As used herein, “unmodified” or “natural” nucleosides or nucleobases include the purine bases adenine (A) and guanine (G), and the pyrimidine bases thymine (T), cytosine (C) and uracil (U). In some embodiments, a synthetic, modified RNA comprises at least one nucleoside (“base”) modification or substitution. Modified nucleosides include other synthetic and natural nucleobases such as inosine, xanthine, hypoxanthine, nubularine, isoguanisine, tubercidine, 2-(halo)adenine, 2-(alkyl)adenine, 2-(propyl)adenine, 2 (amino)adenine, 2-(aminoalkyl)adenine, 2 (aminopropyl)adenine, 2 (methylthio) N6 (isopentenyl)adenine, 6 (alkyl)adenine, 6 (methyl)adenine, 7 (deaza)adenine, 8 (alkenyl)adenine, 8-(alkyl)adenine, 8 (alkynyl)adenine, 8 (amino)adenine, 8-(halo)adenine, 8-(hydroxyl)adenine, 8 (thioalkyl)adenine, 8-(thiol)adenine, N6-(isopentyl)adenine, N6 (methyl)adenine, N6, N6 (dimethyl)adenine, 2-(alkyl)guanine, 2 (propyl)guanine, 6-(alkyl)guanine, 6 (methyl)guanine, 7 (alkyl)guanine, 7 (methyl)guanine, 7 (deaza)guanine, 8 (alkyl)guanine, 8-(alkenyl)guanine, 8 (alkynyl)guanine, 8-(amino)guanine, 8 (halo)guanine, 8-(hydroxyl)guanine, 8 (thioalkyl)guanine, 8-(thiol)guanine, N (methyl)guanine, 2-(thio)cytosine, 3 (deaza) 5 (aza)cytosine, 3-(alkyl)cytosine, 3 (methyl)cytosine, 5-(alkyl)cytosine, 5-(alkynyl)cytosine, 5 (halo)cytosine, 5 (methyl)cytosine, 5 (propynyl)cytosine, 5 (propynyl)cytosine, 5 (trifluoromethyl)cytosine, 6-(azo)cytosine, N4 (acetyl)cytosine, 3 (3 amino-3 carboxypropyl)uracil, 2-(thio)uracil, 5 (methyl) 2 (thio)uracil, 5 (methylaminomethyl)-2 (thio)uracil, 4-(thio)uracil, 5 (methyl) 4 (thio)uracil, 5 (methylaminomethyl)-4 (thio)uracil, 5 (methyl) 2,4 (dithio)uracil, 5 (methylaminomethyl)-2,4 (dithio)uracil, 5 (2-aminopropyl)uracil, 5-(alkyl)uracil, 5-(alkynyl)uracil, 5-(allylamino)uracil, 5 (aminoallyl)uracil, 5 (aminoalkyl)uracil, 5 (guanidiniumalkyl)uracil, 5 (1,3-diazole-1-alkyl)uracil, 5-(cyanoalkyl)uracil, 5-(dialkylaminoalkyl)uracil, 5 (dimethylaminoalkyl)uracil, 5-(halo)uracil, 5-(methoxy)uracil, uracil-5 oxyacetic acid, 5 (methoxycarbonylmethyl)-2-(thio)uracil, 5 (methoxycarbonyl-methyl)uracil, 5 (propynyl)uracil, 5 (propynyl)uracil, 5 (trifluoromethyl)uracil, 6 (azo)uracil, dihydrouracil, N3 (methyl)uracil, 5-uracil (i.e., pseudouracil), 2 (thio)pseudouracil,4 (thio)pseudouracil,2,4-(dithio)psuedouracil,5-(alkyl)pseudouracil, 5-(methyl)pseudouracil, 5-(alkyl)-2-(thio)pseudouracil, 5-(methyl)-2-(thio)pseudouracil, 5-(alkyl)-4 (thio)pseudouracil, 5-(methyl)-4 (thio)pseudouracil, 5-(alkyl)-2,4 (dithio)pseudouracil, 5-(methyl)-2,4 (dithio)pseudouracil, 1 substituted pseudouracil, 1 substituted 2(thio)-pseudouracil, 1 substituted 4 (thio)pseudouracil, 1 substituted 2,4-(dithio)pseudouracil, 1 (aminocarbonylethylenyl)-pseudouracil, 1 (aminocarbonylethylenyl)-2(thio)-pseudouracil, 1 (aminocarbonylethylenyl)-4 (thio)pseudouracil, 1 (aminocarbonylethylenyl)-2,4-(dithio)pseudouracil, 1 (aminoalkylaminocarbonylethylenyl)-pseudouracil, 1 (aminoalkylamino-carbonylethylenyl)-2(thio)-pseudouracil, 1 (aminoalkylaminocarbonylethylenyl)-4 (thio)pseudouracil, 1 (aminoalkylaminocarbonylethylenyl)-2,4-(dithio)pseudouracil, 1,3-(diaza)-2-(oxo)-phenoxazin-1-yl, 1-(aza)-2-(thio)-3-(aza)-phenoxazin-1-yl, 1,3-(diaza)-2-(oxo)-phenthiazin-1-yl, 1-(aza)-2-(thio)-3-(aza)-phenthiazin-1-yl, 7-substituted 1,3-(diaza)-2-(oxo)-phenoxazin-1-yl, 7-substituted 1-(aza)-2-(thio)-3-(aza)-phenoxazin-1-yl, 7-substituted 1,3-(diaza)-2-(oxo)-phenthiazin-1-yl, 7-substituted 1-(aza)-2-(thio)-3-(aza)-phenthiazin-1-yl, 7-(aminoalkylhydroxy)-1,3-(diaza)-2-(oxo)-phenoxazin-1-yl, 7-(aminoalkylhydroxy)-1-(aza)-2-(thio)-3-(aza)-phenoxazin-1-yl, 7-(aminoalkylhydroxy)-1,3-(diaza)-2-(oxo)-phenthiazin-1-yl, 7-(aminoalkylhydroxy)-1-(aza)-2-(thio)-3-(aza)-phenthiazin-1-yl, 7-(guanidiniumalkylhydroxy)-1,3-(diaza)-2-(oxo)-phenoxazin-1-yl, 7-(guanidiniumalkylhydroxy)-1-(aza)-2-(thio)-3-(aza)-phenoxazin-1-yl, 7-(guanidiniumalkylhydroxy)-1,3-(diaza)-2-(oxo)-phenthiazin-1-yl, 7-(guanidiniumalkylhydroxy)-1-(aza)-2-(thio)-3-(aza)-phenthiazin-1-yl, 1,3,5-(triaza)-2,6-(dioxa)-naphthalene, inosine, xanthine, hypoxanthine, nubularine, tubercidine, isoguanisine, inosinyl, 2-aza-inosinyl, 7-deaza-inosinyl, nitroimidazolyl, nitropyrazolyl, nitrobenzimidazolyl, nitroindazolyl, aminoindolyl, pyrrolopyrimidinyl, 3-(methyl)isocarbostyrilyl, 5-(methyl)isocarbostyrilyl, 3-(methyl)-7-(propynyl)isocarbostyrilyl, 7-(aza)indolyl, 6-(methyl)-7-(aza)indolyl, imidizopyridinyl, 9-(methyl)-imidizopyridinyl, pyrrolopyrizinyl, isocarbostyrilyl, 7-(propynyl)isocarbostyrilyl, propynyl-7-(aza)indolyl, 2,4,5-(trimethyl)phenyl, 4-(methyl)indolyl, 4,6-(dimethyl)indolyl, phenyl, napthalenyl, anthracenyl, phenanthracenyl, pyrenyl, stilbenzyl, tetracenyl, pentacenyl, difluorotolyl, 4-(fluoro)-6-(methyl)benzimidazole, 4-(methyl)benzimidazole, 6-(azo)thymine, 2-pyridinone, 5 nitroindole, 3 nitropyrrole, 6-(aza)pyrimidine, 2 (amino)purine, 2,6-(diamino)purine, 5 substituted pyrimidines, N2-substituted purines, N6-substituted purines, 06-substituted purines, substituted 1,2,4-triazoles, pyrrolo-pyrimidin-2-on-3-yl, 6-phenyl-pyrrolo-pyrimidin-2-on-3-yl, para-substituted-6-phenyl-pyrrolo-pyrimidin-2-on-3-yl, ortho-substituted-6-phenyl-pyrrolo-pyrimidin-2-on-3-yl, bis-ortho-substituted-6-phenyl-pyrrolo-pyrimidin-2-on-3-yl, para-(aminoalkylhydroxy)-6-phenyl-pyrrolo-pyrimidin-2-on-3-yl, ortho-(aminoalkylhydroxy)-6-phenyl-pyrrolo-pyrimidin-2-on-3-yl, bis-ortho-(aminoalkylhydroxy)-6-phenyl-pyrrolo-pyrimidin-2-on-3-yl, pyridopyrimidin-3-yl, 2-oxo-7-amino-pyridopyrimidin-3-yl, 2-oxo-pyridopyrimidine-3-yl, or any O-alkylated or N-alkylated derivatives thereof. Modified nucleosides also include natural bases that comprise conjugated moieties, e.g. a ligand. As discussed herein above, the RNA containing the modified nucleosides must be translatable in a host cell (i.e., does not prevent translation of the polypeptide encoded by the modified RNA). For example, transcripts containing s2U and m6A are translated poorly in rabbit reticulocyte lysates, while pseudouridine, m5U, and m5C are compatible with efficient translation. In addition, it is known in the art that 2′-fluoro-modified bases useful for increasing nuclease resistance of a transcript, leads to very inefficient translation. Translation can be assayed by one of ordinary skill in the art using e.g., a rabbit reticulocyte lysate translation assay.

[0223] Further modified nucleobases include those disclosed in U.S. Pat. No. 3,687,808, those disclosed in Modified Nucleosides in Biochemistry, Biotechnology and Medicine, Herdewijn, P. ed. Wiley-VCH, 2008; those disclosed in Int. Appl. No. PCT/US09/038,425, filed Mar. 26, 2009; those disclosed in The Concise Encyclopedia Of Polymer Science And Engineering, pages 858-859, Kroschwitz, J. L, ed. John Wiley & Sons, 1990, and those disclosed by Englisch et al., Angewandte Chemie, International Edition, 1991, 30, 613.

[0224] Representative U.S. patents that teach the preparation of certain of the above noted modified nucleobases as well as other modified nucleobases include, but are not limited to, the above noted U.S. Pat. No. 3,687,808, as well as U.S. Pat. Nos. 4,845,205; 5,130,30; 5,134,066; 5,175,273; 5,367,066; 5,432,272; 5,457,187; 5,457,191; 5,459,255; 5,484,908; 5,502,177; 5,525,711; 5,552,540; 5,587,469; 5,594,121, 5,596,091; 5,614,617; 5,681,941; 6,015,886; 6,147,200; 6,166,197; 6,222,025; 6,235,887; 6,380,368; 6,528,640; 6,639,062; 6,617,438; 7,045,610; 7,427,672; and 7,495,088, each of which is herein incorporated by reference in its entirety, and U.S. Pat. No. 5,750,692, also herein incorporated by reference in its entirety.

[0225] Another modification for use with the synthetic, modified RNAs described herein involves chemically linking to the RNA one or more ligands, moieties or conjugates that enhance the activity, cellular distribution or cellular uptake of the RNA. Ligands can be particularly useful where, for example, a synthetic, modified RNA is administered in vivo. Such moieties include but are not limited to lipid moieties such as a cholesterol moiety (Letsinger et al., Proc. Natl. Acid. Sci. USA, 1989, 86: 6553-6556, herein incorporated by reference in its entirety), cholic acid (Manoharan et al., Biorg. Med. Chem. Let., 1994, 4:1053-1060, herein incorporated by reference in its entirety), a thioether, e.g., beryl-S-tritylthiol (Manoharan et al., Ann. N.Y. Acad. Sci., 1992, 660:306-309; Manoharan et al., Biorg. Med. Chem. Let., 1993, 3:2765-2770, each of which is herein incorporated by reference in its entirety), a thiocholesterol (Oberhauser et al., Nucl. Acids Res., 1992, 20:533-538, herein incorporated by reference in its entirety), an aliphatic chain, e.g., dodecandiol or undecyl residues (Saison-Behmoaras et al., EMBO J, 1991, 10:1111-1118; Kabanov et al., FEBS Lett., 1990, 259:327-330; Svinarchuk et al., Biochimie, 1993, 75:49-54, each of which is herein incorporated by reference in its entirety), a phospholipid, e.g., di-hexadecyl-rac-glycerol or triethyl-ammonium 1,2-di-O-hexadecyl-rac-glycero-3-phosphonate (Manoharan et al., Tetrahedron Lett., 1995, 36:3651-3654; Shea et al., Nucl. Acids Res., 1990, 18:3777-3783, each of which is herein incorporated by reference in its entirety), a polyamine or a polyethylene glycol chain (Manoharan et al., Nucleosides & Nucleotides, 1995, 14:969-973, herein incorporated by reference in its entirety), or adamantane acetic acid (Manoharan et al., Tetrahedron Lett., 1995, 36:3651-3654, herein incorporated by reference in its entirety), a palmityl moiety (Mishra et al., Biochim. Biophys. Acta, 1995, 1264:229-237, herein incorporated by reference in its entirety), or an octadecylamine or hexylamino-carbonyloxycholesterol moiety (Crooke et al., J. Pharmacol. Exp. Ther., 1996, 277:923-937, herein incorporated by reference in its entirety).

[0226] The synthetic, modified RNAs described herein can further comprise a 5′ cap. In some embodiments of the aspects described herein, the synthetic, modified RNAs comprise a 5′ cap comprising a modified guanine nucleotide that is linked to the 5′ end of an RNA molecule using a 5′-5′ triphosphate linkage. As used herein, the term “5′ cap” is also intended to encompass other 5′ cap analogs including, e.g., 5′ diguanosine cap, tetraphosphate cap analogs having a methylene-bis(phosphonate) moiety (see e.g., Rydzik, A M et al., (2009) Org Biomol Chem 7(22):4763-76), dinucleotide cap analogs having a phosphorothioate modification (see e.g., Kowalska, J. et al., (2008) RNA 14(6):1119-1131), cap analogs having a sulfur substitution for a non-bridging oxygen (see e.g., Grudzien-Nogalska, E. et al., (2007) RNA 13(10): 1745-1755), N7-benzylated dinucleoside tetraphosphate analogs (see e.g., Grudzien, E. et al., (2004) RNA 10(9):1479-1487), or anti-reverse cap analogs (see e.g., Jemielity, J. et al., (2003) RNA 9(9): 1108-1122 and Stepinski, J. et al., (2001) RNA 7(10):1486-1495). In one such embodiment, the 5′ cap analog is a 5′ diguanosine cap. In some embodiments, the synthetic, modified RNA does not comprise a 5′ triphosphate.

[0227] The 5′ cap is important for recognition and attachment of an mRNA to a ribosome to initiate translation. The 5′ cap also protects the synthetic, modified RNA from 5′ exonuclease mediated degradation. It is not an absolute requirement that a synthetic, modified RNA comprise a 5′ cap, and thus in other embodiments the synthetic, modified RNAs lack a 5′ cap. However, due to the longer half-life of synthetic, modified RNAs comprising a 5′ cap and the increased efficiency of translation, synthetic, modified RNAs comprising a 5′ cap are preferred herein.

[0228] The synthetic, modified RNAs described herein can further comprise a 5′ and/or 3′ untranslated region (UTR). Untranslated regions are regions of the RNA before the start codon (5′) and after the stop codon (3′), and are therefore not translated by the translation machinery. Modification of an RNA molecule with one or more untranslated regions can improve the stability of an mRNA, since the untranslated regions can interfere with ribonucleases and other proteins involved in RNA degradation. In addition, modification of an RNA with a 5′ and/or 3′ untranslated region can enhance translational efficiency by binding proteins that alter ribosome binding to an mRNA. Modification of an RNA with a 3′ UTR can be used to maintain a cytoplasmic localization of the RNA, permitting translation to occur in the cytoplasm of the cell. In one embodiment, the synthetic, modified RNAs described herein do not comprise a 5′ or 3′ UTR. In another embodiment, the synthetic, modified RNAs comprise either a 5′ or 3′ UTR. In another embodiment, the synthetic, modified RNAs described herein comprise both a 5′ and a 3′ UTR. In one embodiment, the 5′ and/or 3′ UTR is selected from an mRNA known to have high stability in the cell (e.g., a murine alpha-globin 3′ UTR). In some embodiments, the 5′ UTR, the 3′ UTR, or both comprise one or more modified nucleosides.

[0229] In some embodiments, the synthetic, modified RNAs described herein further comprise a Kozak sequence. The “Kozak sequence” refers to a sequence on eukaryotic mRNA having the consensus (gcc)gccRccAUGG (SEQ ID NO: 1481), where R is a purine (adenine or guanine) three bases upstream of the start codon (AUG), which is followed by another ‘G’. The Kozak consensus sequence is recognized by the ribosome to initiate translation of a polypeptide. Typically, initiation occurs at the first AUG codon encountered by the translation machinery that is proximal to the 5′ end of the transcript. However, in some cases, this AUG codon can be bypassed in a process called leaky scanning. The presence of a Kozak sequence near the AUG codon will strengthen that codon as the initiating site of translation, such that translation of the correct polypeptide occurs. Furthermore, addition of a Kozak sequence to a synthetic, modified RNA will promote more efficient translation, even if there is no ambiguity regarding the start codon. Thus, in some embodiments, the synthetic, modified RNAs described herein further comprise a Kozak consensus sequence at the desired site for initiation of translation to produce the correct length polypeptide. In some such embodiments, the Kozak sequence comprises one or more modified nucleosides.

[0230] In some embodiments, the synthetic, modified RNAs described herein further comprise a “poly (A) tail”, which refers to a 3′ homopolymeric tail of adenine nucleotides, which can vary in length (e.g., at least 5 adenine nucleotides) and can be up to several hundred adenine nucleotides). The inclusion of a 3′ poly(A) tail can protect the synthetic, modified RNA from degradation in the cell, and also facilitates extra-nuclear localization to enhance translation efficiency. In some embodiments, the poly(A) tail comprises between 1 and 500 adenine nucleotides; in other embodiments the poly(A) tail comprises at least 5, at least 10, at least 20, at least 30, at least 40, at least 50, at least 60, at least 70, at least 80, at least 90, at least 100, at least 110, at least 120, at least 130, at least 140, at least 150, at least 160, at least 170, at least 180, at least 190, at least 200, at least 225, at least 250, at least 275, at least 300, at least 325, at least 350, at least 375, at least 400, at least 425, at least 450, at least 475, at least 500 adenine nucleotides or more. In one embodiment, the poly(A) tail comprises between 1 and 150 adenine nucleotides. In another embodiment, the poly(A) tail comprises between 90 and 120 adenine nucleotides. In some such embodiments, the poly(A) tail comprises one or more modified nucleosides.

[0231] It is contemplated that one or more modifications to the synthetic, modified RNAs described herein permit greater stability of the synthetic, modified RNA in a cell. To the extent that such modifications permit translation and either reduce or do not exacerbate a cell's innate immune or interferon response to the synthetic, modified RNA with the modification, such modifications are specifically contemplated for use herein. Generally, the greater the stability of a synthetic, modified RNA, the more protein can be produced from that synthetic, modified RNA. Typically, the presence of AU-rich regions in mammalian mRNAs tend to destabilize transcripts, as cellular proteins are recruited to AU-rich regions to stimulate removal of the poly(A) tail of the transcript. Loss of a poly(A) tail of a synthetic, modified RNA can result in increased RNA degradation. Thus, in one embodiment, a synthetic, modified RNA as described herein does not comprise an AU-rich region. In particular, it is preferred that the 3′ UTR substantially lacks AUUUA sequence elements.

[0232] In one embodiment, a ligand alters the cellular uptake, intracellular targeting or half-life of a synthetic, modified RNA into which it is incorporated. In some embodiments a ligand provides an enhanced affinity for a selected target, e.g., molecule, cell or cell type, intracellular compartment, e.g., mitochondria, cytoplasm, peroxisome, lysosome, as, e.g., compared to a composition absent such a ligand. Preferred ligands do not interfere with expression of a polypeptide from the synthetic, modified RNA.

[0233] Ligands can include a naturally occurring substance, such as a protein (e.g., human serum albumin (HSA), low-density lipoprotein (LDL), or globulin); carbohydrate (e.g., a dextran, pullulan, chitin, chitosan, inulin, cyclodextrin or hyaluronic acid); or a lipid. The ligand can also be a recombinant or synthetic molecule, such as a synthetic polymer, e.g., a synthetic polyamino acid. Examples of polyamino acids include polylysine (PLL), poly L aspartic acid, poly L-glutamic acid, styrene-maleic acid anhydride copolymer, poly(L-lactide-co-glycolied) copolymer, divinyl ether-maleic anhydride copolymer, N-(2-hydroxypropyl)methacrylamide copolymer (HMPA), polyethylene glycol (PEG), polyvinyl alcohol (PVA), polyurethane, poly(2-ethylacryllic acid), N-isopropylacrylamide polymers, or polyphosphazine. Example of polyamines include: polyethylenimine, polylysine (PLL), spermine, spermidine, polyamine, pseudopeptide-polyamine, peptidomimetic polyamine, dendrimer polyamine, arginine, amidine, protamine, cationic lipid, cationic porphyrin, quaternary salt of a polyamine, or an alpha helical peptide.

[0234] Ligands can also include targeting groups, e.g., a cell targeting agent, (e.g., a lectin, glycoprotein, lipid or protein), or an antibody, that binds to a specified cell type such as a fibroblast cell. A targeting group can be, for example, a thyrotropin, melanotropin, lectin, glycoprotein, surfactant protein A, Mucin carbohydrate, multivalent lactose, multivalent galactose, N-acetyl-galactosamine, N-acetyl-glucosamine multivalent mannose, multivalent fucose, glycosylated polyaminoacids, multivalent galactose, transferrin, bisphosphonate, polyglutamate, polyaspartate, a lipid, cholesterol, a steroid, bile acid, folate, vitamin B12, biotin, or an RGD peptide or RGD peptide mimetic, among others.

[0235] Other examples of ligands include dyes, intercalating agents (e.g. acridines), cross-linkers (e.g. psoralene, mitomycin C), porphyrins (TPPC4, texaphyrin, Sapphyrin), polycyclic aromatic hydrocarbons (e.g., phenazine, dihydrophenazine), artificial endonucleases (e.g. EDTA), lipophilic molecules, e.g., cholesterol, cholic acid, adamantane acetic acid, 1-pyrene butyric acid, dihydrotestosterone, 1,3-Bis-O(hexadecyl)glycerol, geranyloxyhexyl group, hexadecylglycerol, borneol, menthol, 1,3-propanediol, heptadecyl group, palmitic acid, myristic acid,O3-(oleoyl)lithocholic acid, O3-(oleoyl)cholenic acid, dimethoxytrityl, or phenoxazine) and peptide conjugates (e.g., antennapedia peptide, Tat peptide), alkylating agents, amino, mercapto, PEG (e.g., PEG-40K), MPEG, [MPEG]2, polyamino, alkyl, substituted alkyl, radiolabeled markers, enzymes, haptens (e.g. biotin), and transport/absorption facilitators (e.g., aspirin, vitamin E, folic acid).

[0236] Ligands can be proteins, e.g., glycoproteins, or peptides, e.g., molecules having a specific affinity for a co-ligand, or antibodies e.g., an antibody, that binds to a specified cell type such as a fibroblast cell, or other cell useful in the production of polypeptides. Ligands can also include hormones and hormone receptors. They can also include non-peptidic species, such as lipids, lectins, carbohydrates, vitamins, cofactors, multivalent lactose, multivalent galactose, N-acetyl-galactosamine, N-acetyl-glucosamine multivalent mannose, or multivalent fucose.

[0237] The ligand can be a substance, e.g., a drug, which can increase the uptake of the synthetic, modified RNA or a composition thereof into the cell, for example, by disrupting the cell's cytoskeleton, e.g., by disrupting the cell's microtubules, microfilaments, and/or intermediate filaments. The drug can be, for example, taxol, vincristine, vinblastine, cytochalasin, nocodazole, japlakinolide, latrunculin A, phalloidin, swinholide A, indanocine, or myoservin.

[0238] One exemplary ligand is a lipid or lipid-based molecule. A lipid or lipid-based ligand can (a) increase resistance to degradation, and/or (b) increase targeting or transport into a target cell or cell membrane. A lipid based ligand can be used to modulate, e.g., binding of the modified RNA composition to a target cell.

[0239] In another aspect, the ligand is a moiety, e.g., a vitamin, which is taken up by a host cell. Exemplary vitamins include vitamin A, E, and K. Other exemplary vitamins include B vitamin, e.g., folic acid, B12, riboflavin, biotin, pyridoxal or other vitamins or nutrients taken up, for example, by cancer cells. Also included are HSA and low density lipoprotein (LDL).

[0240] In another aspect, the ligand is a cell-permeation agent, preferably a helical cell-permeation agent. Preferably, the agent is amphipathic. An exemplary agent is a peptide such as tat or antennopedia. If the agent is a peptide, it can be modified, including a peptidylmimetic, invertomers, non-peptide or pseudo-peptide linkages, and use of D-amino acids. The helical agent is preferably an alpha-helical agent, which preferably has a lipophilic and a lipophobic phase.

[0241] A “cell permeation peptide” is capable of permeating a cell, e.g., a microbial cell, such as a bacterial or fungal cell, or a mammalian cell, such as a human cell. A microbial cell-permeating peptide can be, for example, an α-helical linear peptide (e.g., LL-37 or Ceropin P1), a disulfide bond-containing peptide (e.g., α-defensin, β-defensin or bactenecin), or a peptide containing only one or two dominating amino acids (e.g., PR-39 or indolicidin). For example, a cell permeation peptide can be a bipartite amphipathic peptide, such as MPG, which is derived from the fusion peptide domain of HIV-1 gp41 and the NLS of SV40 large T antigen (Simeoni et al., Nucl. Acids Res. 31:2717-2724, 2003).

### Synthesis of Synthetic, Modified RNAs

[0242] The synthetic, modified RNAs described herein can be synthesized and/or modified by methods well established in the art, such as those described in “Current Protocols in Nucleic Acid Chemistry,” Beaucage, S. L. et al. (Edrs.), John Wiley & Sons, Inc., New York, N.Y., USA, which is hereby incorporated herein by reference in its entirety. Transcription methods are described further herein in the Examples.

[0243] In one embodiment of the aspects described herein, a template for a synthetic, modified RNA is synthesized using “splint-mediated ligation,” which allows for the rapid synthesis of DNA constructs by controlled concatenation of long oligos and/or dsDNA PCR products and without the need to introduce restriction sites at the joining regions. It can be used to add generic untranslated regions (UTRs) to the coding sequences of genes during T7 template generation. Splint mediated ligation can also be used to add nuclear localization sequences to an open reading frame, and to make dominant-negative constructs with point mutations starting from a wild-type open reading frame. Briefly, single-stranded and/or denatured dsDNA components are annealed to splint oligos which bring the desired ends into conjunction, the ends are ligated by a thermostable DNA ligase and the desired constructs amplified by PCR. A synthetic, modified RNA is then synthesized from the template using an RNA polymerase in vitro. After synthesis of a synthetic, modified RNA is complete, the DNA template is removed from the transcription reaction prior to use with the methods described herein.

[0244] In some embodiments of these aspects, the synthetic, modified RNAs are further treated with an alkaline phosphatase.

### Plurality of Synthetic, Modified RNAs

[0245] In some embodiments of the aspects described herein, a plurality of different synthetic, modified RNAs are contacted with, or introduced to, a cell, population of cells, or cell culture and permit expression of at least two polypeptide products in the cell. In some embodiments, synthetic, modified RNA compositions comprise two or more synthetic, modified RNAs, e.g., 2, 3, 4, 5, 6, 7, 8, 9, 10 or more synthetic, modified RNAs. In some embodiments, the two or more synthetic, modified RNAs are capable of increasing expression of a desired polypeptide product (e.g., a transcription factor, a cell surface marker, a death receptor, etc.).

[0246] In some embodiments, when a plurality of different synthetic, modified RNAs, synthetic, modified RNA compositions, or media comprising a plurality of different synthetic, modified RNAs are used to modulate expression of a desired set of polypeptides, the plurality of synthetic, modified RNAs can be contacted with, or introduced to, a cell, population of cells, or cell culture simultaneously. In other embodiments, the plurality of synthetic, modified RNAs can be contacted with, or introduced to, a cell, population of cells, or cell culture separately. In addition, each synthetic, modified RNA can be administered according to its own dosage regime. For example, in one embodiment, a composition can be prepared comprising a plurality of synthetic, modified RNAs, in differing relative amounts or in equal amounts, that is contacted with a cell such that the plurality of synthetic, modified RNAs are administered simultaneously. Alternatively, one synthetic, modified RNA at a time can be administered to a cell culture (e.g., sequentially). In this manner, the expression desired for each target polypeptide can be easily tailored by altering the frequency of administration and/or the amount of a particular synthetic, modified RNA administered. Contacting a cell with each synthetic, modified RNA separately can also prevent interactions between the synthetic, modified RNAs that can reduce efficiency of expression. For ease of use and to prevent potential contamination, it is preferred to administer to or contact a cell, population of cells, or cell culture with a cocktail of different synthetic, modified RNAs, thereby reducing the number of doses required and minimizing the chance of introducing a contaminant to the cell, population of cells, or cell culture.

[0247] The methods and compositions described herein permit the expression of one or more polypeptides to be tuned to a desired level by varying the amount of each synthetic, modified RNA transfected. One of skill in the art can easily monitor the expression level of the polypeptide encoded by a synthetic, modified RNA using e.g., Western blotting techniques or immunocytochemistry techniques. A synthetic, modified RNA can be administered at a frequency and dose that permit a desired level of expression of the polypeptide. Each different synthetic, modified RNA can be administered at its own dose and frequency to permit appropriate expression. In addition, since the synthetic, modified RNAs administered to the cell are transient in nature (i.e., are degraded over time) one of skill in the art can easily remove or stop expression of a synthetic, modified RNA by halting further transfections and permitting the cell to degrade the synthetic, modified RNA over time. The synthetic, modified RNAs will degrade in a manner similar to cellular mRNAs.

Introducing a Synthetic, Modified RNA into a Cell

[0248] A synthetic, modified RNA can be introduced into a cell in any manner that achieves intracellular delivery of the synthetic, modified RNA, such that expression of the polypeptide encoded by the synthetic, modified RNA can occur. As used herein, the term “transfecting a cell” refers to the process of introducing nucleic acids into cells using means for facilitating or effecting uptake or absorption into the cell, as is understood by those skilled in the art. As the term is used herein, “transfection” does not encompass viral- or viral particle based delivery methods. Absorption or uptake of a synthetic, modified RNA can occur through unaided diffusive or active cellular processes, or by auxiliary agents or devices. Further approaches are described herein below or known in the art.

[0249] A synthetic, modified RNA can be introduced into a target cell, for example, by transfection, nucleofection, lipofection, electroporation (see, e.g., Wong and Neumann, Biochem. Biophys. Res. Commun. 107:584-87 (1982)), microinjection (e.g., by direct injection of a synthetic, modified RNA), biolistics, cell fusion, and the like. In an alternative embodiment, a synthetic, modified RNA can be delivered using a drug delivery system such as a nanoparticle, a dendrimer, a polymer, a liposome, or a cationic delivery system. Positively charged cationic delivery systems facilitate binding of a synthetic, modified RNA (negatively charged polynucleotides) and also enhances interactions at the negatively charged cell membrane to permit efficient cellular uptake. Cationic lipids, dendrimers, or polymers can either be bound to modified RNAs, or induced to form a vesicle or micelle (see e.g., Kim S H., et al (2008) Journal of Controlled Release 129(2):107-116) that encases the modified RNA. Methods for making and using cationic-modified RNA complexes are well within the abilities of those skilled in the art (see e.g., Sorensen, D R., et al (2003) J. Mol. Biol. 327:761-766; Verma, U N., et al (2003) Clin. Cancer Res. 9:1291-1300; Arnold, A S et al (2007) J. Hypertens. 25:197-205, which are incorporated herein by reference in their entirety).

[0250] In some embodiments of the aspects described herein, the composition further comprises a reagent that facilitates uptake of a synthetic, modified RNA into a cell (transfection reagent), such as an emulsion, a liposome, a cationic lipid, a non-cationic lipid, an anionic lipid, a charged lipid, a penetration enhancer or alternatively, a modification to the synthetic, modified RNA to attach e.g., a ligand, peptide, lipophillic group, or targeting moiety.

[0251] The process for delivery of a synthetic, modified RNA to a cell will necessarily depend upon the specific approach for transfection chosen. One preferred approach is to add the RNA, complexed with a cationic transfection reagent (see below) directly to the cell culture media for the cells.

[0252] It is also contemplated herein that a first and second synthetic, modified RNA are administered in a separate and temporally distinct manner. Thus, each of a plurality of synthetic, modified RNAs can be administered at a separate time or at a different frequency interval to achieve the desired expression of a polypeptide. Typically, 100 fg to 100 pg of a synthetic, modified RNA is administered per cell using cationic lipid-mediated transfection. Since cationic lipid-mediated transfection is highly inefficient at delivering synthetic, modified RNAs to the cytosol, other techniques can require less RNA. The entire transcriptome of a mammalian cell constitutes about 1 pg of mRNA, and a polypeptide (e.g., a transcription factor) can have a physiological effect at an abundance of less than 1 fg per cell.

### Transfection Reagents

[0253] In certain embodiments of the aspects described herein, a synthetic, modified RNA can be introduced into target cells by transfection or lipofection. Suitable agents for transfection or lipofection include, for example, calcium phosphate, DEAE dextran, lipofectin, lipofectamine, DIMRIE C™, Superfect™, and Effectin™ (Qiagen™), Unifectin™, Maxifectin™, DOTMA, DOGS™ (Transfectam; dioctadecylamidoglycylspermine), DOPE (1,2-dioleoyl-sn-glycero-3-phosphoethanolamine), DOTAP (1,2-dioleoyl-3-trimethylammonium propane), DDAB (dimethyl dioctadecylammonium bromide), DHDEAB (N,N-di-n-hexadecyl-N,N-dihydroxyethyl ammonium bromide), HDEAB (N-n-hexadecyl-N,N-dihydroxyethylammonium bromide), polybrene, poly(ethylenimine) (PEI), and the like. (See, e.g., Banerjee et al., Med. Chem. 42:4292-99 (1999); Godbey et al., Gene Ther. 6:1380-88 (1999); Kichler et al., Gene Ther. 5:855-60 (1998); Birchaa et al., J. Pharm. 183:195-207 (1999)).

[0254] A synthetic, modified RNA can be transfected into target cells as a complex with cationic lipid carriers (e.g., Oligofectamine™) or non-cationic lipid-based carriers (e.g., Transit-TKOTM™, Mirus Bio LLC, Madison, Wis.). Successful introduction of a modified RNA into host cells can be monitored using various known methods. For example, transient transfection can be signaled with a reporter, such as a fluorescent marker, such as Green Fluorescent Protein (GFP). Successful transfection of a modified RNA can also be determined by measuring the protein expression level of the target polypeptide by e.g., Western Blotting or immunocytochemistry.

[0255] In some embodiments of the aspects described herein, the synthetic, modified RNA is introduced into a cell using a transfection reagent. Some exemplary transfection reagents include, for example, cationic lipids, such as lipofectin (Junichi et al, U.S. Pat. No. 5,705,188), cationic glycerol derivatives, and polycationic molecules, such as polylysine (Lollo et al., PCT Application WO 97/30731). Examples of commercially available transfection reagents include, for example Lipofectamine™ (Invitrogen; Carlsbad, Calif.), Lipofectamine 2000™ (Invitrogen; Carlsbad, Calif.), 293Fectin™ (Invitrogen; Carlsbad, Calif.), Cellfectin™ (Invitrogen; Carlsbad, Calif.), DMRIE-C™ (Invitrogen; Carlsbad, Calif.), FreeStyle™ MAX (Invitrogen; Carlsbad, Calif.), Lipofectamine™ 2000 CD (Invitrogen; Carlsbad, Calif.), Lipofectamine™ (Invitrogen; Carlsbad, Calif.), RNAiMAX (Invitrogen; Carlsbad, Calif.), Oligofectamine™ (Invitrogen; Carlsbad, Calif.), Optifect™ (Invitrogen; Carlsbad, Calif.), X-tremeGENE Q2 Transfection Reagent (Roche; Grenzacherstrasse, Switzerland), DOTAP Liposomal Transfection Reagent (Grenzacherstrasse, Switzerland), DOSPER Liposomal Transfection Reagent (Grenzacherstrasse, Switzerland), or Fugene (Grenzacherstrasse, Switzerland), Transfectam® Reagent (Promega; Madison, Wis.), TransFast™ Transfection Reagent (Promega; Madison, Wis.), Tfx™-20 Reagent (Promega; Madison, Wis.), Tfx™-50 Reagent (Promega; Madison, Wis.), DreamFect™ (OZ Biosciences; Marseille, France), EcoTransfect (OZ Biosciences; Marseille, France), TransPass^{a} D1 Transfection Reagent (New England Biolabs; Ipswich, Mass., USA), LyoVec™/LipoGen™ (Invitrogen; San Diego, Calif., USA), PerFectin Transfection Reagent (Genlantis; San Diego, Calif., USA), NeuroPORTER Transfection Reagent (Genlantis; San Diego, Calif., USA), GenePORTER Transfection reagent (Genlantis; San Diego, Calif., USA), GenePORTER 2 Transfection reagent (Genlantis; San Diego, Calif., USA), Cytofectin Transfection Reagent (Genlantis; San Diego, Calif., USA), BaculoPORTER Transfection Reagent (Genlantis; San Diego, Calif., USA), TroganPORTER™ transfection Reagent (Genlantis; San Diego, Calif., USA), RiboFect (Bioline; Taunton, Mass., USA), PlasFect (Bioline; Taunton, Mass., USA), UniFECTOR (B-Bridge International; Mountain View, Calif., USA), SureFECTOR (B-Bridge International; Mountain View, Calif., USA), or HiFect™ (B-Bridge International, Mountain View, Calif., USA), among others.

[0256] In other embodiments, highly branched organic compounds, termed “dendrimers,” can be used to bind the exogenous nucleic acid, such as the synthetic, modified RNAs described herein, and introduce it into the cell.

[0257] In other embodiments of the aspects described herein, non-chemical methods of transfection are contemplated. Such methods include, but are not limited to, electroporation (methods whereby an instrument is used to create micro-sized holes transiently in the plasma membrane of cells under an electric discharge), sono-poration (transfection via the application of sonic forces to cells), and optical transfection (methods whereby a tiny (˜1 μm diameter) hole is transiently generated in the plasma membrane of a cell using a highly focused laser). In other embodiments, particle-based methods of transfections are contemplated, such as the use of a gene gun, whereby the nucleic acid is coupled to a nanoparticle of an inert solid (commonly gold) which is then “shot” directly into the target cell's nucleus; “magnetofection,” which refers to a transfection method, that uses magnetic force to deliver exogenous nucleic acids coupled to magnetic nanoparticles into target cells; “impalefection,” which is carried out by impaling cells by elongated nanostructures, such as carbon nanofibers or silicon nanowires which have been coupled to exogenous nucleic acids.

[0258] Other agents may be utilized to enhance the penetration of the administered nucleic acids, including glycols, such as ethylene glycol and propylene glycol, pyrrols such as 2-pyrrol, azones, and terpenes, such as limonene and menthone.

### Synthetic, Modified RNA Compositions

[0259] In some embodiments of the aspects described herein, particularly embodiments involving in vivo administration of synthetic, modified RNAs or compositions thereof, the synthetic, modified RNAs described herein are formulated in conjunction with one or more penetration enhancers, surfactants and/or chelators. Suitable surfactants include fatty acids and/or esters or salts thereof, bile acids and/or salts thereof. Suitable bile acids/salts include chenodeoxycholic acid (CDCA) and ursodeoxychenodeoxycholic acid (UDCA), cholic acid, dehydrocholic acid, deoxycholic acid, glucholic acid, glycholic acid, glycodeoxycholic acid, taurocholic acid, taurodeoxycholic acid, sodium tauro-24,25-dihydro-fusidate and sodium glycodihydrofusidate. Suitable fatty acids include arachidonic acid, undecanoic acid, oleic acid, lauric acid, caprylic acid, capric acid, myristic acid, palmitic acid, stearic acid, linoleic acid, linolenic acid, dicaprate, tricaprate, monoolein, dilaurin, glyceryl 1-monocaprate, 1-dodecylazacycloheptan-2-one, an acylcarnitine, an acylcholine, or a monoglyceride, a diglyceride or a pharmaceutically acceptable salt thereof (e.g., sodium). In some embodiments, combinations of penetration enhancers are used, for example, fatty acids/salts in combination with bile acids/salts. One exemplary combination is the sodium salt of lauric acid, capric acid and UDCA. Further penetration enhancers include polyoxyethylene-9-lauryl ether, polyoxyethylene-20-cetyl ether.

[0260] The compositions described herein can be formulated into any of many possible administration forms, including a sustained release form. In some preferred embodiments of the aspects described herein, formulations comprising a plurality of different synthetic, modified RNAs are prepared by first mixing all members of a plurality of different synthetic, modified RNAs, and then complexing the mixture comprising the plurality of different synthetic, modified RNAs with a desired ligand or targeting moiety, such as a lipid. The compositions can be formulated as suspensions in aqueous, non-aqueous or mixed media. Aqueous suspensions can further contain substances which increase the viscosity of the suspension including, for example, sodium carboxymethylcellulose, sorbitol and/or dextran. The suspension can also contain stabilizers.

[0261] The compositions described herein can be prepared and formulated as emulsions for the delivery of synthetic, modified RNAs. Emulsions are typically heterogeneous systems of one liquid dispersed in another in the form of droplets usually exceeding 0.1 μm in diameter (see e.g., Ansel's Pharmaceutical Dosage Forms and Drug Delivery Systems, Allen, L V., Popovich N G., and Ansel H C., 2004, Lippincott Williams & Wilkins (8th ed.), New York, N.Y.; Idson, in Pharmaceutical Dosage Forms, Lieberman, Rieger and Banker (Eds.), 1988, Marcel Dekker, Inc., New York, N.Y., volume 1, p. 199; Rosoff, in Pharmaceutical Dosage Forms, Lieberman, Rieger and Banker (Eds.), 1988, Marcel Dekker, Inc., New York, N.Y., Volume 1, p. 245; Block in Pharmaceutical Dosage Forms, Lieberman, Rieger and Banker (Eds.), 1988, Marcel Dekker, Inc., New York, N.Y., volume 2, p. 335; Higuchi et al., in Remington's Pharmaceutical Sciences, Mack Publishing Co., Easton, Pa., 1985, p. 301). Emulsions are often biphasic systems comprising two immiscible liquid phases intimately mixed and dispersed with each other. In general, emulsions can be of either the water-in-oil (w/o) or the oil-in-water (o/w) variety. When an aqueous phase is finely divided into and dispersed as minute droplets into a bulk oily phase, the resulting composition is called a water-in-oil (w/o) emulsion. Alternatively, when an oily phase is finely divided into and dispersed as minute droplets into a bulk aqueous phase, the resulting composition is called an oil-in-water (o/w) emulsion. Emulsions can contain further components in addition to the dispersed phases, and the active drug (i.e., synthetic, modified RNA) which can be present as a solution in either the aqueous phase, oily phase or itself as a separate phase. Pharmaceutical excipients such as emulsifiers, stabilizers, dyes, and anti-oxidants can also be present in emulsions as needed. Emulsions can also be multiple emulsions that are comprised of more than two phases such as, for example, in the case of oil-in-water-in-oil (o/w/o) and water-in-oil-in-water (w/o/w) emulsions. Such complex formulations often provide certain advantages that simple binary emulsions do not. Multiple emulsions in which individual oil droplets of an o/w emulsion enclose small water droplets constitute a w/o/w emulsion. Likewise a system of oil droplets enclosed in globules of water stabilized in an oily continuous phase provides an o/w/o emulsion. Emulsifiers can broadly be classified into four categories: synthetic surfactants, naturally occurring emulsifiers, absorption bases, and finely dispersed solids (see e.g., Ansel's Pharmaceutical Dosage Forms and Drug Delivery Systems, Allen, L V., Popovich N G., and Ansel H C., 2004, Lippincott Williams & Wilkins (8th ed.), New York, N.Y.; Idson, in Pharmaceutical Dosage Forms, Lieberman, Rieger and Banker (Eds.), 1988, Marcel Dekker, Inc., New York, N.Y., volume 1, p. 199).

[0262] Naturally occurring emulsifiers used in emulsion formulations include lanolin, beeswax, phosphatides, lecithin and acacia. Absorption bases possess hydrophilic properties such that they can soak up water to form w/o emulsions yet retain their semisolid consistencies, such as anhydrous lanolin and hydrophilic petrolatum. Finely divided solids have also been used as good emulsifiers especially in combination with surfactants and in viscous preparations. These include polar inorganic solids, such as heavy metal hydroxides, nonswelling clays such as bentonite, attapulgite, hectorite, kaolin, montmorillonite, colloidal aluminum silicate and colloidal magnesium aluminum silicate, pigments and nonpolar solids such as carbon or glyceryl tristearate.

[0263] A large variety of non-emulsifying materials are also included in emulsion formulations and contribute to the properties of emulsions. These include fats, oils, waxes, fatty acids, fatty alcohols, fatty esters, humectants, hydrophilic colloids, preservatives and antioxidants (Block, in Pharmaceutical Dosage Forms, Lieberman, Rieger and Banker (Eds.), 1988, Marcel Dekker, Inc., New York, N.Y., volume 1, p. 335; Idson, in Pharmaceutical Dosage Forms, Lieberman, Rieger and Banker (Eds.), 1988, Marcel Dekker, Inc., New York, N.Y., volume 1, p. 199).

[0264] Hydrophilic colloids or hydrocolloids include naturally occurring gums and synthetic polymers such as polysaccharides (for example, acacia, agar, alginic acid, carrageenan, guar gum, karaya gum, and tragacanth), cellulose derivatives (for example, carboxymethylcellulose and carboxypropylcellulose), and synthetic polymers (for example, carbomers, cellulose ethers, and carboxyvinyl polymers). These disperse or swell in water to form colloidal solutions that stabilize emulsions by forming strong interfacial films around the dispersed-phase droplets and by increasing the viscosity of the external phase.

[0265] As noted above, liposomes can optionally be prepared to contain surface groups to facilitate delivery of liposomes and their contents to specific cell populations. For example, a liposome can comprise a surface groups such as antibodies or antibody fragments, small effector molecules for interacting with cell-surface receptors, antigens, and other like compounds.

[0266] Surface groups can be incorporated into the liposome by including in the liposomal lipids a lipid derivatized with the targeting molecule, or a lipid having a polar-head chemical group that can be derivatized with the targeting molecule in preformed liposomes. Alternatively, a targeting moiety can be inserted into preformed liposomes by incubating the preformed liposomes with a ligand-polymer-lipid conjugate.

[0267] A number of liposomes comprising nucleic acids are known in the art. WO 96/40062 (Thierry et al.) discloses methods for encapsulating high molecular weight nucleic acids in liposomes. U.S. Pat. No. 5,264,221 (Tagawa et al.) discloses protein-bonded liposomes and asserts that the contents of such liposomes can include an RNA molecule. U.S. Pat. No. 5,665,710 (Rahman et al.) describes certain methods of encapsulating oligodeoxynucleotides in liposomes. WO 97/04787 (Love et al.) discloses liposomes comprising RNAi molecules targeted to the raf gene. In addition, methods for preparing a liposome composition comprising a nucleic acid can be found in e.g., U.S. Pat. Nos. 6,011,020; 6,074,667; 6,110,490; 6,147,204; 6,271,206; 6,312,956; 6,465,188; 6,506,564; 6,750,016; and 7,112,337. Each of these approaches can provide delivery of a synthetic, modified RNA as described herein to a cell.

[0268] In some embodiments of the aspects described herein, the synthetic, modified RNA described herein can be encapsulated in a nanoparticle. Methods for nanoparticle packaging are well known in the art, and are described, for example, in Bose S, et al (Role of Nucleolin in Human Parainfluenza Virus Type 3 Infection of Human Lung Epithelial Cells. J. Virol. 78:8146. 2004); Dong Y et al. Poly(d,l-lactide-co-glycolide)/montmorillonite nanoparticles for oral delivery of anticancer drugs. Biomaterials 26:6068. 2005); Lobenberg R. et al (Improved body distribution of 14C-labelled AZT bound to nanoparticles in rats determined by radioluminography. J Drug Target 5:171.1998); Sakuma S R et al (Mucoadhesion of polystyrene nanoparticles having surface hydrophilic polymeric chains in the gastrointestinal tract. Int J Pharm 177:161. 1999); Virovic L et al. Novel delivery methods for treatment of viral hepatitis: an update. Expert Opin Drug Deliv 2:707.2005); and Zimmermann E et al, Electrolyte- and pH-stabilities of aqueous solid lipid nanoparticle (SLN) dispersions in artificial gastrointestinal media. Eur J Pharm Biopharm 52:203. 2001), the contents of which are herein incorporated in their entireties by reference.

### Methods for Further Avoiding a Cell's Innate Immune or Interferon Response

[0269] Importantly, the inventors have discovered that the synthetic, modified RNAs described herein are significantly less cytotoxic when transfected into cells than their synthetic, unmodified RNA counterparts having the same nucleic acid sequence (as measured using e.g., TUNEL assay or simply monitoring cellularity after transfection), which permits repeated transfections of the cells for the duration necessary to express a polypeptide in a cell, or alter the phenotype or developmental fate of the cell. The decrease in cytotoxicity stems, in part, from the presence of modified nucleoside(s) in the RNA, which reduce or prevent the development of a cellular interferon response. In some embodiments of the aspects described herein, the cellular innate immune or interferon response comprises expression of a Type I or Type II interferon. In some embodiments of the aspects described herein, the cellular innate immune response comprises expression of one or more IFN signature genes selected from the group consisting of IFNα, IFNB1, IFIT, OAS1, PKR, RIGI, CCL5, RAP1A, CXCL10, IFIT1, CXCL11, MX1, RP11-167P23.2, HERC5, GALR3, IFIT3, IFIT2, RSAD2, and CDC20. As noted herein, such modifications for reducing or preventing the cellular innate response include, but are not limited to, 5-methylcytidine (5mC), N6-methyladenosine (m6A), 3,2′-O-dimethyluridine (m4U), 2-thiouridine (s2U), 2′ fluorouridine, pseudouridine, 2′-O-methyluridine (Um), 2′ deoxyuridine (2′ dU), 4-thiouridine (s4U), 5-methyluridine (m5U), 2′-O-methyladenosine (m6A), N6,2′-O-dimethyladenosine (m6Am), N6,N6,2′-O-trimethyladenosine (m6₂Am), 2′-O-methylcytidine (Cm), 7-methylguanosine (m7G), 2′-O-methylguanosine (Gm), N2,7-dimethylguanosine (m2,7G), N2,N2,7-trimethylguanosine (m2,2,7G), and inosine (I). In some preferred embodiments, the modifications comprise 5-methylcytidine and pseudouridine.

[0270] However, the cells transfected with the synthetic, modified RNA compositions described herein can further be treated or used with other measures to prevent or reduce any remaining cytotoxicity caused by the transfection procedure, the synthetic, modified RNAs, or a combination thereof. The cytotoxicity of synthetic, unmodified RNAs involves a cellular innate immune response designed to recognize a foreign pathogen (e.g., virus) and to produce interferons, which in turn stimulates the activity of the protein kinase PKR, Toll-like receptors (TLRs) and RIG-1, among others, to mediate anti-viral actions. A significant part of an individual cell's innate immune response to foreign RNA is represented by the so-called “PKR response” triggered largely by double-stranded RNA. To the extent that all or part of the PKR response pathway can be activated by foreign single-stranded RNA, such as synthetic, modified RNAs described herein, the response is discussed herein below.

[0271] Double stranded RNA dependent protein kinase (PKR) is a member of a family of kinases that phosphorylates the alpha subunit of protein synthesis initiation factor, eIF-2 (eIF-2α) and plays a role in the translational down regulation of gene expression (Clemens et al. Mol. Biol. Rep. 1994; vol. 19: 210-10). Activation of PKR involves two molecules binding in tandem to double stranded RNA and then phosphorylating each other in an intramolecular event. (Wu et al. 1997, J. Biol. Chem 272:1291-1296). PKR has been implicated in processes that rely on apoptosis as control mechanisms in vivo including antiviral activities, cell growth regulation and tumorigenesis (Donze et al. EMBO J. 1995, vol. 14: 3828-34; Lee et al. Virology 1994, vol. 199: 491-6; Jagus et al. Int. J. Biochem. Cell. Biol. 1989, vol. 9: 1576-86). Regulation of protein synthesis through activated PKR arises from the interaction of PKR with foreign RNA.

[0272] It has been shown that the PKR response can be reduced by removing the 5′-triphosphate on an RNA molecule, and that RNAs having a 5′-monophosphate, -diphosphate or -7-methyl guanosine cap do not activate PKR. Thus, in one embodiment, the synthetic, modified RNA described herein comprises a 5′-monophosphate, a 5′-diphosphate, or a 5′ 7-methyl guanosine cap to escape the immune response initiated by PKR. In another embodiment, the synthetic, modified RNA as described herein is treated to remove the 5′-triphosphate using an alkaline phosphatase, e.g., calf intestinal phosphatase. Other modifications to prevent activation of the immune response mediators (e.g., PKR, TLRs, and RIG-1) are discussed in detail in Nallagatla, S R, et al., (2008) RNA Biol 5(3):140-144, which is herein incorporated by reference in its entirety.

[0273] TLR7 is known to recognize single stranded RNA and binds exogenous RNAs, such as viral single-stranded RNAs in endosomes. Modifications to the RNA that reduce recognition and/or signaling by TLR7 can reduce this aspect of the innate immune response to the RNA. TLR7 signals through MyD88 and can activate a type I IFN pathway as well as an NF-κB/IL-8 pathway.

[0274] In one embodiment, the innate immune response or interferon response can be further decreased in cells transfected with a synthetic, modified RNA as described herein by co-transfection of a dominant negative mutant of a protein involved in the immunity pathways, such as RIG-1, MYD88, VISA, PKR and Toll-like receptors. Alternatively, RNA interference (e.g., siRNA, shRNA, etc.) can be used to inhibit expression of RIG-1, MYD88, VISA, PKR, TRIF, TRL7, or TLR8, which will result in a lower innate immune mediated response in the cells.

[0275] Another approach to reduce the innate immune mediated response is to inhibit the effect of secreted interferon on cellular receptors, for example, by scavenging secreted interferon using a soluble interferon receptor (e.g., B18R) or a neutralizing antibody. In one embodiment, a modified RNA encoding an interferon scavenging agent (e.g., a soluble interferon receptor) can be administered to cells to further reduce the innate immune response of the cells.

[0276] In one embodiment, the cells transfected with synthetic, modified RNA as described herein can be grown with genetically-engineered feeder cells that secrete B18R or neutralizing antibodies to type-1 interferons.

[0277] Small molecules that inhibit the innate immune response in cells, such as chloroquine (a TLR signaling inhibitor) and 2-aminopurine (a PKR inhibitor), can also be administered into the culture media of cells transfected with the synthetic, modified RNAs described herein. Some non-limiting examples of commercially available TLR-signaling inhibitors include BX795, chloroquine, CLI-095, OxPAPC, polymyxin B, and rapamycin (all available for purchase from INVIVOGEN™). In addition, inhibitors of pattern recognition receptors (PRR) (which are involved in innate immunity signaling) such as 2-aminopurine, BX795, chloroquine, and H-89, can also be used in the compositions and methods described herein. Media supplementation with cell-penetrating peptides that inhibit proteins in the immunity pathways described above can also be combined with the use of synthetic, modified RNAs provided herein. Some non-limiting examples of commercially available cell-penetrating peptides include Pepin-MYD (INVIVOGEN™) or Pepinh-TRIF (INVIVOGEN™). An oligodeoxynucleotide antagonist for the Toll-like receptor signaling pathway can also be added to the cell culture media to reduce immunity signaling.

[0278] Another method for reducing the immune response of a cell transfected with the synthetic, modified RNAs described herein is to co-transfect mRNAs that encode negative regulators of innate immunity such as NLRX1. Alternatively, one can co-transfect viral proteins known to modulate host cell defenses such as NS1, NS3/4A, or A46R.

[0279] In another embodiment, a synthetic, modified RNA composition encoding inhibitors of the innate immune system can be used to avoid the innate immune response generated in the cell.

[0280] It is also contemplated herein that, in some embodiments, in a research setting one of skill in the art can avoid the innate immune response generated in the cell by using cells genetically deficient in antiviral pathways (e.g., VISA knockout cells).

[0281] Since induction of the innate immune response results in cytokine release and death of the cells in culture, one can determine the extent of activation of an innate immune or interferon response by measuring e.g., apoptosis (using e.g., a TUNEL assay), reduced growth rate, reduced cellularity, reduction in global protein production, or secretion of cytokines (e.g., type-I interferons such as IFN-alpha and IFN-beta, type II interferons, such as IFNγ), or upregulation of interferon stimulated genes or interferon signature genes (e.g., IFNα, IFNB1, IFIT, OAS1, PKR, RIGI, CCL5, RAP1A, CXCL10, IFIT1, CXCL11, MX1, RP11-167P23.2, HERC5, GALR3, IFIT3, IFIT2, RSAD2, and CDC20. The level of cytokine release or cell death in a transfected cell culture treated with one of the above measures described for further reducing the innate immune response can be compared to the level of an equivalent cell culture not treated to further reduce the innate immune response.

### Cell Types

[0282] Provided herein are cells contacted with a synthetic, modified RNA molecule encoding a polypeptide, or a progeny cell of the contacted cell, where the synthetic, modified RNA molecule comprises one or more modifications, such that introducing the synthetic, modified RNA molecule to the cell results in a reduced innate immune response relative to the cell contacted with a synthetic RNA molecule encoding the polypeptide not comprising the one or more modifications. In some embodiments of these aspects, at least two nucleosides are modified. In some embodiments of the aspects described herein, the cellular innate immune or interferon response comprises expression of a Type I or Type II interferon. In some embodiments of the aspects described herein, the cellular innate immune response comprises expression of one or more IFN signature genes selected from the group consisting of IFNα, IFNB1, IFIT, OAS1, PKR, RIGI, CCL5, RAP1A, CXCL10, IFIT1, CXCL11, MX1, RP11-167P23.2, HERC5, GALR3, IFIT3, IFIT2, RSAD2, and CDC20. As described herein, such modifications for reducing or preventing the cellular innate immune response include, but are not limited to, 5-methylcytidine (5mC), N6-methyladenosine (m6A), 3,2′-O-dimethyluridine (m4U), 2-thiouridine (s2U), 2′ fluorouridine, pseudouridine, 2′-O-methyluridine (Um), 2′ deoxyuridine (2′ dU), 4-thiouridine (s4U), 5-methyluridine (m5U), 2′-O-methyladenosine (m6A), N6,2′-O-dimethyladenosine (m6Am), N6,N6,2′-O-trimethyladenosine (m6₂Am), 2′-O-methylcytidine (Cm), 7-methylguanosine (m7G), 2′-O-methylguanosine (Gm), N2,7-dimethylguanosine (m2,7G), N2,N2,7-trimethylguanosine (m2,2,7G), and inosine (I). In some preferred embodiments, the modifications comprise 5-methylcytidine and pseudouridine.

[0283] Essentially any cell type can be transfected with synthetic, modified RNAs as described herein to alter the phenotype of the cell. Thus, differentiated somatic cells and stem cells, as well of cells of a cell line, can be transfected with synthetic, modified RNA as described herein. Provided herein are exemplary somatic cells, stem cells, and cell line sources useful with the methods and compositions described herein. However, the description herein is not meant to be limiting and any cell known or used in the art can be phenotypically modified by introducing one or more synthetic, modified RNAs as described herein. In embodiments relating to tissue regeneration or transplantation in a subject, the cells can be from an autologous, i.e., from the same subject, or from heterologous sources.

### Somatic Cells

[0284] Essentially any primary somatic cell type can be used in the preparation of cells with an altered phenotype or altered developmental potential described herein. Some non-limiting examples of primary cells include, but are not limited to, fibroblast, epithelial, endothelial, neuronal, adipose, cardiac, skeletal muscle, immune cells, hepatic, splenic, lung, circulating blood cells, gastrointestinal, renal, bone marrow, and pancreatic cells. The cell can be a primary cell isolated from any somatic tissue including, but not limited to, brain, liver, lung, gut, stomach, intestine, fat, muscle, uterus, skin, spleen, endocrine organ, bone, etc. The term “somatic cell” further encompasses primary cells grown in culture, provided that the somatic cells are not immortalized.

[0285] Where the cell is maintained under in vitro conditions, conventional tissue culture conditions and methods can be used, and are known to those of skill in the art. Isolation and culture methods for various cells are well within the abilities of one skilled in the art.

[0286] Further, the parental cell can be from any mammalian species, with non-limiting examples including a murine, bovine, simian, porcine, equine, ovine, or human cell. In some embodiments, the cell is a human cell. In an alternate embodiment, the cell is from a non-human organism such as a non-human mammal.

### Stem Cells

[0287] One of the most intriguing aspects of the technologies comprising the synthetic, modified RNAs described herein is the ability to use such synthetic, modified RNAs to both generate a stem cell from a differentiated cell, and to then direct the differentiation of the stem cell to one or more desired cell types.

[0288] Stem cells are undifferentiated cells defined by their ability at the single cell level to both self-renew and differentiate to produce progeny cells, including self-renewing progenitors, non-renewing progenitors, and terminally differentiated cells. Stem cells, depending on their level of differentiation, are also characterized by their ability to differentiate in vitro into functional cells of various cell lineages from multiple germ layers (endoderm, mesoderm and ectoderm), as well as to give rise to tissues of multiple germ layers following transplantation and to contribute substantially to most, if not all, tissues following injection into blastocysts. (See, e.g., Potten et al., Development 110: 1001 (1990); U.S. Pat. Nos. 5,750,376, 5,851,832, 5,753,506, 5,589,376, 5,824,489, 5,654,183, 5,693,482, 5,672,499, and 5,849,553, all herein incorporated in their entireties by reference). The stem cells for use with the compositions and methods comprising synthetic, modified RNAs described herein can be naturally occurring stem cells or “induced” stem cells generated using the compositions, kits, and methods described herein, or by any method or composition known to one of skill in the art.

[0289] It is specifically noted that stem cells are useful not only for exploiting their differentiation potential to make desired cells, but also as a source for high quality iPS cells. That is, a non-pluripotent stem cell can be the starting point for the generation of high quality iPS cells by transfecting the non-pluripotent stem cell with one or more synthetic, modified RNAs encoding reprogramming factors, as described herein.

[0290] Stem cells are classified by their developmental potential as: (1) totipotent, meaning able to give rise to all embryonic and extraembryonic cell types; (2) pluripotent, meaning able to give rise to all embryonic cell types; (3) multipotent, meaning able to give rise to a subset of cell lineages, but all within a particular tissue, organ, or physiological system (for example, hematopoietic stem cells (HSC) can produce progeny that include HSC (self-renewal), blood cell restricted oligopotent progenitors and the cell types and elements (e.g., platelets) that are normal components of the blood); (4) oligopotent, meaning able to give rise to a more restricted subset of cell lineages than multipotent stem cells; and (5) unipotent, meaning able to give rise to a single cell lineage (e.g., spermatogenic stem cells).

[0291] Transfection with synthetic, modified RNAs directing the reprogramming of somatic, differentiated cells to pluripotency is specifically demonstrated herein. However, as also demonstrated herein, transfection with synthetic, modified RNAs can also be used to drive the differentiation, i.e., decrease the developmental potential of stem cells other than iPS cells,

[0292] Stem cells of interest for producing cells with a desired phenotype or a reduced differentiation potential include embryonic cells of various types, exemplified by human embryonic stem (hES) cells, described by Thomson et al. (1998) Science 282:1145; embryonic stem cells from other primates, such as Rhesus stem cells (Thomson et al. (1995) Proc. Natl. Acad. Sci USA 92:7844); marmoset stem cells (Thomson et al. (1996) Biol. Reprod. 55:254); and human embryonic germ (hEG) cells (Shambloft et al., Proc. Natl. Acad. Sci. USA 95:13726, 1998). Also of interest are lineage committed stem cells, such as hematopoietic or pancreatic stem cells. In some embodiments, the host cell transfected with synthetic, modified RNA is a multipotent stem cell or progenitor cell. Examples of multipotent cells useful in methods provided herein include, but are not limited to, murine embryonic stem (ES-D3) cells, human umbilical vein endothelial (HuVEC) cells, human umbilical artery smooth muscle (HuASMC) cells, human differentiated stem (HKB-Il) cells, and human mesenchymal stem (hMSC) cells. An additional stem cell type of interest for use with the compositions and methods described herein are cancer stem cells.

[0293] Adult stem cells are generally limited to differentiating into different cell types of their tissue of origin. However, if the starting stem cells are derived from the inner cell mass of the embryo, they can generate many cell types of the body derived from all three embryonic cell types: endoderm, mesoderm and ectoderm. Stem cells with this property are said to be pluripotent. Embryonic stem cells are one kind of pluripotent stem cell. Thus, pluripotent embryonic stem cells can be differentiated into many specific cell types, and that differentiation can be driven by the expression of polypeptides from synthetic, modified RNAs as described herein. Since the embryo is a potential source of all types of precursor cells, it is possible to differentiate embryonic stem cells into other lineages by providing the appropriate signals, such as the expression of proteins from synthetic, modified RNAs, to embryonic stem cells. Somatic stem cells also have major advantages, for example, using somatic stem cells allows a patient's own cells to be expanded in culture and then re-introduced into the patient. In addition and importantly, iPS cells generated from a patient provide a source of cells that can be expanded and re-introduced to the patient, before or after stimulation to differentiate to a desired lineage or phenotype. It is also contemplated that the compositions, methods and kits comprising the synthetic, modified RNAs described can be used to alter the developmental potential of a cancer stem cell, and thus render that cancer cell non-cancerous.

[0294] Cells derived from embryonic sources can include embryonic stem cells or stem cell lines obtained from a stem cell bank or other recognized depository institution. Other means of producing stem cell lines include the method of Chung et al (2006) which comprises taking a blastomere cell from an early stage embryo prior to formation of the blastocyst (at around the 8-cell stage). The technique corresponds to the pre-implantation genetic diagnosis technique routinely practiced in assisted reproduction clinics. The single blastomere cell is then co-cultured with established ES-cell lines and then separated from them to form fully competent ES cell lines.

[0295] Cells can also be derived from human umbilical cord blood cells (HUCBC), which are recognized as a rich source of hematopoietic and mesenchymal stem cells (Broxmeyer et al., 1992 Proc. Natl. Acad. Sci. USA 89:4109-4113). Cord blood cells are used as a source of transplantable stem and progenitor cells and as a source of marrow repopulating cells for the treatment of malignant diseases (e.g. acute lymphoid leukemia, acute myeloid leukemia, chronic myeloid leukemia, myelodysplastic syndrome, and nueroblastoma) and non-malignant diseases such as Fanconi's anemia and aplastic anemia (Kohli-Kumar et al., 1993 Br. J. Haematol. 85:419-422; Wagner et al., 1992 Blood 79; 1874-1881; Lu et al., 1996 Crit. Rev. Oncol. Hematol 22:61-78; Lu et al., 1995 Cell Transplantation 4:493-503). One advantage of HUCBC for use with the methods and compositions described herein is the immature immunity of these cells, which is very similar to fetal cells, and thus significantly reduces the risk for rejection by the host (Taylor & Bryson, 1985 J. Immunol. 134:1493-1497).

[0296] In other embodiments of the aspects described herein, cancer stem cells are used with the synthetic, modified RNAs described herein, in order to, for example, differentiate or alter the phenotype of a cancer stem cell to a non-tumorigenic state. It has been recently discovered that stem-like cells are present in some human tumors and, while representing a small minority of the total cellular mass of the tumor, are the subpopulation of tumor cells responsible for growth of the tumor. In contrast to normal stem cells, “tumor stem cells” or “cancer stem cells” are defined as cells that can undergo self-renewal, as well as abnormal proliferation and differentiation to form a tumor. Functional features of tumor stem cells are that they are tumorigenic; they can give rise to additional tumorigenic cells by self-renewal; and they can give rise to non-tumorigenic tumor cells. As used herein, particularly in reference to an isolated cell or isolated cell population, the term “tumorigenic” refers to a cell derived from a tumor that is capable of forming a tumor, when dissociated and transplanted into a suitable animal model such as an immunocompromised mouse. The developmental origin of tumor stem cells can vary among different types of cancers. It is believed, without wishing to be bound or limited by theory, that tumor stem cells may arise either as a result of genetic damage that deregulates normal mechanisms of proliferation and differentiation of stem cells (Lapidot et al., Nature 367(6464): 645-8 (1994)), or by the dysregulated proliferation of populations of cells that acquire stem-like properties.

[0297] Tumors contain a distinct subset of cells that share the properties of normal stem cells, in that they proliferate extensively or indefinitely and that they efficiently give rise to additional solid tumor stem cells. Within an established tumor, most cells may have lost the ability to proliferate extensively and form new tumors, while tumor stem cells proliferate extensively and give rise to additional tumor stem cells as well as to other tumor cells that lack tumorigenic potential. An additional trait of tumor stem cells is their resistance to therapeutics, such as chemotherapy. It is the small fraction of tumor stem cells and their immediate daughter cell population that proliferates and ultimately proves fatal.

[0298] Examples of tumors from which samples containing cancer stem cells can be isolated from or enriched, for use with the compositions and methods described herein, include sarcomas and carcinomas such as, but not limited to: fibrosarcoma, myxosarcoma, liposarcoma, chondrosarcoma, osteogenic sarcoma, chordoma, angiosarcoma, endotheliosarcoma, lymphangiosarcoma, mesothelioma, Ewing's tumor, lymphangioendotheliosarcoma, synovioma, leiomyosarcoma, rhabdomyosarcoma, colon carcinoma, pancreatic cancer, breast cancer, ovarian cancer, prostate cancer, squamous cell carcinoma, basal cell carcinoma, adenocarcinoma, sweat gland carcinoma, sebaceous gland carcinoma, papillary carcinoma, papillary adenocarcinomas, cystadenocarcinoma, medullary carcinoma, bronchogenic carcinoma, renal cell carcinoma, hepatoma, bile duct carcinoma, choriocarcinoma, seminoma, embryonal carcinoma, Wilms' tumor, cervical cancer, testicular tumor, lung carcinoma, small cell lung carcinoma, bladder carcinoma, epithelial carcinoma, astrocytic tumors (e.g., diffuse, infiltrating gliomas, anaplastic astrocytoma, glioblastoma, gliosarcoma, pilocytic astrocytoma, pleomorphic xanthoastrocytoma), oligodendroglial tumors and mixed gliomas (e.g., oligodendroglioma, anaplastic oligodendroglioma, oligoastrocytoma, anaplastic oligoastrocytoma), ependymal tumors (e.g., ependymoma, anaplastic ependymoma, myxopapillary ependymoma, subependymoma), choroid plexus tumors, neuroepithelial tumors of uncertain origin (astroblastoma, chordoid glioma, gliomatosis cerebri), neuronal and mixed-neuronal-glial tumors (e.g., ganglioglioma and gangliocytoma, desmoplastic infantile astrocytoma and ganglioglioma, dysembryoplastic neuroepithelial tumor, central neurocytoma, cerebellar liponeurocytoma, paraganglioglioma), pineal parenchymal tumors, embryonal tumors (medulloepithelioma, ependymoblastoma, medulloblastoma, primitive neuroectodermal tumor, atypical teratoid/rhabdoid tumor), peripheral neuroblastic tumors, tumors of cranial and peripheral nerves (e.g., schwannoma, neurinofibroma, perineurioma, malignant peripheral nerve sheath tumor), meningeal tumors (e.g., meningeomas, mesenchymal, non-meningothelial tumors, haemangiopericytomas, melanocytic lesions), germ cell tumors, tumors of the sellar region (e.g., craniopharyngioma, granular cell tumor of the neurohypophysis), hemangioblastoma, melanoma, and retinoblastoma. Additionally, the stem cell isolation methods of the invention are applicable to isolating stem cells from tissues other than characterized tumors (e.g., from tissues of diseases such as the so called “stem cell pathologies”).

[0299] Stem cells may be obtained from any mammalian species, e.g. human, primate, equine, bovine, porcine, canine, feline, rodent, e.g. mice, rats, hamster, etc. Embryonic stem cells are considered to be undifferentiated when they have not committed to a specific differentiation lineage. Such cells display morphological characteristics that distinguish them from differentiated cells of embryo or adult origin. Undifferentiated embryonic stem (ES) cells are easily recognized by those skilled in the art, and typically appear in the two dimensions of a microscopic view in colonies of cells with high nuclear/cytoplasmic ratios and prominent nucleoli.

[0300] In some embodiments, the stem cell is isolated. Most conventional methods to isolate a particular stem cell of interest involve positive and negative selection using markers of interest. For example, agents can be used to recognize stem cell markers, for instance labeled antibodies that recognize and bind to cell-surface markers or antigens on desired stem cells can be used to separate and isolate the desired stem cells using fluorescent activated cell sorting (FACS), panning methods, magnetic particle selection, particle sorter selection and other methods known to persons skilled in the art, including density separation (Xu et al. (2002) Circ. Res. 91:501; U.S. patent application Ser. No. 20030022367) and separation based on other physical properties (Doevendans et al. (2000) J. Mol. Cell. Cardiol. 32:839-851).

[0301] In those embodiments involving cancer stem cells, cancer stem cells can be identified using cell surface markers that also identify normal stem cells in the tissue of origin. As a non-limiting example, leukemic stem cells (LSCS) express the CD34 surface marker and lack the CD38 surface antigen, as is the case for normal (i.e., non-leukemic) hematopoietic stem cells (Bonnet and Dick, 1997). Cancer stem cells identified by cell surface marker expression can be purified by methods known to one of skill in the art, such as fluorescence-activated cell sorting (FACS). Methods of isolating cancer stem cells can be found in United States Patent Application 20100003265, the contents of which are herein incorporated in their entirety by reference.

[0302] Alternatively, genetic selection methods for isolating stem cells can be used, where a stem cell can be genetically engineered to express a reporter protein operatively linked to a tissue-specific promoter and/or a specific gene promoter, therefore the expression of the reporter can be used for positive selection methods to isolate and enrich the desired stem cell. For example, a fluorescent reporter protein can be expressed in the desired stem cell by genetic engineering methods to operatively link the marker protein to a promoter active in a desired stem cell (Klug et al. (1996) J. Clin. Invest. 98:216-224; U.S. Pat. No. 6,737,054). Other means of positive selection include drug selection, for instance as described by Klug et al., supra, involving enrichment of desired cells by density gradient centrifugation. Negative selection can be performed, selecting and removing cells with undesired markers or characteristics, for example fibroblast markers, epithelial cell markers etc.

[0303] Undifferentiated ES cells express genes that can be used as markers to detect the presence of undifferentiated cells, and whose polypeptide products can be used as markers for negative selection. For example, see U.S. application Ser. No. 2003/0224411 A1; Bhattacharya (2004) Blood 103(8):2956-64; and Thomson (1998), supra., each herein incorporated by reference. Human ES cell lines express cell surface markers that characterize undifferentiated nonhuman primate ES and human EC cells, including stage-specific embryonic antigen (SSEA)-3, SSEA-4, TRA-1-60, TRA-1-81, and alkaline phosphatase. The globo-series glycolipid GL7, which carries the SSEA-4 epitope, is formed by the addition of sialic acid to the globo-series glycolipid Gb5, which carries the SSEA-3 epitope. Thus, GL7 reacts with antibodies to both SSEA-3 and SSEA-4. Undifferentiated human ES cell lines do not stain for SSEA-1, but differentiated cells stain strongly for SSEA-1. Methods for proliferating hES cells in the undifferentiated form are described in WO 99/20741, WO 01/51616, and WO 03/020920.

[0304] In some embodiments, the methods further provide for enrichment and isolation of stem cells. The stem cells are selected for a characteristic of interest. In some embodiments, a wide range of markers may be used for selection. One of skill in the art will be able to select markers appropriate for the desired cell type. The characteristics of interest include expression of particular markers of interest, for example specific subpopulations of stem cells and stem cell progenitors will express specific markers.

[0305] In some embodiments, the stem cells used with the compositions and methods described herein are expanded. The cells are optionally collected, separated, and further expanded generating larger populations of progenitor cells for use in making cells of a particular cell type or cells having a reduced differentiation potential.

### Cell Lines

[0306] In some embodiments, the cells used with the synthetic, modified RNAs described herein are cells of a cell line. In one such embodiment, the host cell is a mammalian cell line. In one such embodiment, the mammalian cell line is a human cell line.

[0307] Examples of human cell lines useful in methods provided herein include, but are not limited to, 293T (embryonic kidney), BT-549 (breast), DMS 114 (small cell lung), DU145 (prostate), HT-1080 (fibrosarcoma), HEK 293 (embryonic kidney), HeLa (cervical carcinoma), HepG2 (hepatocellular carcinoma), HL-60(TB) (leukemia), HS 578T (breast), HT-29 (colon adenocarcinoma), Jurkat (T lymphocyte), M14 (melanoma), MCF7 (mammary), MDA-MB-453 (mammary epithelial), PERC6® (E1-transformed embryonal retina), RXF 393 (renal), SF-268 (CNS), SF-295 (CNS), THP-1 (monocyte-derived macrophages), TK-10 (renal), U293 (kidney), UACC-257 (melanoma), and XF 498 (CNS).

[0308] Examples of rodent cell lines useful in methods provided herein include, but are not limited to, mouse Sertoli (TM4) cells, mouse mammary tumor (MMT) cells, rat hepatoma (HTC) cells, mouse myeloma (NS0) cells, murine hybridoma (Sp2/0) cells, mouse thymoma (EL4) cells, Chinese Hamster Ovary (CHO) cells and CHO cell derivatives, murine embryonic (NIH/3T3, 3T3 L1) cells, rat myocardial (H9c2) cells, mouse myoblast (C2C12) cells, and mouse kidney (miMCD-3) cells.

[0309] Examples of non-human primate cell lines useful in methods provided herein include, but are not limited to, monkey kidney (CVI-76) cells, African green monkey kidney (VERO-76) cells, green monkey fibroblast (Cos-1) cells, and monkey kidney (CVI) cells transformed by SV40 (Cos-7). Additional mammalian cell lines are known to those of ordinary skill in the art and are catalogued at the American Type Culture Collection catalog (ATCC®, Manassas, Va.).

### Other Cell Types

[0310] While mammalian cells are preferred, in some embodiments, the host cell transfected with a modified RNA is a plant cell, such as a tobacco plant cell.

[0311] In some embodiments, the transfected cell is a fungal cell, such as a cell from Pichia pastoris, a Rhizopus cell, or a Aspergillus cell.

[0312] In some embodiments, the transfected cell is an insect cell, such as SF9 or SF-21 cells from Spodoptera frugiperda or S2 cells from Drosophila melanogaster.

### Cell Culture Methods

[0313] In general, cells useful with the methods described herein can be maintained and/or expanded in a culture medium that is available to and well-known in the art. Such media include, but are not limited to, Dulbecco's Modified Eagle's Medium® (DMEM), DMEM F12 Medium®, Eagle's Minimum Essential Medium®, F-12K Medium®, Iscove's Modified Dulbecco's Medium®, RPMI-1640 Medium®, and serum-free medium for culture and expansion of progenitor cells SFEM®. Many media are also available as low-glucose formulations, with or without sodium.

[0314] Cells can be cultured in low-serum or serum-free “defined” culture medium. Serum-free medium used to culture cells is described in, for example, U.S. Pat. No. 7,015,037. Many cells have been grown in serum-free or low-serum medium. For example, the medium can be supplemented with one or more growth factors. Commonly used growth factors include, but are not limited to, bone morphogenic protein, basic fibroblast growth factor, platelet-derived growth factor and epidermal growth factor, Stem cell factor, and thrombopoietin. See, for example, U.S. Pat. Nos. 7,169,610; 7,109,032; 7,037,721; 6,617,161; 6,617,159; 6,372,210; 6,224,860; 6,037,174; 5,908,782; 5,766,951; 5,397,706; and 4,657,866; all incorporated by reference herein for teaching growing cells in serum-free medium.

[0315] Cells in culture can be maintained either in suspension or attached to a solid support, such as extracellular matrix components. Progenitor cells may require additional factors that encourage their attachment to a solid support, such as type I and type II collagen, chondroitin sulfate, fibronectin, “superfibronectin” and fibronectin-like polymers, gelatin, poly-D and poly-L-lysine, thrombospondin and vitronectin. Progenitor cells can also be cultured in low attachment flasks such as but not limited to Corning Low attachment plates.

[0316] In some embodiments, the host cells are suitable for growth in suspension cultures. Suspension-competent host cells are generally monodisperse or grow in loose aggregates without substantial aggregation. Suspension-competent host cells include cells that are suitable for suspension culture without adaptation or manipulation (e.g., hematopoietic cells, lymphoid cells) and cells that have been made suspension-competent by modification or adaptation of attachment-dependent cells (e.g., epithelial cells, fibroblasts).

[0317] In some embodiments, the host cell is an attachment dependent cell which is grown and maintained in adherent culture.

### Altering Cellular Phenotypes and Developmental Potentials

[0318] The compositions and methods comprising the synthetic, modified RNAs described herein permit long-term, safe, and efficient alteration of cellular phenotypes or cellular developmental potentials, without the risk of permanent genomic alterations. Such compositions and methods are useful for a variety of applications, indications, and modalities, including, but not limited to, gene therapy, regenerative medicine, cancer therapies, tissue engineering, and drug screening.

[0319] Accordingly, provided herein are cells contacted with a synthetic, modified RNA molecule encoding a polypeptide, or a progeny cell of the contacted cell, where expression of the encoded polypeptide in the contacted cell alters a function or a developmental phenotype or developmental potential of the cell, and results in a reduced innate immune response relative to the cell contacted with a synthetic RNA molecule encoding the polypeptide not comprising any modifications. In some embodiments, the developmental potential of the contacted cell is decreased. In some embodiments, the developmental potential of the contacted cell is increased. As such, the polypeptide encoded by the synthetic, modified RNA molecule can be a reprogramming factor, a differentiation factor, or a de-differentiation factor.

[0320] Also provided herein are cells comprising an exogenously introduced modified, synthetic RNA encoding a developmental potential altering factor. In some embodiments, the cell is a human cell. In some embodiments of these aspects, the cells or immediate precursor cell(s) have been subjected to at least 3 separate rounds of contacting with the modified, synthetic RNA encoding the developmental potential altering factor. In some such embodiments, the cells have a reduced expression of a Type I or Type II IFN relative to a cell subjected to at least 3 separate rounds of contacting with an exogenously introduced non-modified synthetic RNA encoding the developmental potential altering factor. In some such embodiments, the cell has a reduced expression of at least one IFN-signature gene relative to a human cell subjected to at least 3 separate rounds of contacting with an exogenously introduced non-modified synthetic RNA encoding the developmental potential altering factor. As described herein, the IFN-signature gene can be selected from the group consisting of IFNα, IFNB1, IFIT, OAS1, PKR, RIGI, CCL5, RAP1A, CXCL10, IFIT1, CXCL11, MX1, RP11-167P23.2, HERC5, GALR3, IFIT3, IFIT2, RSAD2, and CDC20. The polypeptide encoded by the exogenous synthetic, modified RNA molecule can be a reprogramming factor, a differentiation factor, or a de-differentiation factor. The cell or its immediate precursor cell(s) can be derived from a somatic cell, a partially reprogrammed somatic cell, a pluripotent cell, a multipotent cell, a differentiated cell, or an embryonic cell.

[0321] As used herein, the term “developmental potential of a cell” refers to the total of all developmental cell fates or cell types that can be achieved by a cell upon differentiation. It should be understood that the developmental potential of a cell represents a spectrum: a terminally differentiated cell, e.g., a cardiac myocyte, has essentially no developmental potential under natural conditions—that is, under normal circumstances, it cannot differentiate to another cell type; while at the other end of the spectrum, a totipotent embryonic stem cell has the potential to differentiate to or give rise to cells of every type in an organism, as well as the extra-embryonic structures. A cell with “parental developmental potential” refers to a cell having the developmental potential of the parent cell that gave rise to it.

[0322] The term “developmental potential of a cell” is relative. For example, where a stem cell undergoes differentiation to a more differentiated or specialized phenotype, the resulting cell has a reduced developmental potential relative to the stem cell that produced it. Unless specifically stated otherwise, the developmental potential of a cell is the potential it has assuming no further manipulation of its potential—that is, while it is acknowledged that the technology is available (as described herein) to artificially increase, decrease or otherwise alter the developmental potential of nearly any cell, to say that a cell has “reduced developmental potential” means that, without further artificial manipulation to force the cell to a less differentiated phenotype, the cell can give rise to at least one fewer cell types than its immediate predecessor cell. That is, the cell resulting from a differentiation event has a reduced developmental potential despite the fact that it could possibly be manipulated to again become less differentiated. Thus, a cell with greater or higher developmental potential can differentiate into a greater variety of different cell types than a cell having a lower or decreased developmental potential.

[0323] Where, for example, a terminally- or only partially-differentiated cell is induced by artificial manipulation to become an induced pluripotent stem cell (an iPS cell), the resulting cell has increased developmental potential relative to the cell that produced it. As used herein, a “change” or “alteration” in the developmental potential of a cell occurs when the range of phenotypes to which a given cell can differentiate or give rise increases or decreases relative to the range naturally available to the cell prior to a differentiation, dedifferentiation or trans-differentiation event. By “increase” in this context is meant that there is at least additional one cell type or lineage to which a given cell can differentiate relative to the potential of the starting cell. By “decrease” in this context is meant that there is at least one fewer cell type or lineage to which the given cell can differentiate or give rise, relative to the potential of the starting cell.

[0324] Methods of manipulating the developmental potential of a cell, both to increase the potential and to decrease it, are described herein and others are known in the art. A “change” or “alteration” in the developmental potential of a cell can occur naturally, where, for example, a cell differentiates to a more specialized phenotype in its native environment in vivo. In various preferred aspects described herein, developmental potential or cell fate are directed by outside manipulation, and preferably by transfection with synthetic, modified RNA, as that term is defined herein. Thus, in one aspect, cells are contacted or transfected with synthetic, modified RNAs encoding one or more factors that re-direct or modify the phenotype of the cells.

[0325] Synthetic, modified RNAs as described herein can be made that direct the expression of essentially any gene product whose coding sequences can be cloned. The expression of the gene product from synthetic, modified RNA introduced to a cell that does not normally express that gene product necessarily results in a change in the phenotype of the cell whether or not it changes the differentiation status or differentiation potential of the cell. Simply put, the new phenotype is the cell's expression of the new gene product. Thus, in one aspect, encompassed herein is the expression of a protein from a synthetic, modified RNA introduced to a cell. Expression that does not necessarily change the differentiation status of the cell can nonetheless be useful in such embodiments, for example, where one wishes to correct or replace a defective function in a cell, due to a genetic defect or polymorphism, or in embodiments to target a cell to a particular location, e.g., by expressing a receptor or where one wishes to induce cell death in e.g., a tumor by expressing a death receptor, a death ligand, a cell cycle inhibitor etc.

[0326] In other aspects, the synthetic, modified RNAs described herein are well suited for directing the expression of any gene sequence, but are particularly well suited for modifying the differentiation status or the developmental potential of a cell, and for doing so without permanent change to the genome of the cell. This is true in part because reprogramming, differentiation and transdifferentiation each require relatively prolonged expression of one or more polypeptide factors in a target cell. Non-modified RNA is recognized as foreign by the cell's innate immune defenses against viral and bacterial RNA. If the cell transfected with non-modified RNA is not induced to undergo apoptosis or to otherwise shut down protein synthesis by a first transfection event, it will likely do so upon a subsequent transfection event with unmodified RNA.

### Reprogramming

[0327] The production of cells having an increased developmental potential (e.g., iPS cells) is generally achieved by the introduction of nucleic acid sequences, specifically DNA, encoding stem cell-associated genes into an adult, somatic cell. Historically, these nucleic acids have been introduced using viral vectors and the expression of the gene products results in cells that are morphologically, biochemically, and functionally similar to pluripotent stem cells (e.g., embryonic stem cells). This process of altering a cell phenotype from a somatic cell phenotype to a pluripotent stem cell phenotype is termed “reprogramming.” In the reprogramming methods described herein, the reprogramming is achieved by repeated transfection with synthetic, modified RNAs encoding the necessary reprogramming factors. The repeated transfection provides prolonged expression of the factors encoded by the synthetic, modified RNAs necessary to shift the developmental potential of the cell.

[0328] Accordingly, provided herein are pluripotent cells that are not embryonic stem cells, and which were not induced by viral expression of one or more reprogramming factors, and which when subjected to an unsupervised hierarchical cluster analysis, cluster more closely to embryonic stem cells than do pluripotent cells induced by viral expression of one or more reprogramming factors, exogenous protein introduction of one or more reprogramming factors, small molecule mediated expression or induction of one or more reprogramming factors, or any combination thereof. In some aspects, provided herein are pluripotent cells that are not embryonic stem cells, and which were not induced by viral expression of one or more reprogramming factors. In such aspects, the pluripotent cell subjected to an unsupervised hierarchical cluster analysis clusters more closely to a human embryonic stem cell than does a pluripotent cell induced by viral expression of one or more reprogramming factors. The pluripotent cell is generated from a precursor somatic cell, such as a precursor human somatic cell. The pluripotent cell or its immediate precursor cell(s) can also be derived from a somatic cell, partially reprogrammed somatic cell, a pluripotent cell, a multipotent cell, a differentiated cell, or an embryonic cell.

[0329] Reprogramming to generate pluripotent cells, as described herein, can be achieved by introducing a one or more synthetic, modified RNAs encoding stem cell-associated genes including, for example Oct-4 (also known as Oct-3/4 or Pouf51) (SEQ ID NO: 788), Sox1, Sox2 (SEQ ID NO: 941 or SEQ ID NO: 1501), Sox3, Sox 15, Sox 18, NANOG, Klf1, Klf2, Klf4 (SEQ ID NO: 501), Klf5, NR5A2, c-Myc (SEQ ID NO: 636), 1-Myc, n-Myc, Rem2, Tert, LIN28 (SEQ ID NO: 524), and Sall4. Accordingly, in some embodiments, the reprogramming factor is selected from the group consisting of: OCT4, SOX1, SOX 2, SOX 3, SOX15, SOX 18, NANOG, KLF1, KLF 2, KLF 4, KLF 5, NR5A2, c-MYC, 1-MYC, n-MYC, REM2, TERT, and LIN28. In general, successful reprogramming is accomplished by introducing at least Oct-4, a member of the Sox family, a member of the Klf family, and a member of the Myc family to a somatic cell. In some embodiments, LIN28 is also introduced. The generation of iPS cells using transfection of the synthetic, modified RNAs described herein, also referred to herein as “RiPS,” from a variety of starting cell types, including an adult somatic cell, is demonstrated in the Examples herein. The generation of reprogrammed cells using the compositions and methods described herein preferably causes the induction of endogenous stem-cell associated genes, such as SOX2, REX1, DNMT3B, TRA-1-60, TRA-1-81, SSEA3, SSEA4, OCT4, and NANOG. In some embodiments, at least two endogenous stem-cell-associated genes are induced. Preferably, the endogenous expression is at a level comparable to an embryonic stem cell, such as an embryonic stem cell cultured within the same laboratory.

[0330] The methods to reprogram cells using the synthetic, modified RNAs described herein can involve repeated contacting of the cells, such as somatic cells, in order to permit sufficient expression of the encoded reprogramming factors to maintain a stable change in the developmental potential of the cells, or progeny cells thereof, being contacted. Such methods can involve repeated transfections, such as for example, at least two, at least five, at least 6, at least 7, at least 8, at least 9, at least 10, at least 11, at least 12, at least 13, at least 14, at least 15, at least 16, at least 17, at least 18, at least 19, at least 20, at least 25, at least 30, or more transfections. In other words, the methods comprise repeating transfection using the synthetic, modified RNAs until a desired phenotype of the cell or population of cells is achieved. In some embodiments, the methods further comprise contacting with or introducing the reprogramming factors to the cells under low-oxygen conditions.

[0331] The efficiency of reprogramming (i.e., the number of reprogrammed cells) can be enhanced by the addition of various small molecules as shown by Shi, Y., et al (2008) Cell-Stem Cell 2:525-528, Huangfu, D., et al (2008) Nature Biotechnology 26(7):795-797, and Marson, A., et al (2008) Cell-Stem Cell 3:132-135, which are incorporated herein by reference in their entirety. It is contemplated that the methods described herein can also be used in combination with a single small molecule (or a combination of small molecules) that enhances the efficiency of induced pluripotent stem cell production or replaces one or more reprogramming factors during the reprogramming process. Some non-limiting examples of agents that enhance reprogramming efficiency include soluble Wnt, Wnt conditioned media, BIX-01294 (a G9a histone methyltransferase), PD0325901 (a MEK inhibitor), DNA methyltransferase inhibitors, histone deacetylase (HDAC) inhibitors, valproic acid, 5′-azacytidine, dexamethasone, suberoylanilide, hydroxamic acid (SAHA), and trichostatin (TSA), among others.

[0332] In some embodiments of the aspects described herein, an inhibitor of p53 can be used to reduce the stress response during a reprogramming regimen to direct the cell fate away from an apoptotic stimulus and towards reprogramming. Thus, treatment with a p53 inhibitor can enhance reprogramming in a population of cells. In one such embodiment, the inhibitor of p53 comprises an siRNA directed against p53 that is administered or expressed in the reprogramming cell. In another embodiment, a small molecule inhibitor of p53 (e.g., pifithrin-α) is administered to cells during the reprogramming process. In one embodiment, a modified RNA encoding Bcl2 is administered to the cells prior to, or in conjunction with, a modified RNA composition encoding at least one reprogramming factor to prevent apoptosis of cells during the process of reprogramming.

[0333] To confirm the induction of pluripotent stem cells, isolated clones can be tested for the expression of an endogenous stem cell marker. Such expression identifies the cells as induced pluripotent stem cells. Stem cell markers can be selected from the non-limiting group including SSEA1, CD9, Nanog, Fbx15, Ecat1, Esg1, Eras, Gdf3, Fgf4, Cripto, Dax1, Zpf296, Slc2a3, Rex1, Utf1, and Nat1. Methods for detecting the expression of such markers can include, for example, RT-PCR and immunological methods that detect the presence of the encoded polypeptides. Further evidence of reprogramming is shown by a reduction in or the loss of lamin A/C protein expression. Alternatively, reprogramming is detected by measuring an increase in acetylation, such as increased acetylation of H3 and H4 within the promoter of Oct4, or by measuring a decrease in methylation, for example, by measuring the demethylation of lysine 9 of histone 3. In each of these cases, reprogramming is measured relative to a control cell. In other embodiments, reprogramming is assayed by any other method that detects chromatin remodeling leading to the activation of an embryonic stem cell marker, such as Oct4.

[0334] The pluripotent stem cell character of the isolated cells can be confirmed by any of a number of tests evaluating the expression of ES markers and the ability to differentiate to cells of each of the three germ layers. As one example, teratoma formation in nude mice can be used to evaluate the pluripotent character of the isolated clones. The cells are introduced to nude mice and histology and/or immunohistochemistry is performed on a tumor arising from the cells. The growth of a tumor comprising cells from all three germ layers further indicates that the cells are pluripotent stem cells.

[0335] The pluripotent cells generated using the compositions and methods comprising the synthetic, modified RNAs described herein cluster more closely to a human embryonic stem cell than do pluripotent cells induced by viral expression of one or more reprogramming factors, when subjected to an unsupervised hierarchical analysis, i.e., the pluripotent cells have a phenotype closer to a embryonic stem cell phenotype than do pluripotent cells induced by viral expression of one or more reprogramming factors. In some embodiments, the unsupervised hierarchical cluster analysis is performed using a Euclidean distance with average linkage method in which the similarity metric for comparison between different cells is indicated on the height of cluster dendrogram. The unsupervised hierarchical cluster analysis can be performed on any data set available to a skilled artisan, such as gene expression data, protein expression data, DNA methylation data, histone modification data, and microRNA data.

[0336] Clustering, including, “unsupervised clustering analysis” or “unsupervised cluster analysis” refers to methods used in multivariate analysis to divide up objects into similar groups, or, in some embodiments, groups whose members are all close to one another on various dimensions being measured in the various objects. A key component of the analysis is repeated calculation of distance measures between objects, and between clusters once objects begin to be grouped into clusters. The outcome is typically represented graphically as a dendrogram. Hierarchical cluster analysis can be performed using any of a variety of unbiased computational methods, algorithms and software programs known to one of skill in the art that identify clusters or natural data structures from large data sets, such as, for example, gene expression data sets. Such methods include, but are not limited to, bottom-up hierarchical clustering, K-means clustering Affinity Propagation, non-Negative Matrix Factorization, spectral clustering, Self-Organizing Map (SOM) algorithms, and the like. In some embodiments of the aspects described herein, one SOM-based method for use in unsupervised hierarchical clustering analysis of cells contacted with the synthetic, modified RNAs described herein is the Automatic clustering using density-equalized SOM Ensembles (AUTOsome) method as described in A. M. Newman and J. B. Cooper (2010, Cell Stem Cell, 7:258-262) and A. M. Newman and J. B. Cooper (2010, BMC Bioinformatics 2010, 11:117), the contents of each of which are herein incorporated in their entireties by reference.

[0337] Accordingly, also provided herein are compositions for generating such pluripotent cells, comprising at least one synthetic, modified RNA encoding a reprogramming factor, and cell growth media. The synthetic, modified RNAs can comprise any modification for reducing the innate immune response, as described herein, such as a 5′ cap, a poly(A) tail, a Kozak sequence, a 3′ untranslated region, a 5′ untranslated region, or any combination thereof. In preferred embodiments, the synthetic, modified RNAs comprise at least two nucleoside modifications, preferably 5-methylcytidine (5mC) and pseudouridine.

[0338] In some embodiments, the compositions permit an efficiency of pluripotent cell generation from a starting population of cells, such as somatic cells, of at least 1%. In some embodiments, the efficiency of pluripotent cell generation is at least 1.1%, at least 1.2%, at least 1.3%, at least 1.4%, at least 1.5%, at least 1.6%, at least 1.7%, at least 1.8%, at least 1.9%, at least 2.0%, at least 2.1%, at least 2.2%, at least 2.3%, at least 2.4%, at least 2.5%, at least 2.6%, at least 2.7%, at least 2.8%, at least 2.9%, at least 3.0%, at least 3.1%, at least 3.2%, at least 3.3%, at least 3.4%, at least 3.5%, at least 3.6%, at least 3.7%, at least 3.8%, at least 3.9%, at least 4.0%, at least 4.1%, at least 4.2%, at least 4.3%, at least 4.4%, at least 4.5%, at least 4.6%, at least 4.7%, at least 4.8%, at least 4.9%, at least 5.0%, 5.1%, at least 5.2%, at least 5.3%, at least 5.4%, at least 5.5%, at least 5.6%, at least 5.7%, at least 5.8%, at least 5.9%, at least 6.0%, 6.1%, at least 6.2%, at least 6.3%, at least 6.4%, at least 6.5%, at least 6.6%, at least 6.7%, at least 6.8%, at least 6.9%, at least 7.0%, 7.1%, at least 8.2%, at least 8.3%, at least 8.4%, at least 8.5%, at least 8.6%, at least 8.7%, at least 8.8%, at least 8.9%, at least 9.0%, 9.1%, at least 9.2%, at least 9.3%, at least 9.4%, at least 9.5%, at least 1.6%, at least 9.7%, at least 9.8%, at least 9.9%, at least 10.0%, or more.

[0339] In some embodiments, the compositions permit a rate of pluripotent cell generation from a starting population of cells, such as somatic cells of less than 25 days, less than 24 days, less than 23 days, less than 22 days, less than 21 days, 20 days, less than 19 days, less than 18 days, less than 17 days, less than 16 days, less than 15 days, less than 14 days, and greater than 7 days.

[0340] The reprogramming factor(s) for use in the compositions, methods, and kits for reprogramming cells described herein is selected from the group consisting of: OCT4 (SEQ ID NO: 788), SOX1, SOX 2 (SEQ ID NO: 941 or SEQ ID NO: 1501), SOX 3, SOX15, SOX 18, NANOG, KLF1, KLF 2, KLF 4 (SEQ ID NO: 501), KLF 5, NR5A2, c-MYC (SEQ ID NO: 636), 1-MYC, n-MYC, REM2, TERT, and LIN28 (SEQ ID NO: 524). In some embodiments, the compositions comprise at least 4 synthetic, modified RNAs encoding at least 4 different reprogramming factors. In some such embodiments, the at least 4 different reprogramming factors encoded by the at least 4 modified synthetic RNAs comprise OCT4, SOX2, KLF4, and c-MYC. The compositions can further comprise a modified synthetic RNA encoding a LIN28 reprogramming factor. In some embodiments, the composition does not comprise a modified, synthetic RNA encoding the reprogramming factor c-MYC.

### Transdifferentiation

[0341] Transdifferentiation refers to a process by which the phenotype of a cell can be switched to that of another cell type, without the formation of a pluripotent intermediate cell. Thus, the methods do not require that the cell first be de-differentiated (or reprogrammed) and then differentiated to another cell type; rather the cell type is merely “switched” from one cell type to another without first forming a less differentiated phenotype. Thus, “transdifferentiation” refers to the capacity of differentiated cells of one type to lose identifying characteristics and to change their phenotype to that of other fully differentiated cells.

[0342] Transdifferentiation can be achieved by introducing into a cell a synthetic, modified RNA composition that permits expression of a cell-type specific differentiation factor. For example, to transdifferentiate a cell to a myogenic lineage one can express MyoD using a modified RNA as described herein. While the introduction of a single differentiation factor can be enough to transdifferentiate a cell, it is also contemplated herein that a plurality of different differentiation factors are introduced to the cell during the transdifferentiation regime. Alternatively, synthetic, modified RNAs that inhibit expression of cell-type specific polypeptides of the original cell-type can also be introduced to the cell, in effect “turning off” the original phenotype of the cell. In one embodiment, modified RNAs that express a desired cell-type specific polypeptide to turn on a desired phenotype are used in combination with modified RNA interference molecules used to turn off the existing cell phenotype, in order to cause transdifferentiation of the cell from one phenotype to another.

[0343] Transdifferentiation can be useful in tissue engineering at e.g., an injury or disease site. In one embodiment, transdifferentiation is performed in vivo at the site of injury or disease. In another embodiment, an organ or tissue can be transdifferentiated/regenerated in vitro, and then introduced back into the body.

### Differentiation

[0344] Differentiation is the process by which an unspecialized (“uncommitted”) or less specialized cell acquires the features of a specialized cell (e.g., a terminally differentiated cell) such as, for example, a cardiomyocyte, a nerve cell or a skeletal muscle cell. A differentiated or differentiation-induced cell is one that has taken on a more specialized (“committed”) position within the lineage of a cell (e.g., reduced differentiation potential). The term “committed”, when applied to the process of differentiation, refers to a cell that has proceeded in the differentiation pathway to a point where, under normal circumstances, it will continue to differentiate into a specific cell type or subset of cell types, and cannot, under normal circumstances, differentiate into a different cell type or revert to a less differentiated cell type. De-differentiation refers to the process by which a cell reverts to a less specialized (or committed) position within the lineage of a cell (i.e., increased developmental potential). As used herein, the lineage of a cell defines the heredity or fate of the cell, i.e., which cells it came from and what cells it can give rise to. The lineage of a cell places the cell within a hereditary scheme of development and differentiation. A lineage-specific marker refers to a characteristic specifically associated with the phenotype of cells of a lineage of interest and can be used to assess the differentiation of an uncommitted cell to the lineage of interest.

[0345] Cells that are differentiated using the compositions and methods comprising synthetic, modified RNAs, as described herein, can be differentiated into any cell type or lineage known to one of skill in the art. Such cells can be of a lineage selected from an ecotodermal lineage, a mesodermal lineage, or an endodermal lineage. Exemplary ectodermal lineage cells include, but are not limited to, cells of the epidermis (skin cells, melanocytes), and cells of the neuronal lineage. Exemplary mesodermal lineage cells include, but are not limited to, cells of the circulatory system (cardiac cells and blood vessel cells), cells of the connective tissue, bone cells, dermal cells, myocytes (smooth and skeletal), certain cells of the urinary system, such as kidney cells, splenic cells, mesothelial cells (cells of the peritoneum, pleura, and pericardium), non-germ cells of the reproductive system, and hematopoietic lineage cells. Exemplary endodermal lineage cells include, but are not limited to, cells of the gastrointestinal system, cells of the respiratory tract, cells of the endocrine glands, cells of the auditory system, and certain cells of the urinary system, such as the bladder and parts of the urethra.

[0346] Accordingly, compositions and methods described herein include a method for programming or directing the differentiation of cells (e.g., stem cells) comprising contacting the cells desired to be differentiated with a synthetic, modified RNA or synthetic, modified RNA composition. The cells can be transfected a plurality of times until the desired differentiated phenotype is achieved, as measured by e.g., a gene expression array of cell-type specific markers, Western blotting, cell function assays etc. A selection compound may be added to the mixture, but is not required.

[0347] Typically, the synthetic, modified RNA composition transfected into the cells to promote their differentiation encodes a cell-type specific differentiation factor or factors. For example, to differentiate a cell to a neuronal cell phenotype, a synthetic, modified RNA encoding at least one neuronal differentiation factor, for example Ascl1, Brn2, Myt1l, or a combination thereof is transfected into the cell. To promote differentiation to a myogenic phenotype, a synthetic, modified RNA such as one encoding MyoD can be transfected into a cell. To differentiate a cell to a macrophage phenotype, a macrophage factor such as e.g., CEBP-alpha or PU.1 is transfected into the cell. In one embodiment, a modified RNA that encodes Ngn3, Pdx1, MAFA, or any combination thereof can be used to differentiate cells to a pancreatic beta cell phenotype. A synthetic, modified RNA encoding PRDM16 can be applied to Myf5-expressing progenitors to induce differentiation into brown fat cells. Oligodendrocytes may be specified from neural precursors using a synthetic, modified RNA encoding Ascl1. It has been reported that hepatocyte differentiation requires the transcription factor HNF-4-α. (Li et al., Genes Dev. 14:464, 2000). A synthetic, modified RNA can be applied to a cell, such as a stem cell or induced pluripotent stem cell generated using the compositions described herein, that inhibit or suppress one or more component of the wnt/β-catenin pathway to become a cardiovascular progenitor cell. These examples are not meant to be limiting and essentially any cell-type specific factor or differentiation factor known in the art can be expressed in a cell using a synthetic, modified RNA or synthetic, modified RNA composition as described herein. Table 1 provides a non-limiting list of exemplary transcription factors and corresponding mRNA sequence identifiers that can be used to alter the developmental potential or phenotype of a cell.

[0348] In other embodiments, cells with higher or increased developmental potential, e.g., pluripotent cells, multipotent cells, etc., can be induced to differentiate by manipulating their external environment. For example, cells can be maintained under culture conditions that induce differentiation of the cells to a desired lineage. As but one example, in some embodiments, cells with higher or increased developmental potential, generated using the compositions and methods comprising synthetic, modified RNAs described herein, can be differentiated into islet-like cells for administration to a patient in need thereof, for example, a patient having or at risk for diabetes. In such embodiments, islet-like cells, which includes insulin-producing cells and glucagon-producing cells, can be differentiated using any of the methods described in US Patent Publication No.: 20100240130, the contents of which are herein incorporated in their entirety by reference. For example, cells can be differentiated whereby the first culturing step takes place in the presence of an Activin, the next culturing step utilizes a suspension culture that takes place in the presence of a noggin, an FGF-2, and an EGF, and a final culturing step in which the cells are cultured with nicotinamide. In certain embodiments, sodium butyrate can be included in the culture medium. In other embodiments, pluripotent cells can be differentiated into islet-like cells by directed differentiation. In certain embodiments, expression of additional genes at the site of islet-like cell administration, using the compositions and methods described herein, can facilitate adoption of the functional β-islet cell phenotype, enhance the beneficial effect of the administered cells, and/or increase proliferation and/or activity of host cells neighboring the treatment site.

[0349] In other embodiments, cells with higher or increased developmental potential, generated using the compositions and methods comprising synthetic, modified RNAs described herein, can be differentiated, for example, into neuronal cells, such as oligodendrocytes, for example, for treatment of spinal cord injuries. In such embodiments, pluripotent cells can be differentiated using any of the compositions or methods found in US Patent Publication No.: 20090232779 or US Patent Publication No.: 20090305405, the contents of each of which are herein incorporated in their entireties by reference. For example, cells can be differentiated to neural or glial lineages, using medium including any of the following factors in an effective combination: Brain derived neurotrophic factor (BDNF), neurotrophin-3 (NT-3), NT-4, epidermal growth factor (EGF), ciliary neurotrophic factor (CNTF), nerve growth factor (NGF), retinoic acid (RA), sonic hedgehog, FGF-8, ascorbic acid, forskolin, fetal bovine serum (FBS), and bone morphogenic proteins (BMPs).

[0350] In other exemplary embodiments, cells with higher or increased developmental potential generated using the compositions and methods comprising synthetic, modified RNAs described herein can be differentiated into heptaocyte-like cells for treatment of liver diseases, such as cirrhosis. For example, cells can be differentiated to hepatocyte-like cells, using medium including any of the following factors in an effective combination or sequence: a hepatocyte supportive extracellular matrix, such as collagen or Matrigel; suitable differentiation agents, such as various isomers of butyrate and their analogs, exemplified by n-butyrate; a hepatocyte maturation factor, such as an organic solvent like dimethyl sulfoxide (DMSO); a maturation cofactor such as retinoic acid; a cytokine or hormone such as a glucocorticoid, epidermal growth factor (EGF), insulin, transforming growth factors (TGF-α and TGF-β), fibroblast growth factors (FGF), heparin, hepatocyte growth factors (HGF), interleukins (IL-1 and IL-6), insulin-like growth factors (IGF-I and IGF-II), and heparin-binding growth factors (HBGF-1).

[0351] The success of a differentiation program can be monitored by any of a number of criteria, including characterization of morphological features, detection or quantitation of expressed cell markers and enzymatic activity, and determination of the functional properties of the desired end cell types in vitro or in vivo. The level of mRNA corresponding to a marker can be determined both by in situ and by in vitro formats. The isolated mRNA can be used in hybridization or amplification assays that include, but are not limited to, Southern or Northern analyses, polymerase chain reaction analyses and probe arrays. Protein markers can be measured e.g., by immunohistochemical techniques or the morphology of the cell can be monitored. Biochemical approaches, e.g., the ability of the differentiated cell to respond to a cell-type specific stimulus can also be monitored. An increase in the expression of a cell specific marker may be by about 5%, 10%, 25%, 50%, 75% or 100%. In one embodiment, the synthetic, modified RNA composition can direct cell fate towards different germ layers without definitively specifying a terminally differentiated cell type. For example, a synthetic, modified RNA encoding Sox17 or GATA6 can be used for definitive endodermal specification from pluripotent cells, such as an iPS or embryonic stem cell. Similarly, a synthetic, modified RNA encoding T (Brachyury) can be used for specification of mesoderm. For example, markers for neural cells include, but are not limited to: β-tubulin III or neurofilament, which are characteristic of neurons, glial fibrillary acidic protein (GFAP), present in astrocytes; galactocerebroside (GalC) or myelin basic protein (MBP), characteristic of oligodendrocytes; nestin, characteristic of neural precursors and other cells, and A2B5 and NCAM, characteristic of glial progenitors and neural progenitors, respectively. Similarly, an adipocyte can be detected by assaying for Oil-Red-O staining or acetylated LDL uptake. Cardiomyocytes can be detected by assaying for the expression of one or more cardiomyocyte specific markers, such as cardiotroponin I, Mef2c, connexin43, Nkx2.5, GATA-4, sarcomeric actinin, cariotroponin T and TBX5, and sarcomeric actinin, α-cardiac myosin heavy chain, actin, or ventricular myosin light chain 2 (MLC-2v). For skeletal muscle, markers include myoD, myogenin, and myf-5. Markers of interest for identifying liver cells include α-fetoprotein (liver progenitors); albumin, α₁-antitrypsin, glucose-6-phosphatase, cytochrome p450 activity, transferrin, asialoglycoprotein receptor, and glycogen storage (hepatocytes); CK7, CK19, and γ-glutamyl transferase (bile epithelium). The presence of endothelial cells can be detected by assaying the presence of an endothelial cell specific marker, such as CD31+, PECAM (platelet endothelial cell adhesion molecule), Flk-1, tie-1, tie-2, vascular endothelial (VE) cadherin, MECA-32, and MEC-14.7. For pancreatic cells, pdx and insulin secretion can be used for determination of differentiation. The level of expression can be measured in a number of ways, including, but not limited to: measuring the mRNA encoded by the markers; measuring the amount of protein encoded by the markers; or measuring the activity of the protein encoded by the markers.

[0352] In some embodiments, differentiation is detected by measuring an alteration in the morphology or biological function or activity of a differentiated cell. An alteration in biological function may be assayed, for example, by measuring an increase in acetylated LDL uptake in a reprogrammed adipocyte. For example, GABA-secreting neurons can be identified by production of glutamic acid decarboxylase or GABA. Dopaminergic neurons can be identified by production of dopa decarboxylase, dopamine, or tyrosine hydroxylase. Also, for example, differentiated hepatocyte lineage cells differentiated can be identified by α₁-antitrypsin (AAT) synthesis, albumin synthesis, evidence of glycogen storage, evidence of cytochrome p450 activity, and evidence of glucose-6-phosphatase activity. Other methods for assaying cell morphology and function are known in the art and are described in the Examples.

[0353] In some embodiments, the cells of the compositions and methods described herein are further cultured in the presence of cell specific growth factors, such as angiogenin, bone morphogenic protein-1, bone morphogenic protein-2, bone morphogenic protein-3, bone morphogenic protein-4, bone morphogenic protein-5, bone morphogenic protein-6, bone morphogenic protein-7, bone morphogenic protein-8, bone morphogenic protein-9, bone morphogenic protein-10, bone morphogenic protein-11, bone morphogenic protein-12, bone morphogenic protein-13, bone morphogenic protein-14, bone morphogenic protein-15, bone morphogenic protein receptor IA, bone morphogenic protein receptor IB, brain derived neurotrophic factor, ciliary neutrophic factor, ciliary neutrophic factor receptor-alpha, cytokine-induced neutrophil chemotactic factor 1, cytokine-induced neutrophil, chemotactic factor 2-alpha, cytokine-induced neutrophil chemotactic factor 2-beta, beta-endothelial cell growth factor, endothelia 1, epidermal growth factor, epithelial-derived neutrophil attractant, fibroblast growth factor 4, fibroblast growth factor 5, fibroblast growth factor 6 fibroblast growth factor 7, fibroblast growth factor 8, fibroblast growth factor b, fibroblast growth factor c, fibroblast growth factor 9, fibroblast growth factor 10, fibroblast growth factor acidic, fibroblast growth factor basic, glial cell line-derived neutrophil factor receptor-alpha-1, glial cell line-derived neutrophil factor receptor-alpha-2, growth related protein, growth related protein-alpha, growth related protein-beta, growth related protein-gamma, heparin binding epidermal growth factor, hepatocyte growth factor, hepatocyte growth factor receptor, insulin-like growth factor I, insulin-like growth factor receptor, insulin-like growth factor II, insulin-like growth factor binding protein, keratinocyte growth factor, leukemia inhibitory factor, leukemia inhibitory factor receptor-alpha, nerve growth factor, nerve growth factor receptor, neurotrophin-3, neurotrophin-4, placenta growth factor, placenta growth factor 2, platelet-derived endothelial cell growth factor, platelet derived growth factor, platelet derived growth factor A chain, platelet derived growth factor AA, platelet derived growth factor AB, platelet derived growth factor B chain, platelet derived growth factor BB, platelet derived growth factor receptor-alpha, platelet derived growth factor receptor-beta, pre-B cell growth stimulating factor, stem cell factor, stem cell factor receptor, transforming growth factor-alpha, transforming growth factor-beta, transforming growth factor-beta-1, transforming growth factor-beta-1-2, transforming growth factor-beta-2, transforming growth factor-beta-3, transforming growth factor-beta-5, latent transforming growth factor-beta-1, transforming growth factor-beta-binding protein I, transforming growth factor-beta-binding protein II, transforming growth factor-beta-binding protein III, tumor necrosis factor receptor type I, tumor necrosis factor receptor type II, urokinase-type plasminogen activator receptor, vascular endothelial growth factor, and chimeric proteins and biologically or immunologically active fragments thereof. Such factors can also be injected or otherwise administered directly into an animal system for in vivo integration.

### Cell Modifications

[0354] Homing Moieties and Cell-Surface Receptors

[0355] In some aspects and embodiments of the aspects described herein, a synthetic, modified RNA can be used to express a ligand or ligand receptor on the surface of a cell (e.g., a homing moiety). A ligand or ligand receptor moiety attached to a cell surface permits the cell to have a desired biological interaction with a tissue or an agent in vivo. A ligand can be an antibody, an antibody fragment, an aptamer, a peptide, a vitamin, a carbohydrate, a protein or polypeptide, a receptor, e.g., cell-surface receptor, an adhesion molecule, a glycoprotein, a sugar residue, a therapeutic agent, a drug, a glycosaminoglycan, or any combination thereof. For example, a ligand can be an antibody that recognizes a cancer-cell specific antigen, rendering the cell capable of preferentially interacting with tumor cells to permit tumor-specific localization of a modified cell. A ligand can confer the ability of a cell composition to accumulate in a tissue to be treated, since a preferred ligand is capable of interacting with a target molecule on the external face of a tissue to be treated. Ligands having limited cross-reactivity to other tissues are generally preferred.

[0356] In some cases, a ligand can act as a homing moiety which permits the cell to target to a specific tissue or interact with a specific ligand. Such homing moieties can include, for example, any member of a specific binding pair, antibodies, monoclonal antibodies, or derivatives or analogs thereof, including without limitation: Fv fragments, single chain Fv (scFv) fragments, Fab′ fragments, F(ab′)₂ fragments, single domain antibodies, camelized antibodies and antibody fragments, humanized antibodies and antibody fragments, and multivalent versions of the foregoing; multivalent binding reagents including without limitation: monospecific or bispecific antibodies, such as disulfide stabilized Fv fragments, scFv tandems ((scFv)₂ fragments), diabodies, tribodies or tetrabodies, which typically are covalently linked or otherwise stabilized (i.e., leucine zipper or helix stabilized) scFv fragments; and other homing moieties include for example, aptamers, receptors, and fusion proteins.

[0357] In some embodiments, the homing moiety is a surface-bound antibody, which can permit tuning of cell targeting specificity. This is especially useful since highly specific antibodies can be raised against an epitope of interest for the desired targeting site. In one embodiment, multiple antibodies are expressed on the surface of a cell, and each antibody can have a different specificity for a desired target. Such approaches can increase the avidity and specificity of homing interactions.

[0358] A skilled artisan can select any homing moiety based on the desired localization or function of the cell, for example an estrogen receptor ligand, such as tamoxifen, can target cells to estrogen-dependent breast cancer cells that have an increased number of estrogen receptors on the cell surface. Other non-limiting examples of ligand/receptor interactions include CCR1 (e.g., for treatment of inflamed joint tissues or brain in rheumatoid arthritis, and/or multiple sclerosis), CCR7, CCR8 (e.g., targeting to lymph node tissue), CCR6, CCR9, CCR10 (e.g., to target to intestinal tissue), CCR4, CCR10 (e.g., for targeting to skin), CXCR4 (e.g., for general enhanced transmigration), HCELL (e.g., for treatment of inflammation and inflammatory disorders, bone marrow), Alpha4beta7 (e.g., for intestinal mucosa targeting), VLA-4/VCAM-1 (e.g., targeting to endothelium). In general, any receptor involved in targeting (e.g., cancer metastasis) can be harnessed for use in the methods and compositions described herein. Table 2 and Table 3 provide non-limiting examples of CD (“cluster of differentiation”) molecules and other cell-surface/membrane bound molecules and receptors that can be expressed using the synthetic, modified RNA compositions and methods described herein for targeting and homing to cells of interest, or for changing the phenotype of a cell.

[0359] Mediators of Cell Death

[0360] In one embodiment, a synthetic, modified RNA composition can be used to induce apoptosis in a cell (e.g., a cancer cell) by increasing the expression of a death receptor, a death receptor ligand or a combination thereof. This method can be used to induce cell death in any desired cell and has particular usefulness in the treatment of cancer where cells escape natural apoptotic signals.

[0361] Apoptosis can be induced by multiple independent signaling pathways that converge upon a final effector mechanism consisting of multiple interactions between several “death receptors” and their ligands, which belong to the tumor necrosis factor (TNF) receptor/ligand superfamily. The best-characterized death receptors are CD95 (“Fas”), TNFR1 (p55), death receptor 3 (DR3 or Apo3/TRAMO), DR4 and DR5 (apo2-TRAIL-R2). The final effector mechanism of apoptosis is the activation of a series of proteinases designated as caspases. The activation of these caspases results in the cleavage of a series of vital cellular proteins and cell death. The molecular mechanism of death receptors/ligands-induced apoptosis is well known in the art. For example, Fas/FasL-mediated apoptosis is induced by binding of three FasL molecules which induces trimerization of Fas receptor via C-terminus death domains (DDs), which in turn recruit an adapter protein FADD (Fas-associated protein with death domain) and Caspase-8. The oligomerization of this trimolecular complex, Fas/FAIDD/caspase-8, results in proteolytic cleavage of proenzyme caspase-8 into active caspase-8 that, in turn, initiates the apoptosis process by activating other downstream caspases through proteolysis, including caspase-3. Death ligands in general are apoptotic when formed into trimers or higher order of structures. As monomers, they may serve as antiapoptotic agents by competing with the trimers for binding to the death receptors.

[0362] In one embodiment, the synthetic, modified RNA composition encodes for a death receptor (e.g., Fas, TRAIL, TRAMO, TNFR, TLR etc). Cells made to express a death receptor by transfection of modified RNA become susceptible to death induced by the ligand that activates that receptor. Similarly, cells made to express a death ligand, e.g., on their surface, will induce death of cells with the receptor when the transfected cell contacts the target cell. In another embodiment, the modified RNA composition encodes for a death receptor ligand (e.g., FasL, TNF, etc). In another embodiment, the modified RNA composition encodes a caspase (e.g., caspase 3, caspase 8, caspase 9 etc). Where cancer cells often exhibit a failure to properly differentiate to a non-proliferative or controlled proliferative form, in another embodiment, the synthetic, modified RNA composition encodes for both a death receptor and its appropriate activating ligand. In another embodiment, the synthetic, modified RNA composition encodes for a differentiation factor that when expressed in the cancer cell, such as a cancer stem cell, will induce the cell to differentiate to a non-pathogenic or non-self-renewing phenotype (e.g., reduced cell growth rate, reduced cell division etc) or to induce the cell to enter a dormant cell phase (e.g., G₀ resting phase).

[0363] One of skill in the art will appreciate that the use of apoptosis-inducing techniques will require that the synthetic, modified RNAs are appropriately targeted to e.g., tumor cells to prevent unwanted wide-spread cell death. Thus, one can use a delivery mechanism (e.g., attached ligand or antibody, targeted liposome etc) that recognizes a cancer antigen such that the modified RNAs are expressed only in cancer cells.

### Cellular Therapies and Cellular Administration

[0364] The compositions and methods comprising synthetic, modified RNAs are particularly useful for generating cells, such as differentiated cells, for use in patients in need of cellular therapies or regenerative medicine applications. Accordingly, various embodiments of the methods and compositions described herein involve administration of an effective amount of a cell or a population of cells, generated using any of the compositions or methods comprising synthetic, modified RNAs described herein, to an individual or subject in need of a cellular therapy. The cell or population of cells being administered can be an autologous population, or be derived from one or more heterologous sources. The cell can be, for example, a stem cell, such as a lineage-restricted progenitor cell, multipotent cell, or an oligopotent cell, or a fully or partially differentiated progeny of a stem cell. In some embodiments, the stem cell can be generated through the introduction of synthetic, modified RNAs encoding differentiation factor(s) as described herein. In addition, the population of cells administered can be of a lineage selected from one of an ecotodermal lineage, a mesodermal lineage, or an endodermal lineage. The cell can also be a cell modified to express a targeting moiety or a mediator of targeted cell death, using synthetic, modified RNAs as described herein. Further, such differentiated cells can be administered in a manner that permits them to graft to the intended tissue site and reconstitute or regenerate the functionally deficient area. In some such embodiments, differentiated cells can be introduced to a scaffold or other structure to generate, for example, a tissue ex vivo, that can then be introduced to a patient. For example, islet precursor cells or their derivatives can be generated to restore islet function in a patient having any condition relating to inadequate production of a pancreatic endocrine (insulin, glucagon, or somatostatin), or the inability to properly regulate secretion, e.g., Type I (insulin-dependent) diabetes mellitus.

[0365] A variety of means for administering cells to subjects are known to those of skill in the art. Such methods can include systemic injection, for example i.v. injection, or implantation of cells into a target site in a subject. Cells may be inserted into a delivery device which facilitates introduction by injection or implantation into the subject. Such delivery devices can include tubes, e.g., catheters, for injecting cells and fluids into the body of a recipient subject. In one preferred embodiment, the tubes additionally have a needle, e.g., through which the cells can be introduced into the subject at a desired location. The cells can be prepared for delivery in a variety of different forms. For example, the cells can be suspended in a solution or gel or embedded in a support matrix when contained in such a delivery device. Cells can be mixed with a pharmaceutically acceptable carrier or diluent in which the cells remain viable.

[0366] Pharmaceutically acceptable carriers and diluents include saline, aqueous buffer solutions, solvents and/or dispersion media. The use of such carriers and diluents is well known in the art. The solution is preferably sterile and fluid. Preferably, prior to the introduction of cells as described herein, the solution is stable under the conditions of manufacture and storage and preserved against the contaminating action of microorganisms such as bacteria and fungi through the use of, for example, parabens, chlorobutanol, phenol, ascorbic acid, thimerosal, and the like.

[0367] It is preferred that the mode of cell administration is relatively non-invasive, for example by intravenous injection, pulmonary delivery through inhalation, topical, or intranasal administration. However, the route of cell administration will depend on the tissue to be treated and may include implantation. Methods for cell delivery are known to those of skill in the art and can be extrapolated by one skilled in the art of medicine for use with the methods and compositions described herein.

[0368] Direct injection techniques for cell administration can also be used to stimulate transmigration of cells through the entire vasculature, or to the vasculature of a particular organ, such as for example liver, or kidney or any other organ. This includes non-specific targeting of the vasculature. One can target any organ by selecting a specific injection site, e.g., a liver portal vein. Alternatively, the injection can be performed systemically into any vein in the body. This method is useful for enhancing stem cell numbers in aging patients. In addition, the cells can function to populate vacant stem cell niches or create new stem cells to replenish the organ, thus improving organ function. For example, cells may take up pericyte locations within the vasculature. In another example, neural stem cells or precursor cells generated using the compositions and methods comprising synthetic, modified RNAs are transplanted directly into parenchymal or intrathecal sites of the central nervous system, according to the disease being treated, such as for example, a spinal cord injury. Grafts can be done using single cell suspension or small aggregates at a density of 25,000-500,000 cells per mL (U.S. Pat. No. 5,968,829, the contents of which are herein incorporated in their entireties by reference). A successful transplant can show, for example, transplant-derived cells present in the lesion 2-5 weeks later, differentiated into astrocytes, oligodendrocytes, and/or neurons, and migrating along the cord from the lesioned end.

[0369] If so desired, a mammal or subject can be pre-treated with an agent, for example an agent is administered to enhance cell targeting to a tissue (e.g., a homing factor) and can be placed at that site to encourage cells to target the desired tissue. For example, direct injection of homing factors into a tissue can be performed prior to systemic delivery of ligand-targeted cells.

### Scaffolds and Tissue Engineering

[0370] It is further contemplated that, in some embodiments of these aspects, cells generated by differentiation or transdifferentiation using the synthetic, modified RNAs described herein, can not only be administered as cells in suspension, but also as cells populating a matrix, scaffold, or other support to create an artificial tissue, for use in cellular therapies in regenerative medicine and tissue engineering.

[0371] Tissue engineering refers to the use of a combination of cells, engineering and materials methods, and suitable biochemical and physio-chemical factors for the de novo generation of tissue or tissue structures. Such engineered tissue or tissue structures are useful for therapeutic purposes to improve or replace biological functions. As used herein, “engineered tissue” encompasses a broad range of applications, including, but not limited to, utility in the repair or replace portions of, or whole tissues (e.g., heart, cardiac tissue, ventricular myocardium, and other tissues such as bone, cartilage, pancreas, liver, kidney, blood vessels, bladder, etc.), or in assays for identifying agents which modify the function of parts of, or entire organs without the need to obtain such organs from a subject.

[0372] In some embodiments, a “support” i.e., any suitable carrier material to which cells generated using the methods and compositions comprising synthetic, modified RNAs described herein are able to attach themselves or adhere, is used in order to form a corresponding cell composite, e.g. an artificial tissue. In some embodiments, a matrix or carrier material, respectively, is present already in a three-dimensional form desired for later application. For example, bovine pericardial tissue can be used as matrix which is crosslinked with collagen, decellularized and photofixed.

[0373] In some such embodiments, a scaffold, which can also be referred to as a “biocompatible substrate,” can be used as a material that is suitable for implantation into a subject onto which a cell population can be deposited. A biocompatible substrate does not cause toxic or injurious effects once implanted in the subject. In one embodiment, the biocompatible substrate is a polymer with a surface that can be shaped into a desired structure that requires repairing or replacing. The polymer can also be shaped into a part of a structure that requires repairing or replacing. The biocompatible substrate provides the supportive framework that allows cells to attach to it, and grow on it. Cultured populations of cells can then be grown on the biocompatible substrate, which provides the appropriate interstitial distances required for cell-cell interaction.

[0374] A structure or scaffold can be used to aid in further controlling and directing a cell or population of cells undergoing differentiation or transdifferentiation using the compositions and methods described herein. A structure or scaffold, such as a biopolymer structure, can be designed to provide environmental cues to control and direct the differentiation of cells to a functionally active engineered tissue, e.g., multipotent cells undergoing differentiation, using the synthetic, modified RNAs described herein, into ventricular cardiomyocytes to generate a functional, contracting tissue myocardium structure. By “functionally active,” it is meant that the cell attached to the scaffold comprises at least one function of that cell type in its native environment. A structure or scaffold can be engineered from a nanometer to micrometer to millimeter to macroscopic length, and can further comprise or be based on factors such as, but not limited to, material mechanical properties, material solubility, spatial patterning of bioactive compounds, spatial patterning of topological features, soluble bioactive compounds, mechanical perturbation (cyclical or static strain, stress, shear, etc. . . . ), electrical stimulation, and thermal perturbation.

[0375] The construction of an engineered tissue can be carried out by first assembling the scaffolds, and then seeding with a cell type that has undergone differentiation or partial differentiation using the synthetic, modified RNA compositions and methods described herein. Alternatively, an engineered tissue can be made by seeding a matrix or other scaffold component cell with cells, such as iPS cells or human ES cells, and applying or introducing a desired synthetic, modified RNA composition directly to the scaffold comprising the cells. A scaffold can be in any desired geometric conformation, for example, a flat sheet, a spiral, a cone, a v-like structure and the like. A scaffold can be shaped into, e.g., a heart valve, vessel (tubular), planar construct or any other suitable shape. Such scaffold constructs are known in the art (see, e.g., WO02/035992, U.S. Pat. Nos. 6,479,064, 6,461,628, the contents of which are herein incorporated in their entireties by reference). In some embodiments, after culturing the cells on the scaffold, the scaffold is removed (e.g., bioabsorbed or physically removed), and the layers of differentiation or transdifferentiated cells maintain substantially the same conformation as the scaffold, such that, for example, if the scaffold was spiral shaped, the cells form a 3D-engineered tissue that is spiral shaped. In addition, it is contemplated that different synthetic, modified RNA compositions can be contacted with or applied to a scaffold comprising cells in order to allow the growth and differentiation of a plurality of different, differentiated cells types to form a desired engineered tissue. For example, for construction of muscle tissue with blood vessels, a scaffold can be seeded with different population of cells which make up blood vessels, neural tissue, cartilage, tendons, ligaments and the like.

[0376] Biopolymer structures can be generated by providing a transitional polymer on a substrate; depositing a biopolymer on the transitional polymer; shaping the biopolymer into a structure having a selected pattern on the transitional polymer (poly(N-Isopropylacrylamide); and releasing the biopolymer from the transitional polymer with the biopolymer's structure and integrity intact. A biopolymer can be selected from an extracellular matrix (ECM) protein, growth factor, lipid, fatty acid, steroid, sugar and other biologically active carbohydrates, a biologically derived homopolymer, nucleic acids, hormone, enzyme, pharmaceutical composition, cell surface ligand and receptor, cytoskeletal filament, motor protein, silks, polyprotein (e.g., poly(lysine)) or any combination thereof. The biopolymers used in the generation of the scaffolds for the embodiments directed to tissue engineering described herein include, but are not limited to, a) extracellular matrix proteins to direct cell adhesion and function (e.g., collagen, fibronectin, laminin, etc.); (b) growth factors to direct cell function specific to cell type (e.g., nerve growth factor, bone morphogenic proteins, vascular endothelial growth factor, etc.); (c) lipids, fatty acids and steroids (e.g., glycerides, non-glycerides, saturated and unsaturated fatty acids, cholesterol, corticosteroids, sex steroids, etc.); (d) sugars and other biologically active carbohydrates (e.g., monosaccharides, oligosaccharides, sucrose, glucose, glycogen, etc.); (e) combinations of carbohydrates, lipids and/or proteins, such as proteoglycans (protein cores with attached side chains of chondroitin sulfate, dermatan sulfate, heparin, heparan sulfate, and/or keratan sulfate); glycoproteins [e.g., selectins, immunoglobulins, hormones such as human chorionic gonadotropin, Alpha-fetoprotein and Erythropoietin (EPO), etc.]; proteolipids (e.g., N-myristoylated, palmitoylated and prenylated proteins); and glycolipids (e.g., glycoglycerolipids, glycosphingolipids, glycophosphatidylinositols, etc.); (f) biologically derived homopolymers, such as polylactic and polyglycolic acids and poly-L-lysine; (g) nucleic acids (e.g., DNA, RNA, etc.); (h) hormones (e.g., anabolic steroids, sex hormones, insulin, angiotensin, etc.); (i) enzymes (types: oxidoreductases, transferases, hydrolases, lyases, isomerases, ligases; examples: trypsin, collegenases, matrix metallproteinases, etc.); (j) pharmaceuticals (e.g., beta blockers, vasodilators, vasoconstrictors, pain relievers, gene therapy, viral vectors, anti-inflammatories, etc.); (k) cell surface ligands and receptors (e.g., integrins, selectins, cadherins, etc.); (1) cytoskeletal filaments and/or motor proteins (e.g., intermediate filaments, microtubules, actin filaments, dynein, kinesin, myosin, etc.), or any combination thereof. For example, a biopolymer can be selected from the group consisting of fibronectin, vitronectin, laminin, collagen, fibrinogen, silk or silk fibroin.

[0377] Following or during construction of a biopolymer scaffold, cells can be integrated into or onto the scaffold. In some embodiments, the cells to be differentiated are human ES-derived cells or iPS-derived cells, and the methods further comprise growing the cells in the scaffold where the structure, composition, ECM type, growth factors and/or other cell types can assist in differentiation of the cells into the desired differentiated cell type. In some embodiments, such engineered tissue can be further used in drug screening applications. For example, an engineered myocardium tissue composition can be useful as a tool to identify agents which modify the function of cardiac muscle (e.g., to identify cardiotoxic agents).

[0378] Other exemplary materials suitable for polymer scaffold fabrication include, but are not limited to, polylactic acid (PLA), poly-L-lactic acid (PLLA), poly-D-lactic acid (PDLA), polyglycolide, polyglycolic acid (PGA), polylactide-co-glycolide (PLGA), polydioxanone, polygluconate, polylactic acid-polyethylene oxide copolymers, modified cellulose, collagen, polyhydroxybutyrate, polyhydroxpriopionic acid, polyphosphoester, poly(alpha-hydroxy acid), polycaprolactone, polycarbonates, polyamides, polyanhydrides, polyamino acids, polyorthoesters, polyacetals, polycyanoacrylates, degradable urethanes, aliphatic polyester polyacrylates, polymethacrylate, acyl substituted cellulose acetates, non-degradable polyurethanes, polystyrenes, polyvinyl chloride, polyvinyl flouride, polyvinyl imidazole, chlorosulphonated polyolifins, polyethylene oxide, polyvinyl alcohol, Teflon™, nylon silicon, and shape memory materials, such as poly(styrene-block-butadiene), polynorbornene, hydrogels, metallic alloys, and oligo(ε-caprolactone)diol as switching segment/oligo(p-dioxyanone)diol as physical crosslink. Other suitable polymers can be obtained by reference to The Polymer Handbook, 3rd edition (Wiley, N.Y., 1989), the contents of which are herein incorporated in their reference by entirety.

[0379] In some embodiments, additional bioactive substances can be added to a biopolymer scaffold comprising cells being differentiated using the synthetic, modified RNA compositions described herein, such as, but not limited to, demineralized bone powder as described in U.S. Pat. No. 5,073,373 the contents of which are incorporated herein by reference; collagen, insoluble collagen derivatives, etc., and soluble solids and/or liquids dissolved therein; antiviricides, particularly those effective against HIV and hepatitis; antimicrobials and/or antibiotics such as erythromycin, bacitracin, neomycin, penicillin, polymycin B, tetracyclines, biomycin, chloromycetin, and streptomycins, cefazolin, ampicillin, azactam, tobramycin, clindamycin and gentamycin, etc.; biocidal/biostatic sugars such as dextran, glucose, etc.; amino acids; peptides; vitamins; inorganic elements; co-factors for protein synthesis; hormones; endocrine tissue or tissue fragments; synthesizers; enzymes such as alkaline phosphatase, collagenase, peptidases, oxidases, etc.; polymer cell scaffolds with parenchymal cells; angiogenic agents and polymeric carriers containing such agents; collagen lattices; antigenic agents; cytoskeletal agents; cartilage fragments; living cells such as chondrocytes, bone marrow cells, mesenchymal stem cells; natural extracts; genetically engineered living cells or otherwise modified living cells; expanded or cultured cells; DNA delivered by plasmid, viral vectors or other means; tissue transplants; demineralized bone powder; autogenous tissues such as blood, serum, soft tissue, bone marrow, etc.; bioadhesives; bone morphogenic proteins (BMPs); osteoinductive factor (IFO); fibronectin (FN); endothelial cell growth factor (ECGF); vascular endothelial growth factor (VEGF); cementum attachment extracts (CAE); ketanserin; human growth hormone (HGH); animal growth hormones; epidermal growth factor (EGF); interleukins, e.g., interleukin-1 (IL-1), interleukin-2 (IL-2); human alpha thrombin; transforming growth factor (TGF-beta); insulin-like growth factors (IGF-1, IGF-2); platelet derived growth factors (PDGF); fibroblast growth factors (FGF, BFGF, etc.); periodontal ligament chemotactic factor (PDLGF); enamel matrix proteins; growth and differentiation factors (GDF); hedgehog family of proteins; protein receptor molecules; small peptides derived from growth factors above; bone promoters; cytokines; somatotropin; bone digestors; antitumor agents; cellular attractants and attachment agents; immuno-suppressants; permeation enhancers, e.g., fatty acid esters such as laureate, myristate and stearate monoesters of polyethylene glycol, enamine derivatives, alpha-keto aldehydes, etc.; and nucleic acids. The amounts of such optionally added bioactive substances can vary widely with optimum levels being readily determined in a specific case by routine experimentation.

### Diseases Treatable by Cell Transplantation

[0380] A wide range of diseases are recognized as being treatable with cellular therapies. Accordingly, also provided herein are compositions and methods comprising synthetic, modified RNAs for generating cells for use in cellular therapies, such as stem cell therapies. As non-limiting examples, these include diseases marked by a failure of naturally occurring stem cells, such as aplastic anemia, Fanconi anemia, and paroxysmal nocturnal hemoglobinuria (PNH). Others include, for example: acute leukemias, including acute lymphoblastic leukemia (ALL), acute myelogenous leukemia (AML), acute biphenotypic leukemia and acute undifferentiated leukemia; chronic leukemias, including chronic myelogenous leukemia (CML), chronic lymphocytic leukemia (CLL), juvenile chronic myelogenous leukemia (JCML) and juvenile myelomonocytic leukemia (JMML); myeloproliferative disorders, including acute myelofibrosis, angiogenic myeloid metaplasia (myelofibrosis), polycythemia vera and essential thrombocythemia; lysosomal storage diseases, including mucopolysaccharidoses (MPS), Hurler's syndrome (MPS-1H), Scheie syndrome (MPS-IS), Hunter's syndrome (MPS-II), Sanfilippo syndrome (MPS-III), Morquio syndrome (MPS-IV), Maroteaux-Lamy Syndrome (MPS-VI), Sly syndrome, beta-glucuronidase deficiency (MPS-VII), adrenoleukodystrophy, mucolipidosis II (I-cell Disease), Krabbe disease, Gaucher's disease, Niemann-Pick disease, Wolman disease and metachromatic leukodystrophy; histiocytic disorders, including familial erythrophagocytic lymphohistiocytosis, histiocytosis-X and hemophagocytosis; phagocyte disorders, including Chediak-Higashi syndrome, chronic granulomatous disease, neutrophil actin deficiency and reticular dysgenesis; inherited platelet abnormalities, including amegakaryocytosis/congenital thrombocytopenia; plasma cell disorders, including multiple myeloma, plasma cell leukemia, and Waldenstrom's macroglobulinemia. Other malignancies treatable with stem cell therapies include but are not limited to breast cancer, Ewing sarcoma, neuroblastoma and renal cell carcinoma, among others. Also treatable with stem cell therapy are: lung disorders, including COPD and bronchial asthma; congenital immune disorders, including ataxia-telangiectasia, Kostmann syndrome, leukocyte adhesion deficiency, DiGeorge syndrome, bare lymphocyte syndrome, Omenn's syndrome, severe combined immunodeficiency (SCID), SCID with adenosine deaminase deficiency, absence of T & B cells SCID, absence of T cells, normal B cell SCID, common variable immunodeficiency and X-linked lymphoproliferative disorder; other inherited disorders, including Lesch-Nyhan syndrome, cartilage-hair hypoplasia, Glanzmann thrombasthenia, and osteopetrosis; neurological conditions, including acute and chronic stroke, traumatic brain injury, cerebral palsy, multiple sclerosis, amyotrophic lateral sclerosis and epilepsy; cardiac conditions, including atherosclerosis, congestive heart failure and myocardial infarction; metabolic disorders, including diabetes; and ocular disorders including macular degeneration and optic atrophy. Such diseases or disorders can be treated either by administration of stem cells themselves, permitting in vivo differentiation to the desired cell type with or without the administration of agents to promote the desired differentiation, or by administering stem cells differentiated to the desired cell type in vitro. Efficacy of treatment is determined by a statistically significant change in one or more indicia of the targeted disease or disorder.

### Dosage and Administration

[0381] Dosage and administration will vary with the condition to be treated and the therapeutic approach taken in a given instance.

[0382] Depending on the disease or disorder being treated and on the approach being taken, cells over a range of, for example, 2−5×10⁵, or more, e.g., 1×10⁶, 1×10⁷, 1×10⁸, 5×10⁸, 1×10⁹, 5×10⁹, 1×10¹⁰, 5×10¹⁰ or more can be administered. Where differentiated cells are to be administered, the dose will most often be higher than where stem cells are administered, because differentiated cells will have reduced or limited capacity for self-renewal compared to stem cells. Repeat administration of differentiated cells may be necessary if the cells are not capable of self-renewal.

[0383] It is contemplated that cells generated by differentiation or transdifferentiation can be administered as cells in suspension, or as cells populating a matrix, scaffold, or other support to create an artificial tissue. To this end, resorbable matrices and scaffolds are known in the art, as are approaches for populating them with cells, as has been described herein. As but one example, matrices fabricated out of silk proteins are well suited as supports for cells, and are known to be well tolerated for implantation. Cells as described herein can be seeded on such matrices either alone or in combination with other cells, including autologous cells from the intended recipient, to provide the necessary environment for growth and maintenance of the cells in the desired differentiated (or non-differentiated) state. It is also contemplated that the cells generated by differentiation or transdifferentiation can be administered to a subject in need thereof, in an encapsulated form, according to known encapsulation technologies, including microencapsulation (see, e.g., U.S. Pat. Nos. 4,352,883; 4,353,888; and 5,084,350, which are incorporated herein in their entireties by reference). Where the differentiated or transdifferentiated cells are encapsulated, in some embodiments the cells are encapsulated by macroencapsulation, as described in U.S. Pat. Nos. 5,284,761; 5,158,881; 4,976,859; 4,968,733; 5,800,828 and published PCT patent application WO 95/05452, which are incorporated herein in their entireties by reference. In such embodiments, cells on the order of 1×10⁶, 1×10⁷, 1×10⁸, 5×10⁸, 1×10⁹, 5×10⁹, 1×10¹⁰, 5×10¹⁰ or more can be administered alone or on a matrix or support.

[0384] In other embodiments, cells can be suspended in a gel for administration to keep them relatively localized.

[0385] The success of treatment can be evaluated by the ordinarily skilled clinician by monitoring one or more symptoms or markers of the disease or disorder being treated by administration of the cells. Effective treatment includes any statistically significant improvement in one or more indicia of the disease or disorder. Where appropriate, a clinically accepted grade or scaling system for the given disease or disorder can be applied, with an improvement in the scale or grade being indicative of effective treatment.

[0386] In those aspects and embodiments where synthetic, modified RNAs are to be administered directly, instead of cells treated with or resulting from treatment with synthetic, modified RNA, the dosages will also vary depending upon the approach taken, the mode of delivery and the disease to be treated. For example, systemic administration without a targeting approach will generally require greater amounts of synthetic, modified RNA than either local administration or administration that employs a targeting or homing approach. Depending upon the targeted cell or tissue and the mode of delivery, effective dosages of synthetic, modified RNA can include, for example, 1 ng/kg of body weight up to a gram or more per kg of body weight and any amount in between. Preferred amounts can be, for example, in the range of 5 μg/kg body weight to 30 μg/kg of body weight or any amount in between. Dosages in such ranges can be administered once, twice, three times, four times or more per day, or every two days, every three days, every four days, once a week, twice a month, once a month or less frequently over a duration of days, weeks or months, depending on the condition being treated—where the therapeutic approach treats or ameliorates but does not permanently cure the disease or disorder, e.g., where the synthetic, modified RNA effects treatment of a metabolic disorder by expression of a protein that is deficient in the subject, administration of modified RNA can be repeated over time as needed. Where, instead, the synthetic, modified RNA leads to the establishment of a cell compartment that maintains itself and treats the disease or disorder, readministration may become unnecessary. Sustained release formulations of synthetic, modified RNA compositions are specifically contemplated herein. Continuous, relatively low doses are contemplated after an initial higher therapeutic dose.

[0387] A pharmaceutical composition that includes at least one synthetic, modified RNA described herein can be delivered to or administered to a subject by a variety of routes depending upon whether local or systemic treatment is desired and upon the area to be treated. Exemplary routes include parenteral, intrathecal, parenchymal, intravenous, nasal, oral, and ocular delivery routes. Parenteral administration includes intravenous drip, subcutaneous, intraperitoneal or intramuscular injection, or intrathecal or intraventricular administration. A synthetic, modified RNA can be incorporated into pharmaceutical compositions suitable for administration. For example, compositions can include one or more synthetic, modified RNAs and a pharmaceutically acceptable carrier. Supplementary active compounds can also be incorporated into the compositions. Compositions for intrathecal or intraventricular administration of synthetic, modified RNAs can include sterile aqueous solutions that can also contain buffers, diluents and other suitable additives.

[0388] In some embodiments, the effective dose of a synthetic, modified RNA can be administered in a single dose or in two or more doses, as desired or considered appropriate under the specific circumstances. If desired to facilitate repeated or frequent infusions, a non-implantable delivery device, e.g., needle, syringe, pen device, or implantatable delivery device, e.g., a pump, semi-permanent stent (e.g., intravenous, intraperitoneal, intracisternal or intracapsular), or reservoir can be advisable. In some such embodiments, the delivery device can include a mechanism to dispense a unit dose of the pharmaceutical composition comprising a synthetic, modified RNA. In some embodiments, the device releases the pharmaceutical composition comprising a synthetic, modified RNA continuously, e.g., by diffusion. In some embodiments, the device can include a sensor that monitors a parameter within a subject. For example, the device can include pump, e.g., and, optionally, associated electronics. Exemplary devices include stents, catheters, pumps, artificial organs or organ components (e.g., artificial heart, a heart valve, etc.), and sutures.

[0389] As used herein, “topical delivery” can refer to the direct application of a synthetic, modified RNA to any surface of the body, including the eye, a mucous membrane, surfaces of a body cavity, or to any internal surface. Formulations for topical administration may include transdermal patches, ointments, lotions, creams, gels, drops, sprays, and liquids. Conventional pharmaceutical carriers, aqueous, powder or oily bases, thickeners and the like may be necessary or desirable. Topical administration can also be used as a means to selectively deliver the synthetic, modified RNA to the epidermis or dermis of a subject, or to specific strata thereof, or to an underlying tissue.

[0390] Formulations for parenteral administration can include sterile aqueous solutions which can also contain buffers, diluents and other suitable additives. Intraventricular injection may be facilitated by an intraventricular catheter, for example, attached to a reservoir. For intravenous use, the total concentration of solutes should be controlled to render the preparation isotonic.

[0391] A synthetic, modified RNA can be administered to a subject by pulmonary delivery. Pulmonary delivery compositions can be delivered by inhalation by the patient of a dispersion so that the composition comprising a synthetic, modified RNA, within the dispersion can reach the lung where it can be readily absorbed through the alveolar region directly into the lung cells to directly transfect the lung cells, and/or enter the blood circulation. Direct transfection by inhalation will allow expression of a desired protein, for example CFTR, by the transfected lung cells. Accordingly, pulmonary delivery can be effective both for systemic delivery and for localized delivery to treat diseases of the lungs. Pulmonary delivery can be achieved by different approaches, including the use of nebulized, aerosolized, micellular and dry powder-based formulations of the compositions comprising synthetic, modified RNAs described herein. Delivery can be achieved with liquid nebulizers, aerosol-based inhalers, and dry powder dispersion devices. Metered-dose devices are preferred. One of the benefits of using an atomizer or inhaler is that the potential for contamination is minimized because the devices are self contained. Dry powder dispersion devices, for example, deliver drugs that can be readily formulated as dry powders. A synthetic, modified RNA composition can be stably stored as lyophilized or spray-dried powders by itself or in combination with suitable powder carriers. The delivery of a composition comprising a synthetic, modified RNA for inhalation can be mediated by a dosing timing element which can include a timer, a dose counter, time measuring device, or a time indicator which when incorporated into the device enables dose tracking, compliance monitoring, and/or dose triggering to a patient during administration of the aerosol medicament.

[0392] A synthetic, modified RNA can be modified such that it is capable of traversing the blood brain barrier. For example, the synthetic, modified RNA can be conjugated to a molecule that enables the agent to traverse the barrier. Such conjugated synthetic, modified RNA can be administered by any desired method, such as by intraventricular or intramuscular injection, or by pulmonary delivery, for example.

[0393] A composition comprising a synthetic, modified RNA described herein can also be delivered through the use of implanted, indwelling catheters that provide a means for injecting small volumes of fluid containing the synthetic, modified RNAs described herein directly into local tissues. The proximal end of these catheters can be connected to an implanted, access port surgically affixed to the patient's body, or to an implanted drug pump located in, for example, the patient's torso.

[0394] Alternatively, implantable delivery devices, such as an implantable pump can be employed. Examples of the delivery devices for use with the compositions comprising a synthetic, modified RNA described herein include the Model 8506 investigational device (by Medtronic, Inc. of Minneapolis, Minn.), which can be implanted subcutaneously in the body or on the cranium, and provides an access port through which therapeutic agents can be delivered. In addition to the aforementioned device, the delivery of the compositions comprising a synthetic, modified RNA described herein can be accomplished with a wide variety of devices, including but not limited to U.S. Pat. Nos. 5,735,814, 5,814,014, and 6,042,579, all of which are incorporated herein by reference. Using the teachings described herein, those of skill in the art will recognize that these and other devices and systems can be suitable for delivery of compositions comprising the synthetic, modified RNAs described herein.

[0395] In some such embodiments, the delivery system further comprises implanting a pump outside the body, the pump coupled to a proximal end of the catheter, and operating the pump to deliver the predetermined dosage of a composition comprising a synthetic, modified RNA described herein through the discharge portion of the catheter. A further embodiment comprises periodically refreshing a supply of the composition comprising a synthetic, modified RNA to the pump outside the body.

[0396] A synthetic, modified RNA can be administered ocularly, such as to treat retinal disorders, e.g., a retinopathy. For example, the pharmaceutical compositions can be applied to the surface of the eye or nearby tissue, e.g., the inside of the eyelid. They can be applied topically, e.g., by spraying, in drops, as an eyewash, or an ointment. Ointments or droppable liquids can be delivered by ocular delivery systems known in the art, such as applicators or eye droppers. Such compositions can include mucomimetics such as hyaluronic acid, chondroitin sulfate, hydroxypropyl methylcellulose or poly(vinyl alcohol), preservatives such as sorbic acid, EDTA or benzylchronium chloride, and the usual quantities of diluents and/or carriers. The pharmaceutical composition can also be administered to the interior of the eye, and can be introduced by a needle or other delivery device which can introduce it to a selected area or structure. The composition containing the synthetic, modified RNA can also be applied via an ocular patch.

[0397] A synthetic, modified RNA can be administered by an oral or nasal delivery. For example, drugs administered through these membranes have a rapid onset of action, provide therapeutic plasma levels, avoid first pass effect of hepatic metabolism, and avoid exposure of the drug to the hostile gastrointestinal (GI) environment. Additional advantages include easy access to the membrane sites so that the drug can be applied, localized and removed easily.

[0398] Administration of a composition comprising a synthetic, modified RNA can be provided by the subject or by another person, e.g., a another caregiver. A caregiver can be any entity involved with providing care to the human: for example, a hospital, hospice, doctor's office, outpatient clinic; a healthcare worker such as a doctor, nurse, or other practitioner; or a spouse or guardian, such as a parent. The medication can be provided in measured doses or in a dispenser which delivers a metered dose.

[0399] Where cells expressing proteins encoded by synthetic, modified RNA as described herein are administered to treat a malignancy or disease or disorder, the dose of cells administered will also vary with the therapeutic approach. For example, where the cell expresses a death ligand targeting the tumor cell, the dosage of cells administered will vary with the mode of their administration, e.g., local or systemic (smaller doses are required for local), and with the size of the tumor being treated—generally more cells or more frequent administration is warranted for larger tumors versus smaller ones. The amount of cells administered will also vary with the level of expression of the polypeptide or polypeptides encoded by the modified RNA—this is equally true of the administration of cells expressing proteins encoded by modified RNA for any purpose described herein. An important advantage of the methods described herein is that where, for example, more than one factor or polypeptide is expressed from a modified RNA introduced to a cell, the relative dosage of the expressed proteins can be tuned in a straightforward manner by adjusting the relative amounts of the modified RNAs introduced to the cell or subject. This is in contrast to the difficulty of tuning the expression of even a single gene product in a cell transduced with a viral or even a plasmid vector.

[0400] Therapeutic compositions containing at least one synthetic, modified-NA can be conventionally administered in a unit dose. The term “unit dose” when used in reference to a therapeutic composition refers to physically discrete units suitable as unitary dosage for the subject, each unit containing a predetermined quantity of active material calculated to produce the desired therapeutic effect in association with the required physiologically acceptable diluent, i.e., carrier, or vehicle.

[0401] The compositions are administered in a manner compatible with the dosage formulation, and in a therapeutically effective amount. The quantity to be administered and timing depends on the subject to be treated, capacity of the subject's system to utilize the active ingredient, and degree of therapeutic effect desired.

### Pharmaceutical Compositions

[0402] The present invention involves therapeutic compositions useful for practicing the therapeutic methods described herein. Therapeutic compositions contain a physiologically tolerable carrier together with an active compound (synthetic, modified RNA, a cell transfected with a synthetic, modified RNA, or a cell differentiated, de-differentiated or transdifferentiated with a synthetic, modified RNA) as described herein, dissolved or dispersed therein as an active ingredient. In a preferred embodiment, the therapeutic composition is not immunogenic when administered to a mammal or human patient for therapeutic purposes, unless so desired. As used herein, the terms “pharmaceutically acceptable,” “physiologically tolerable,” and grammatical variations thereof, as they refer to compositions, carriers, diluents and reagents, are used interchangeably and represent that the materials are capable of administration to or upon a mammal without the production of undesirable or unacceptable physiological effects such as toxicity, nausea, dizziness, gastric upset, immune reaction and the like. A pharmaceutically acceptable carrier will not promote the raising of an immune response to an agent with which it is admixed, unless so desired. The preparation of a pharmacological composition that contains active ingredients dissolved or dispersed therein is well understood in the art and need not be limited based on formulation. Typically such compositions are prepared as injectable either as liquid solutions or suspensions, however, particularly where synthetic, modified RNA itself is administered, solid forms suitable for solution, or suspensions, in liquid prior to use can also be prepared. The preparation can also be emulsified or presented as a liposome composition. The active ingredient can be mixed with excipients which are pharmaceutically acceptable and compatible with the active ingredient and in amounts suitable for use in the therapeutic methods described herein. Suitable excipients are, for example, water, saline, dextrose, glycerol, ethanol or the like and combinations thereof. In addition, if desired, the composition can contain minor amounts of auxiliary substances such as wetting or emulsifying agents, pH buffering agents and the like which enhance the effectiveness of the active ingredient. Physiologically tolerable carriers are well known in the art. Exemplary liquid carriers are sterile aqueous solutions that contain no materials in addition to the active ingredients and water, or contain a buffer such as sodium phosphate at physiological pH value, physiological saline or both, such as phosphate-buffered saline. Saline-based carriers are most useful for the administration of cells or cell preparations. Still further, aqueous carriers can contain more than one buffer salt, as well as salts such as sodium and potassium chlorides, dextrose, polyethylene glycol and other solutes.

### Kits

[0403] Provided herein are kits comprising synthetic, modified RNAs as described herein and kits for preparing such synthetic, modified RNAs.

[0404] Provided herein, in some aspects, are kits for altering the phenotype or the developmental potential of a cell, and comprise (a) a synthetic, modified RNA composition comprising at least one synthetic, modified RNA molecule comprising: (i) a 5′ cap, (ii) an open reading frame encoding a polypeptide, and (iii) at least one modified nucleoside, and (b) packaging and instructions therefor.

[0405] In one embodiment of this aspect, the synthetic, modified RNA composition can further comprise a 3′ untranslated region (e.g., murine alpha-globin 3′ untranslated region) to enhance the stability of the synthetic, modified RNA. In another embodiment of this aspect, the 5′ cap is a 5′ cap analog such as e.g., a 5′ diguanosine cap, tetraphosphate cap analogs having a methylene-bis(phosphonate) moiety (see e.g., Rydzik, A M et al., (2009) Org Biomol Chem 7(22):4763-76), dinucleotide cap analogs having a phosphorothioate modification (see e.g., Kowalska, J. et al., (2008) RNA 14(6):1119-1131), cap analogs having a sulfur substitution for a non-bridging oxygen (see e.g., Grudzien-Nogalska, E. et al., (2007) RNA 13(10): 1745-1755), N7-benzylated dinucleoside tetraphosphate analogs (see e.g., Grudzien, E. et al., (2004) RNA 10(9):1479-1487), or anti-reverse cap analogs (see e.g., Jemielity, J. et al., (2003) RNA 9(9): 1108-1122 and Stepinski, J. et al., (2001) RNA 7(10):1486-1495).

[0406] In other embodiments, the kit can further comprise materials for further reducing the innate immune response of a cell. For example, the kit can further comprise a soluble interferon receptor, such as B18R. The synthetic, modified RNAs provided in such a kit can encode for a polypeptide to express a transcription factor, a targeting moiety, a cell type-specific polypeptide, a cell-surface polypeptide, a differentiation factor, a reprogramming factor or a de-differentiation factor. The synthetic, modified RNA can be provided such that the synthetic, modified RNA is dephosphorylated, lacks a 5′ phosphate, comprises a 5′ monophosphate, or lacks a 5′ triphosphate.

[0407] In some embodiments, the kit can comprise a plurality of different synthetic, modified RNA molecules.

[0408] In some aspects, the kit can be provided to induce reprogramming of a somatic cell to an induced pluripotent stem cell. Such kits include synthetic, modified RNAs encoding Oct4, Klf4, Sox2, or MYC. In some embodiments, the kits further comprise a synthetic, modified RNAs encoding LIN-28. The kit can provide the synthetic, modified RNAs in an admixture or as separate RNA aliquots.

[0409] The kit can further comprise an agent to enhance efficiency of reprogramming (e.g., valproic acid). The kit can further comprise one or more antibodies or primer reagents to detect a cell-type specific marker to identify reprogrammed cells.

[0410] Also provided herein are kits for preparing a synthetic, modified RNA. The kit comprises at least one modified nucleoside, such as 5′-methylcytidine or pseudouridine and an RNA polymerase. The kit can also comprise a 5′ cap analog. The kit can also comprise a phosphatase enzyme (e.g., Calf intestinal phosphatase) to remove the 5′ triphosphate during the RNA modification procedure. The kit can also comprise one or more templates for the generation of a synthetic, modified-RNA.

[0411] In one aspect, provided herein are kits comprising: (a) a container or vial with at least one synthetic, modified RNA molecule comprising at least two modified nucleosides, and (b) packaging and instructions therefor. Optionally, the kit can comprise one or more control synthetic, modified RNAs, such as a synthetic, modified RNA encoding green fluorescent protein (GFP) or other marker molecule. In some embodiments of this aspect, the at least two modified nucleosides are selected from the group consisting of 5-methylcytidine (5mC), N6-methyladenosine (m6A), 3,2′-O-dimethyluridine (m4U), 2-thiouridine (s2U), 2′ fluorouridine, pseudouridine, 2′-O-methyluridine (Um), 2′ deoxy uridine (2′ dU), 4-thiouridine (s4U), 5-methyluridine (m5U), 2′-O-methyladenosine (m6A), N6,2′-O-dimethyladenosine (m6Am), N6,N6,2′-O-trimethyladenosine (m62Am), 2′-O-methylcytidine (Cm), 7-methylguanosine (m7G), 2′-O-methylguanosine (Gm), N2,7-dimethylguanosine (m2,7G), N2,N2,7-trimethylguanosine (m2,2,7G), and inosine (I). In some embodiments of this aspect, the at least two modified nucleosides are 5-methylcytidine (5mC) and pseudouridine.

[0412] In some embodiments of this aspect, the container with at least one synthetic, modified RNA molecule comprising at least two modified nucleosides further comprises a buffer. In some such embodiments, the buffer is RNase-free TE buffer at pH 7.0. In some embodiments of this aspect, the kit further comprises a container with cell culture medium.

[0413] In some embodiments of this aspect, the at least one synthetic, modified RNA encodes a developmental potential altering factor. In some such embodiments, the developmental potential altering factor is a reprogramming factor, a differentiation factor, or a de-differentiation factor.

[0414] In some embodiments of this aspect, the kit further comprises a container or vial comprising IFN inhibitor. In some embodiments of this aspect, the kit further comprises a container or vial valproic acid.

[0415] In some embodiments of this aspect, the synthetic, modified RNA encoding a reprogramming factor in the vial or container has a concentration of 100 ng/μl.

[0416] In some embodiments of this aspect, the reprogramming factor is selected from the group consisting of: OCT4 (SEQ ID NO: 788), SOX1, SOX 2 (SEQ ID NO: 941 or SEQ ID NO: 1501), SOX 3, SOX15, SOX 18, NANOG, KLF1, KLF 2, KLF 4 (SEQ ID NO: 501), KLF 5, NR5A2, c-MYC (SEQ ID NO: 636), 1-MYC, n-MYC, REM2, TERT, and LIN28 (SEQ ID NO: 524). In some such embodiments, the kit comprises at least three of the reprogramming factors selected from the group consisting of OCT4, SOX1, SOX 2, SOX 3, SOX15, SOX 18, NANOG, KLF1, KLF 2, KLF 4, KLF 5, NR5A2, c-MYC, 1-MYC, n-MYC, REM2, TERT, and LIN28. In some embodiments, the kit does not comprise a synthetic, modified RNA encoding c-MYC.

[0417] In some embodiments of those aspects where the kit is provided to induce reprogramming of a somatic cell to an induced pluripotent stem cell, the kit comprises: a vial comprising a synthetic, modified RNA encoding OCT4 and a buffer; a vial comprising a synthetic, modified RNA encoding SOX2 and a buffer; a vial comprising a synthetic, modified RNA encoding c-MYC and a buffer; and a vial comprising a synthetic, modified RNA encoding KLF4 and a buffer. In some such embodiments, the concentration of each reprogramming factor in the vial is 100 ng/μl. In some embodiments, the at least two modified nucleosides are pseudouridine and 5-methylcytidine. In some embodiments, OCT4 is provided in the kit in a molar excess of about three times the concentration of KLF4, SOX-2, and c-MYC in the kit. In some such embodiments, the kit further comprises a vial comprising a synthetic, modified RNA molecule encoding LIN28 and a buffer. In some such embodiments, the buffer is RNase-free TE buffer at pH 7.0. In some embodiments, the kit further comprises a synthetic, modified RNA encoding a positive control molecule, such as GFP.

[0418] For example, in one embodiment of those aspects where the kit is provided to induce reprogramming of a somatic cell to an induced pluripotent stem cell, the kit comprises: a vial comprising a synthetic, modified RNA encoding OCT4 and a buffer; a vial comprising a synthetic, modified RNA encoding SOX2 and a buffer; a vial comprising a synthetic, modified RNA encoding c-MYC and a buffer; a vial comprising a synthetic, modified RNA encoding KLF4 and a buffer; a vial comprising a synthetic, modified RNA molecule encoding LIN28 and a buffer; a vial comprising a synthetic, modified RNA encoding a positive control GFP molecule; and packaging and instructions therefor; where the concentration of the synthetic, modified RNAs encoding OCT4, SOX2, c-MYC, KLF-4, LIN28 and GFP in each of the said vials is 100 ng/μl, wherein the buffers in each of said vials is RNase-free TE buffer at pH 7.0; and wherein the synthetic, modified RNAs encoding OCT4, SOX2, c-MYC, KLF-4, LIN28 and GFP all comprise pseudouridine and 5-methylcytidine nucleoside modifications.

[0419] In other embodiments of those aspects where the kit is provided to induce reprogramming of a somatic cell to an induced pluripotent stem cell, the kit comprises: a single container or vial comprising all the synthetic, modified RNAs provided in the kit. In some such embodiments, the kit comprises a single vial or single container comprising: a synthetic, modified RNA encoding OCT4; a synthetic, modified RNA encoding SOX2; a synthetic, modified RNA encoding c-MYC; a synthetic, modified RNA encoding KLF4; and a buffer. In some such embodiments, the buffer is RNase-free TE buffer at pH 7.0. In some such embodiments, the total concentration of reprogramming factors in the vial is 100 ng/μl. In some embodiments, the at least two modified nucleosides are pseudouridine and 5-methylcytidine. In some such embodiments, OCT4 is provided in the vial or container in a molar excess of about three times the concentration of KLF4, SOX-2, and c-MYC in the vial or container. In some such embodiments, the vial or container further comprises a synthetic, modified RNA molecule encoding LIN28. In some such embodiments, the buffer is RNase-free TE buffer at pH 7.0. In some embodiments, the kit further comprises a synthetic, modified RNA encoding a positive control molecule, such as GFP.

[0420] In some embodiments, the kits provided herein comprise at least one synthetic, modified RNA further comprising a 5′ cap. In some such embodiments, the 5′ cap is a 5′ cap analog. In some such embodiments, the 5′ cap analog is a 5′ diguanosine cap.

[0421] In some embodiments, t the kits provided herein comprise at least one synthetic, modified RNA that does not comprise a 5′ triphosphate.

[0422] In some embodiments, the kits provided herein comprise at least one synthetic and modified RNA further comprising a poly(A) tail, a Kozak sequence, a 3′ untranslated region, a 5′ untranslated regions, or any combination thereof. In some such embodiments, the poly(A) tail, the Kozak sequence, the 3′ untranslated region, the 5′ untranslated region, or the any combination thereof, comprises one or more modified nucleosides.

[0423] All kits described herein can further comprise a buffer, a cell culture medium, a transfection medium and/or a media supplement. In preferred embodiments, the buffers, cell culture mediums, transfection mediums, and/or media supplements are RNase-free. In some embodiments, the synthetic, modified RNAs provided in the kits can be in a non-solution form of specific quantity or mass, e.g., 20 μg, such as a lyophilized powder form, such that the end-user adds a suitable amount of buffer or medium to bring the synthetic, modified RNAs to a desired concentration, e.g., 100 ng/μl.

[0424] All kits described herein can further comprise devices to facilitate single-administration or repeated or frequent infusions of a synthetic, modified RNA, such as a non-implantable delivery device, e.g., needle, syringe, pen device, or an implantatable delivery device, e.g., a pump, semi-permanent stent (e.g., intravenous, intraperitoneal, intracisternal or intracapsular), or reservoir. In some such embodiments, the delivery device can include a mechanism to dispense a unit dose of a composition comprising a synthetic, modified RNA. In some embodiments, the device releases the composition comprising a synthetic, modified RNA continuously, e.g., by diffusion. In some embodiments, the device can include a sensor that monitors a parameter within a subject. For example, the device can include pump, e.g., and, optionally, associated electronics.

### Screening Methods

[0425] The ability to safely and efficiently reprogram, differentiate, transdifferentiate cells using the synthetic, modified RNAs compositions and methods thereof described herein, as well as generate engineered tissues using such cells, compositions and methods, has high applicability for use in high-throughput screening technologies of disease model systems and assays for the characterization of candidate agents for identifying novel agents for use in the treatment of human disease. Such screening methods and platforms can be used, for example, to identify novel agents for treating a desired disorder; to identify novel agents involved in reprogramming and differentiation, and/or alteration/maintenance of developmental states; or to identify effects of a candidate agent on one or more parameters of a particular cell type or engineered tissue generated using the compositions and methods described herein. Characterization of candidate agents can include aspects such as compound development, identifying cell-specific toxicity and cell-specific survival, and assessments of compound safety, compound efficacy, and dose-response parameters. For example, an engineered myocardium tissue can be contacted with a test agent, and the effect, if any, of the test agent on a parameter, such as an electrophysiological parameter, associated with normal or abnormal myocardium function, such as contractibility, including frequency and force of contraction, can be determined, or e.g., whether the agent has a cardiotoxic effect.

[0426] The drug discovery process is time-consuming and costly, in part owing to the high rate of attrition of compounds in clinical trials. Thus, modifications and alternative platforms that could accelerate the advancement of promising drug candidates, or reduce the likelihood of failure, would be extremely valuable. High-throughput screening technologies refer to the platforms and assays used to rapidly test thousands of compounds. For example, reporter systems used in cell lines can be used to assess whether compounds activate particular signaling pathways of interest.

[0427] The compositions and methods using synthetic, modified RNAs for reprogramming, differentiating, and transdifferentiating cells, as well as generating engineered tissues, described herein provide a reliable source of cells that can be generated and expanded in an efficient manner to quantities necessary for drug screening and toxicology studies. Further, because the compositions and methods comprising synthetic, modified RNAs described herein minimize the cellular interferon responses, and do not result in permanent genome modifications, the effects of a candidate agent can be studied with minimal confounding factors. As has been described herein, cells can be differentiated to generate specific cell types (for example, neurons, blood cells, pancreatic islet cells, muscle cells, and cardiomyocytes), and induced pluripotent stem cells can be generated from patients with specific diseases, such as, for example, a patient with cystic fibrosis, as demonstrated herein.

[0428] One particular advantage of cells and engineered tissues generated using the compositions, methods, and kits comprising synthetic, modified RNAs described herein for use in screening platforms, is that from a single and potentially limitless starting source, most of the major cells within the human body that could be affected by a drug or other agent can be produced. Such cells provide a better predictive model of both drug efficacy and toxicity than rodent cell lines or immortalized human cell lines that are currently used in high-throughput screens. While such immortalized cell and animal models have contributed a wealth of information about the complexity of various disease processes, compounds that show a significant benefit in such models can fail to show effectiveness in clinical trials. For example, use of a transgenic mouse that overexpresses mutant superoxide dismutase (SOD), a gene found to be associated with amyotrophic lateral sclerosis, enabled the identification of several compounds that alter disease characteristics, including vitamin E and creatine. However, when these compounds were tested in humans, no clinical improvements were observed (A. D. Ebert and C. N. Svendsen, “Human stem cells and drug screening: opportunities and challenges.” 2010 Nature Reviews Drug Discovery 9, p. 1-6). Furthermore, toxic effects of compounds are often missed in cell and animal models due to specific interactions with human biological processes that cannot be recapitulated in these systems.

[0429] Accordingly, in some aspects, the compositions comprising synthetic, modified RNAs, and the methods described herein, can be used for evaluating the effects of novel candidate agents and compounds on specific human cell types that are relevant to drug toxicity effects. In some embodiments, cells can be induced to undergo differentiation to a particular cell type or tissue, using the synthetic, modified RNAs described herein, that the test drug or compound is discovered or known to affect, and then used for performing dose-response toxicity studies. In such embodiments, human stem cells, such as iPS cells, derived from patients can be exposed to appropriate differentiation factors using the compositions and methods comprising synthetic, modified RNAs described herein, and instructed to form the various cell types found in the human body, which could then be useful for assessing multiple cellular parameters and characteristics upon exposure to a candidate agent or compound. For example, the cells could be used to assess the effects of drug candidates on functional cardiomyocytes, or on cardiomyocytes having a specific genetic mutation, because drug development is often stalled by adverse cardiac effects. Thus, measurable disruption of electrophysiological properties by known and novel agents and compounds can be assessed in a clinically relevant, consistent, and renewable cell source. Also, for example, such cells can be used to identify metabolic biomarkers in neural tissues derived from human stem cells after toxin exposure. Such embodiments allow potentially toxic compounds to be eliminated at an early stage of the drug discovery process, allowing efforts to be directed to more promising candidates. As another example, islet cells generated using the methods and compositions comprising synthetic, modified RNAs described herein can be used to screen candidate agents (such as solvents, small molecule drugs, peptides, polynucleotides) or environmental conditions (such as culture conditions or manipulation) that affect the characteristics of islet precursor cells and their various progeny. For example, islet cell clusters or homogeneous β cell preparations can be tested for the effect of candidate agents, such as small molecule drugs, that have the potential to up- or down-regulate insulin synthesis or secretion. The cells are combined with the candidate agent, and then monitored for change in expression or secretion rate of insulin, using, for example, RT-PCR or immunoassay of the culture medium.

[0430] In other aspects, the compositions comprising synthetic, modified RNAs, and the methods thereof described herein, are used in differentiation screens, i.e., for identifying compounds that increase self-renewal or differentiation, promote maturation, or enhance cell survival of cells, such as stem cells, differentiated cells, or cancer cells.

[0431] In other aspects, the compositions comprising the synthetic, modified RNAs, and the methods thereof, described herein, can be used to screen for drugs that may correct an observed disease phenotype. In such aspects, cells can be expanded, differentiated into the desired cell type using synthetic, modified RNAs, and then used to screen for drugs that may correct the observed disease phenotype. A candidate agent or drug can be used to directly contact the surface of a reprogrammed, differentiated, transdifferentiated cell population, or engineered tissue by applying the candidate agent to a media surrounding the cell or engineered tissue. Alternatively, a candidate agent can be intracellular as a result of introduction of the candidate agent into a cell.

[0432] As used herein, “cellular parameters” refer to quantifiable components of cells or engineered tissues, particularly components that can be accurately measured, most desirably in a high-throughput system. A cellular parameter can be any measurable parameter related to a phenotype, function, or behavior of a cell or engineered tissue. Such cellular parameters include, changes in characteristics and markers of a cell or cell population, including but not limited to changes in viability, cell growth, expression of one or more or a combination of markers, such as cell surface determinants, such as receptors, proteins, including conformational or posttranslational modification thereof, lipids, carbohydrates, organic or inorganic molecules, nucleic acids, e.g. mRNA, DNA, global gene expression patterns, etc. Such cellular parameters can be measured using any of a variety of assays known to one of skill in the art. For example, viability and cell growth can be measured by assays such as Trypan blue exclusion, CFSE dilution, and ³H incorporation. Expression of protein or polypeptide markers can be measured, for example, using flow cytometric assays, Western blot techniques, or microscopy methods. Gene expression profiles can be assayed, for example, using microarray methodologies and quantitative or semi-quantitative real-time PCR assays. A cellular parameter can also refer to a functional parameter, such as a metabolic parameter (e.g., expression or secretion of a hormone, such as insulin or glucagon, or an enzyme, such as carboxypeptidase), an electrophysiological parameter (e.g., contractibility, such as frequency and force of mechanical contraction of a muscle cell; action potentials; conduction, such as conduction velocity), or an immunomodulatory parameter (e.g., expression or secretion of a cytokine or chemokine, such as an interferon, or an interleukin; expression or secretion of an antibody; expression or secretion of a cytotoxin, such as perforin, a granzyme, and granulysin; and phagocytosis).

[0433] The “candidate agent” used in the screening methods described herein can be selected from a group of a chemical, small molecule, chemical entity, nucleic acid sequences, an action; nucleic acid analogues or protein or polypeptide or analogue of fragment thereof. In some embodiments, the nucleic acid is DNA or RNA, and nucleic acid analogues, for example can be PNA, pcPNA and LNA. A nucleic acid may be single or double stranded, and can be selected from a group comprising; nucleic acid encoding a protein of interest, oligonucleotides, PNA, etc. Such nucleic acid sequences include, for example, but not limited to, nucleic acid sequence encoding proteins that act as transcriptional repressors, antisense molecules, ribozymes, small inhibitory nucleic acid sequences, for example but not limited to RNAi, shRNAi, siRNA, micro RNAi (mRNAi), antisense oligonucleotides etc. A protein and/or peptide agent or fragment thereof, can be any protein of interest, for example, but not limited to; mutated proteins; therapeutic proteins; truncated proteins, wherein the protein is normally absent or expressed at lower levels in the cell. Proteins of interest can be selected from a group comprising; mutated proteins, genetically engineered proteins, peptides, synthetic peptides, recombinant proteins, chimeric proteins, antibodies, humanized proteins, humanized antibodies, chimeric antibodies, modified proteins and fragments thereof. A candidate agent also includes any chemical, entity or moiety, including without limitation synthetic and naturally-occurring non-proteinaceous entities. In certain embodiments, the candidate agent is a small molecule having a chemical moiety. Such chemical moieties can include, for example, unsubstituted or substituted alkyl, aromatic, or heterocyclyl moieties and typically include at least an amine, carbonyl, hydroxyl or carboxyl group, frequently at least two of the functional chemical groups, including macrolides, leptomycins and related natural products or analogues thereof. Candidate agents can be known to have a desired activity and/or property, or can be selected from a library of diverse compounds.

[0434] Also included as candidate agents are pharmacologically active drugs, genetically active molecules, etc. Such candidate agents of interest include, for example, chemotherapeutic agents, hormones or hormone antagonists, growth factors or recombinant growth factors and fragments and variants thereof. Exemplary of pharmaceutical agents suitable for use with the screening methods described herein are those described in, “The Pharmacological Basis of Therapeutics,” Goodman and Gilman, McGraw-Hill, New York, N.Y., (1996), Ninth edition, under the sections: Water, Salts and Ions; Drugs Affecting Renal Function and Electrolyte Metabolism; Drugs Affecting Gastrointestinal Function; Chemotherapy of Microbial Diseases; Chemotherapy of Neoplastic Diseases; Drugs Acting on Blood-Forming organs; Hormones and Hormone Antagonists; Vitamins, Dermatology; and Toxicology, all of which are incorporated herein by reference in their entireties. Also included are toxins, and biological and chemical warfare agents, for example see Somani, S. M. (Ed.), “Chemical Warfare Agents,” Academic Press, New York, 1992), the contents of which is herein incorporated in its entirety by reference.

[0435] Candidate agents, such as chemical compounds, can be obtained from a wide variety of sources including libraries of synthetic or natural compounds. For example, numerous means are available for random and directed synthesis of a wide variety of organic compounds, including biomolecules, including expression of randomized oligonucleotides and oligopeptides. Alternatively, libraries of natural compounds in the form of bacterial, fungal, plant and animal extracts are available or readily produced. Additionally, natural or synthetically produced libraries and compounds are readily modified through conventional chemical, physical and biochemical means, and may be used to produce combinatorial libraries. Known pharmacological agents may be subjected to directed or random chemical modifications, such as acylation, alkylation, esterification, amidification, etc. to produce structural analogs. Synthetic chemistry transformations and protecting group methodologies (protection and deprotection) useful in synthesizing the candidate compounds for use in the screening methods described herein are known in the art and include, for example, those such as described in R. Larock (1989) Comprehensive Organic Transformations, VCH Publishers; T. W. Greene and P. G. M. Wuts, Protective Groups in Organic Synthesis, 2nd ed., John Wiley and Sons (1991); L. Fieser and M. Fieser, Fieser and Fieser's Reagents for Organic Synthesis, John Wiley and Sons (1994); and L. Paquette, ed., Encyclopedia of Reagents for Organic Synthesis, John Wiley and Sons (1995), and subsequent editions thereof, the contents of each of which are herein incorporated in their entireties by reference.

[0436] Examples of methods for the synthesis of molecular libraries can be found in the art, for example in: DeWitt et al. (1993) Proc. Natl. Acad. Sci. U.S.A. 90:6909; Erb et al. (1994) Proc. Natl. Acad. Sci. USA 91:11422; Zuckermann et al. (1994) J. Med. Chem. 37:2678; Cho et al. (1993) Science 261:1303; Carrell et al. (1994) Angew. Chem. Int. Ed. Engl. 33:2059; Carell et al (1994) Angew. Chem. Int. Ed. Engl. 33:2061; and Gallop et al. (1994) J. Med. Chem. 37:1233, the contents of each of which are herein incorporated in their entireties by reference.

[0437] Libraries of candidate agents can be presented in solution (e.g., Houghten (1992), Biotechniques 13:412-421), or on beads (Lam (1991), Nature 354:82-84), chips (Fodor (1993) Nature 364:555-556), bacteria (Ladner, U.S. Pat. No. 5,223,409), spores (Ladner U.S. Pat. No. 5,223,409), plasmids (Cull et al. (1992) Proc Natl Acad Sci USA 89:1865-1869) or on phage (Scott and Smith (1990) Science 249:386-390; Devlin (1990) Science 249:404-406; Cwirla et al. (1990) Proc. Natl. Acad. Sci. 87:6378-6382; Felici (1991) J. Mol. Biol. 222:301-310; Ladner supra.), the contents of each of which are herein incorporated in their entireties by reference.

### Polypeptides to be Expressed

[0438] Essentially any polypeptide can be expressed using the synthetic, modified, RNAs described herein. Polypeptides useful with the methods described herein include, but are not limited to, transcription factors, targeting moieties and other cell-surface polypeptides, cell-type specific polypeptides, differentiation factors, death receptors, death receptor ligands, reprogramming factors, and/or de-differentiation factors.

### Transcription Factors

[0439] In some embodiments, a synthetic, modified RNA or composition thereof encodes for a transcription factor. As used herein the term “transcription factor” refers to a protein that binds to specific DNA sequences and thereby controls the transfer (or transcription) of genetic information from DNA to mRNA. In one embodiment, the transcription factor encoded by the synthetic, modified RNA is a human transcription factor, such as those described in e.g., Messina D M, et al. (2004) Genome Res. 14(10B):2041-2047, which is herein incorporated by reference in its entirety.

[0440] Some non-limiting examples of human transcription factors (and their mRNA IDs and sequence identifiers) for use in the aspects and embodiments described herein include those listed herein in Table 1 (SEQ ID NOs: 1-1428 and 1483-1501).

TABLE 1
Exemplary Human Transcription Factors

| | | | SEQ | | |
|---|---|---|---|---|---|
| Gene | | | ID | | |
| Abbrev | ScriptSureID | mRNA ID | NO: | Class | Description |
| AA125825 | | AA125825 | 1 | Other | |
| AA634818 | | AA634818 | 2 | Other | |
| AATF | | NM_012138 | 3 | bZIP | apoptosis antagonizing |
| | | | | | transcription factor |
| AB002296 | NT_033233:4 | AB002296 | 4 | Bromodomain | |
| AB058701 | NT_025741:494 | AB058701 | 5 | ZnF-Other | |
| AB075831 | NT_011139:311 | AB075831 | 6 | ZnF—C2H2 | |
| ABT1 | | NM_013375 | 7 | Other | activator of basal |
| | | | | | transcription 1 |
| ADNP | | NM_015339 | 8 | Homeobox | activity-dependent |
| | | | | | neuroprotector |
| AEBP2 | NT_035211:21 | NM_153207 | 9 | ZnF—C2H2 | AE (adipocyte enhancer)- |
| | | | | | binding protein 2 |
| AF020591 | | NM_014480 | 10 | ZnF—C2H2 | zinc finger protein |
| AF0936808 | | NM_013242 | 11 | Other | similar to mouse Gir3 or |
| | | | | | D. melanogaster |
| | | | | | transcription factor IIB |
| AF5Q31 | | NM_014423 | 12 | Structural | ALL 1 fused gene from |
| | | | | | 5q31 |
| AHR | | NM_001621 | 13 | bHLH | aryl hydrocarbon receptor |
| AHRR | NT_034766:39 | NM_020731 | 14 | Co-repressor | aryl hydrocarbon receptor |
| | | | | | repressor |
| AI022870 | | AI022870 | 15 | Other | catalytic subunit of DNA |
| | | | | | polymerase zeta |
| AI352508 | | AI352508 | 16 | Other | Highly similar to |
| | | | | | DPOZ_HUMAN DNA |
| | | | | | POLYMERASE ZETA |
| | | | | | SUBUNIT |
| AI569906 | | AI569906 | 17 | ZnF—C2H2 | Weakly similar to |
| | | | | | ZN42_HUMAN ZINC |
| | | | | | FINGER PROTEIN 42 |
| AIRE | | NM_000383 | 18 | ZnF-PHD | autoimmune regulator |
| | | | | | (autoimmune |
| | | | | | polyendocrinopathy |
| | | | | | candidiasis ectodermal |
| | | | | | dystrophy) |
| AK024238 | NT_023124:29 | AK024238 | 19 | Homeobox | |
| AK056369 | NT_034877:1 | AK056369 | 20 | ZnF—C2H2 | |
| AK057375 | NT_008389:5 | AK057375 | 21 | ZnF—C2H2 | |
| AK074366 | NT_005825:35 | AK074366 | 22 | ZnF—C2H2 | |
| AK074859 | NT_011150:41 | AK074859 | 23 | ZnF—C2H2 | |
| AK092811 | NT_017568:327 | AK092811 | 24 | ZnF—C2H2 | |
| AK096221 | NT_035560:44 | AK096221 | 25 | ZnF—C2H2 | |
| AK096288 | NT_007819:700 | AK096288 | 26 | ZnF—C2H2 | |
| AK098183 | NT_011104:165 | AK098183 | 27 | ZnF—C2H2 | |
| AK122874 | NT_011568:219 | AK122874 | 28 | ZnF—C2H2 | |
| AK126753 | NT_011176:418 | AK126753 | 29 | ZnF—C2H2 | |
| ANP32A | | NM_006305 | 30 | Co-activator | phosphoprotein 32 family, |
| | | | | | member A |
| APA1 | | NM_021188 | 31 | ZnF—C2H2 | ortholog of mouse another |
| | | | | | partner for ARF 1 |
| Apg4B | | NM_013325 | 32 | Other | Apg4/Au2 homolog 2 |
| | | | | | (yeast) |
| AR | | NM_000044 | 33 | NHR | androgen receptor |
| | | | | | (dihydrotestosterone |
| | | | | | receptor) |
| ARC | | NM_015193 | 34 | Other | activity-regulated |
| | | | | | cytoskeleton-associated |
| | | | | | protein |
| ARIDIA | NT_028053:228 | NM_006015 | 35 | Structural | AT rich interactive |
| | | | | | domain 1A (SWI-like) |
| ARIH2 | | NM_006321 | 36 | ZnF-Other | ariedne (drosophila) |
| | | | | | homolog 2 |
| ARIX | | NM_005169 | 37 | Homeobox | aristaless homeobox |
| ARNT | | NM_001668 | 38 | bHLH | aryl hydrocarbon receptor |
| | | | | | nuclear translocator |
| ARNT2 | | NM_014862 | 39 | bHLH | aryl hydrocarbon receptor |
| | | | | | nuclear translocator 2 |
| ARNTL | | NM-001178 | 40 | bHLH | aryl hydrocarbon receptor |
| | | | | | nuclear translocator-like |
| ARNTL2 | NT_035213:171 | NM_020183 | 41 | bHLH | aryl hydrocarbon receptor |
| | | | | | nuclear translocator-like 2 |
| ARX | NT_025940:10 | NM_139058 | 42 | Homeobox | aristaless related |
| | | | | | homeobox |
| ASCL1 | | NM_004316 | 43 | bHLH | achaete-scute complex |
| | | | | | (Drosophila) homolog-like 1 |
| ASCL2 | | NM_005170 | 44 | bHLH | achaete-scute complex |
| | | | | | (Drosophila) homolog-like 2 |
| ASCL3 | | NM_020646 | 45 | bHLH | achaete-scute complex |
| | | | | | (Drosophila) homolog-like 3 |
| ASH1 | | NM-018489.2 | 46 | ZnF-PHD | hypothetical protein ASH1 |
| ASH2L | | NM_004674 | 47 | Structural | Ash2 (absent, small, or |
| | | | | | homeotic, Drosophila, |
| | | | | | homolog)-like |
| ATBF1 | | NM_006885 | 48 | ZnF—C2H2 | AT-binding transcription |
| | | | | | factor 1 |
| ATF1 | | NM_005171 | 49 | bZIP | activating transcription |
| | | | | | factor 1 |
| ATF2 | | NM_001880 | 50 | bZIP | activating transcription |
| | | | | | factor 2 |
| ATF3 | | NM_001674 | 51 | bZIP | activating transcription |
| | | | | | factor 3 |
| ATF4 | | NM_001675 | 52 | bZIP | Activating transcription |
| | | | | | factor 4 (tax-responsive |
| | | | | | enhancer element B67) |
| ATF5 | | NM_012068 | 53 | bZIP | activating transcripton |
| | | | | | factor 5 |
| ATF6 | | NM_007348 | 54 | bZip | activating transcription |
| | | | | | factor 6 |
| AW875035 | | AW875035 | 55 | AnF-C2H2 | Moderately similar to |
| | | | | | YY1, Very very |
| | | | | | hypothetical protein |
| | | | | | RMSA-1 |
| AWP1 | | NM_019006 | 56 | ZnF-AN1 | protein associated with |
| | | | | | PRK1 |
| AY026053 | NT_011519:29 | AY026053 | 57 | Heat Shock | |
| BA044953 | NT_005825:31 | AB079778.1 | 1497 | | OSZF isoform; ras- |
| | | U26914.1 | 1498 | | responsive element |
| | | | | | binding protein (RREB-1) |
| BACH1 | | NM_001186 | 58 | bZIP | BTB and CNC homology |
| | | | | | 1, basic leucine zipper |
| | | | | | transcription factor 1 |
| BACH2 | | NM_021813 | 59 | bZIP | BTB and CNC homology |
| | | | | | 1, basic leucine zipper |
| | | | | | transcription factor 2 |
| BAGE2 | NT_029490:10 | NM_182482 | 60 | ZnF-PHD | B melanoma antigen |
| | | | | | family, member 2 |
| BANP | | NM_017869 | 61 | Co-activator | BANP homolog, SMAR1 |
| | | | | | homolog |
| BAPX1 | | NM_001189 | 62 | Homeobox | bagpipe homeobox |
| | | | | | (Drosophila) homolog 1 |
| BARHL1 | | NM_020064 | 63 | Homeobox | BarH (Drosophila)-like 1 |
| BARHL2 | | AJ251753 | 64 | Homeobox | BarH (Drosophila)-like 2 |
| BARX1 | | NM_021570 | 65 | Homeobox | BarH-like homeobox 1 |
| BARX2 | | NM_003658 | 66 | Homeobox | BarH-like homeobox 2 |
| BATF | | NM_006399.3 | 67 | bZIP | basic leucine zipper |
| | | | | | transcription factor, ATF- |
| | | | | | like |
| BAZ1A | | NM_013448 | 68 | Bromodomain | bromodomain adjacent to |
| | | | | | zinc finger domain, 1A |
| BAZ1B | | NM_023005 | 69 | Bromodomain | bromodomain adjacent to |
| | | | | | zinc finger domain, 1B |
| BAZ2A | | NM_013449 | 70 | Bromodomain | bromodomain adjacent to |
| | | | | | zinc finger domain, 2A |
| BAZ2B | | NM_013450.2 | 71 | Bromodomain | bromodomain adjacent to |
| | | | | | zinc finger domain, 2B |
| BCL11A | | NM_018014 | 72 | ZnF—C2H2 | B-cell CLL/lymphoma |
| | | | | | 11A (zinc finger protein) |
| BCL11B | | NM_022898 | 73 | ZnF—C2H2 | B-cell CLL/lymphoma |
| | | | | | 11B (zinc finger protein) |
| BHLHB3 | | NM_030762 | 74 | bHLH | basic helix-loop-helix |
| | | | | | domain containing, class |
| | | | | | B, 3 |
| BHLHB5 | | NM_152414 | 75 | bHLH | basic helix-loop-helix |
| | | | | | domain containing, class |
| | | | | | B, 5 |
| BIA2 | NT_029870:6 | NM_015431 | 76 | Co-activator | BIA2 protein |
| BIZF1 | | NM_003666 | 77 | bZIP | Basic leucine zipper |
| | | | | | nuclear factor 1 (JEM-1) |
| BMI1 | | NM_005180 | 78 | ZnF-Other | murine leukemia viral |
| | | | | | (bmii-1) oncogene |
| | | | | | homolog |
| BNC | | NM_001717 | 79 | ZnF—C2H2 | basonuclin |
| BRD1 | | NM_014577 | 80 | Bromodomain | bromodomain-containing 1 |
| BRD2 | | NM_005104 | 81 | Bromodomain | bromodomain-containing 2 |
| BRD3 | | NM_007371 | 82 | Bromodomain | bromodomain-containing 3 |
| BRD4 | | NM_014299 | 83 | Bromodomain | bromodomain-containing 4 |
| BRD7 | | NM_013263 | 84 | Bromodomain | bromodomain-containing 7 |
| BRD9 | NT_034766:148 | NM_023924 | 85 | Bromodomain | bromodomain-containing 9 |
| BRDT | | NM_001726 | 86 | Bromodomain | Bromodomain, testis- |
| | | | | | specific |
| BRF1 | | NM_001519 | 87 | Other | BRF1 homolog, subunit of |
| | | | | | RNA polymerase III |
| | | | | | transcription initiation |
| | | | | | factor IIIB |
| BRF2 | | NM_006887 | 88 | ZnF—C3H | zinc finger protein 36, |
| | | | | | C3H type-like 2 |
| BRPF1 | | NM_004634 | 89 | Bromodomain | bromodomain and PHD |
| | | | | | finger containing, 1 |
| BRPF3 | | AB033112 | 90 | Bromodomain | bromodomain and PHD |
| | | | | | finger containing, 3 |
| BS69 | | NM_006624 | 91 | ZnF-NYND | Adenovirus 5 E1A binding |
| | | | | | protein |
| BTAF1 | | AF038362 | 92 | Other | BTAF1 RNA polymerase |
| | | | | | II, B-TF11D transcription |
| | | | | | factor-associated, 170 kDa |
| BTBD1 | NT_019601:32 | NM_025238 | 93 | ZnF- | BTB (POZ) domain |
| | | | | BTB/POZ | containing 1 |
| BTBD14A | NT_019501:127 | NM_144653 | 94 | ZnF- | BTB (POZ) domain |
| | | | | BTB/POZ | containing 14A |
| BTBD14B | NT_031915:27 | NM_052876 | 95 | ZnF- | BTB (POZ) domain |
| | | | | BTB/POZ | containing 14B |
| BTBD2 | NT_011268:135 | NM_017797 | 96 | ZnF- | BTB (POZ) domain |
| | | | | BTB/POZ | containing 2 |
| BTBD3 | | NM_014962 | 97 | ZnF- | BTB (POZ) domain |
| | | | | BTB/POZ | containing 3 |
| BTBD4 | NT_033241:138 | AK023564 | 98 | ZnF- | BTB (POZ) domain |
| | | | | BTB/POZ | containing 4 |
| BTF3L2 | | M90355 | 99 | Other | basic transcription factor |
| | | | | | 3, like 2 |
| BTF3L3 | | N90356 | 100 | Other | Basic transcription factor |
| | | | | | 3, like 3 |
| BX538183 | NT_011109:1331 | BX538183 | 101 | ZnF—C2H2 | |
| BX548737 | NT_006802:14 | BX648737 | 102 | ZnF—C2H2 | |
| C11orf13 | | NM_003475 | 103 | Other | chromosome 11 open |
| | | | | | reading frame 13 |
| C11orf9 | | NM_013279 | 104 | Other | chromosome 11 open |
| | | | | | reading frame 9 |
| C14orf101 | | NM_017799 | 105 | Other | chromosome 14 open |
| | | | | | reading frame 101 |
| C14orf106 | | NM_018353 | 106 | Other | chromosome 14 open |
| | | | | | reading frame 106 |
| C14orf44 | NT_010422:242 | NM_024731 | 107 | ZnF- | chromosome 16 open |
| | | | | BTB/POZ | reading frame 44 |
| C1orf2 | | NM_006589 | 108 | Other | chromosome 10 open |
| | | | | | reading frame 2 |
| C20orf174 | | AL713683 | 109 | ZnF—C2H2 | chromosome 20 open |
| | | | | | reading frame174 |
| C21orf18 | | NM_017438 | 110 | Other | chromosome 21 open |
| | | | | | reading frame 18 |
| C31P1 | NT_034563:155 | NM_021633 | 111 | ZnF- | kelch-like protein C31P1 |
| | | | | BTB/POZ | |
| C5orf7 | | NM_016604 | 112 | Jumonji | chromosome 5 open |
| | | | | | reading frame 7 |
| CART1 | | NM_006982 | 113 | Homeobox | cartilage paired-class |
| | | | | | homeoprotein 1 |
| CBF2 | | NM_005760 | 114 | Beta-scaffold- | CCAAT-box-binding |
| | | | | CCAAT | transcription factor |
| CBFA2T1 | | NM_004349 | 115 | ZnF-MYND | core-binding factor, runt |
| | | | | | domain, alpha subunit 2; |
| | | | | | translocated to, 1; cyclin |
| | | | | | D-related |
| CBFA2T2 | NT_028392:284 | NM_005093 | 116 | ZnF-MYND | core-binding factor, runt |
| | | | | | domain, alpha subunit 2; |
| | | | | | translocated to, 2 |
| CBFA2T3 | | NM_005187 | 117 | ZnF-MYNC | Core-binding factor, runt |
| | | | | | domain, alpha subunit 2; |
| | | | | | translocated to, 3 |
| CBX1 | | NM_006807 | 118 | Structural | chromobox homolog 1 |
| | | | | | (Drosophila HP1 beta) |
| CBX2 | | X77824 | 119 | Structural | chromobox homolog 2 |
| | | | | | (Drosophila Pc class)) |
| CBX3 | | NM_007276 | 120 | Structural | chromobox homolog 3 |
| | | | | | (Drosophila HP1 gamma) |
| CBX4 | | NM_003655 | 121 | Structural | chromobox homolog 4 |
| | | | | | (Drosophila Pc class) |
| CBX5 | | NM_012117 | 122 | Structural | chromobox homolog 5 |
| | | | | | (Drosophila HP1 alpha) |
| CBX6 | | NM_014292 | 123 | Structural | chromobox homolog 6 |
| CBX7 | | NM_175709 | 124 | Structural | chromobox homolog 7a) |
| CDX1 | | NM_001804 | 125 | Homeobox | caudal-type homeobox |
| | | | | | transcription factor 1 |
| CDX2 | | NM_001265 | 126 | Homeobox | caudal-type homeobox |
| | | | | | transcription factor 2 |
| CDX4 | | NM_005193 | 127 | Homeobox | caudal-type homeobox |
| | | | | | transcription factor 4 |
| CEBPA | | NM_004364 | 128 | bZIP | CCAA T/enhancer binding |
| | | | | | protein (C/EBP), alpha |
| CEBPB | | NM_005194 | 129 | bZIP | CCAA T/enhancer binding |
| | | | | | protein (C/EBP), beta |
| CEBPD | | NM_005195 | 130 | bZIP | CCAA T/enhancer binding |
| | | | | | protein (C/EBP), delta |
| CEBPE | | NM_001805 | 131 | bZIP | CCAA T/enhancer binding |
| | | | | | protein (C/EBP), epsilon |
| CEBPG | | NM_001806 | 132 | bZIP | CCAA T/enhancer binding |
| | | | | | protein (C/EBP), gamma |
| CECR6 | | Nm_031890 | 133 | Bromodomain | cat eye syndrome |
| | | | | | chromosome region, |
| | | | | | candidate 6 |
| CERD4 | | NM_012074 | 134 | ZnF-PHD | D4, zinc and double PHD |
| | | | | | fingers, family 3 |
| CEZANNE | | NM_020205 | 135 | Co-repressor | cellular zinc finger anti- |
| | | | | | NF-KappaB Cezanne |
| CG9879 | | A1217897 | | Other | CG9879 (fly) homolog |
| CGI-149 | | NM_016079 | 137 | Other | CGI-149 protein |
| CGI-85 | | NM_017635 | 138 | Structural | CGI-85 protein |
| CGI-99 | | NM_016039 | 139 | Other | CGI-99 protein |
| CHD1 | | NM_001270 | 140 | Structural | chromodomain helicase |
| | | | | | DNA binding protein 1 |
| CHD1L | | NM_024568 | 141 | Structural | chromodomain helicase |
| | | | | | DNA binding protein 1- |
| | | | | | like |
| CHD2 | | NM_001271 | 142 | Structural | chromodomain helicase |
| | | | | | DNA binding protein 2 |
| CHD3 | | NM_001272 | 143 | Structural | chromodomain helicase |
| | | | | | DNA binding protein 3 |
| CHD4 | | NM_001273 | 144 | Structural | chromodomain helicase |
| | | | | | DNA binding protein 4 |
| CHD5 | | NM_015557 | 145 | Structural | chromodomain helicase |
| | | | | | DNA binding protein 5 |
| CHD6 | | NM_032221 | 146 | Structural | chromodomain helicase |
| | | | | | DNA binding protein6 |
| CHES1 | | NM_005197 | 147 | Forkhead | checkpoint suppressor 1 |
| CHX10 | | XM_063425 | 148 | Homeobox | ceh-10 homeo domain |
| | | | | | containing homolog (C. elegans) |
| CIZ1 | NT_029366:585 | NM_012127 | 149 | ZnF—C2H2 | Cip1-interacting zinc |
| | | | | | finger protein |
| CLOCK | | NM_004898 | 150 | bHLH | Clock (mouse) homolog |
| CNOT3 | | NM_014516 | 151 | Other | CCRA-NOT transcription |
| | | | | | complex, subunit 3 |
| CNOT4 | | NM_013316 | 152 | Other | CCRA-NOT transcription |
| | | | | | complex, subunit 4 |
| CNOT8 | | NM_004779 | 153 | Other | CCRA-NOT transcription |
| | | | | | complex, subunit 8 |
| COPEB | | NM_001300 | 154 | ZnF—C2H2 | core promoter element |
| | | | | | binding protein |
| COPS5 | | NM_006837 | 155 | Co-activator | COP9 constitutive |
| | | | | | photomorphogenic |
| | | | | | homolog subunit 5 |
| | | | | | (Arabidopsis) |
| CORO1A | | NM_007074 | 156 | bZIP | coronin, actin-binding |
| | | | | | protein, 1A |
| CREB1 | | NM_004379 | 157 | bZIP | cAMP responsive element |
| | | | | | binding protein 1 |
| CREB3 | | NM_006468 | 158 | bZIP | cAMP responsive element |
| | | | | | binding protein 3 (luman) |
| CREB3L1 | | NM_052854 | 159 | bZIP | cAMP responsive element |
| | | | | | binding protein 3-like 1 |
| CREB3L2 | NT_007933:5606 | NM_194071 | 160 | bZIP | cAMP responsive element |
| | | | | | binding protein 3-like 2 |
| CREB3L3 | NT_011255:184 | NM_032607 | 161 | bZIP | cAMP responsive element |
| | | | | | binding protein 3-like 3 |
| CREB3L4 | NT_004858:17 | NM_130898 | 162 | bZIP | cAMP responsive element |
| | | | | | binding protein 3-like 4 |
| CREB5 | | NM_004904 | 163 | bZIP | cAMP responsive element |
| | | | | | binding protein 5 |
| CREBBP | | NM_004380 | 164 | ZnPHD | CREP binding protein |
| | | | | | (Rubinstein-Taybi |
| | | | | | syndrome) |
| CREBL1 | | NM_004381 | 165 | bZIP | cAMP responsive element |
| | | | | | binding protein-like 1 |
| CREBL2 | | NM_001310 | 166 | bZIP | cAMP responsive element |
| | | | | | binding protein-like 2 |
| CREG | | NM_003851 | 167 | Other | Cellular repressor of EIA- |
| | | | | | stimulated genes |
| CREM | | NM_001881 | 168 | bZIP | cAMP responsive element |
| | | | | | modulator |
| CRIP1 | | NM_001311 | 169 | Co-activator | cysteine-rich protein 1 |
| | | | | | (intestinal) |
| CRIP2 | | NM_001312 | 170 | Co-activator | cysteine-rich protein 2 |
| CROC4 | | NM_006365 | 171 | Other | transcriptional activator of |
| | | | | | the c-fos promoter |
| CRSP8 | | NM_004269 | 172 | Co-activator | cofactor required for Sp1 |
| | | | | | transcriptional activation, |
| | | | | | subunit 8, 34 kD |
| CRSP9 | | NM_004270 | 173 | Co-activator | cofactor required for Sp1 |
| | | | | | transcriptional activation, |
| | | | | | subunit 9, 33 kD |
| CRX | | NM_000554 | 174 | Homeobox | cone-rod homeobox |
| CSDA | | NM_003651 | 175 | Beta-scaffold- | cold shock domain protein A |
| | | | | cold-shock | |
| CSEN | | NM_013434 | 176 | Other | Calsenilin, presenilin- |
| | | | | | binding protein, EF hand |
| | | | | | transcription factor |
| CSRP1 | | NM_004078 | 177 | Co-activator | cysteine and glycine-rich |
| | | | | | protein 1 |
| CSRP2 | | NM_001321 | 178 | Co-activator | cysteine and glycine-rich |
| | | | | | protein 2 |
| CSRP3 | | NM_003476 | 179 | Co-activator | cysteine and glycine-rich |
| | | | | | protein 3 (cardiac LIM |
| | | | | | protein) |
| CTCF | | NM_006565 | 180 | ZnF—C2H2 | CCCTC-binding factor |
| | | | | | (zinc finger protein) |
| CTCFL | NT_011362:1953 | NM_080618 | 181 | ZnF—C2H2 | CCCTC-binding factor |
| | | | | | (zinc finger protein)-like |
| CTNNB1 | | NM_001904 | 182 | Co-activator | catenin (cadherin- |
| | | | | | associated protein), beta 1, |
| | | | | | 88 kD |
| CUTL1 | | NM_001913 | 183 | Homeobox | cut (Drosophila)-like 1 |
| | | | | | (CCAAT displacement |
| | | | | | protein) |
| CUTL2 | | AB006631 | 184 | Homeobox | cut-like 2 (Drosophila)- |
| MAMLD1 | | NM_001177465.1 | 185 | Other | isoform 1 |
| | | NM_001177466.1 | 1483 | | isoform 2 |
| | | NM_005491.3 | 1484 | | isoform 3 |
| DACH | | NM_004392 | 186 | Co-repressor | dachshund (Drosophila) |
| | | | | | homolog |
| DAT1 | | NM_018640 | 187 | ZnF-Other | neuronal specific |
| | | | | | transcription factor DAT1 |
| DATF1 | | NM_022105 | 188 | ZnF-PHD | death associated |
| | | | | | transcription factor 1 |
| DBP | | NM_001352 | 189 | bZIP | D site of albumin |
| | | | | | promoter (albumin D-box) |
| | | | | | binding protein |
| DDIT3 | | NM_004083 | 190 | bZIP | DNA-damage-inducible |
| | | | | | transcript 3 |
| DEAF1 | | NM_021008 | 191 | ZnF-MYND | deformed epidermal |
| | | | | | autoregulatory factor 1 |
| | | | | | (Drosophila) |
| DKFZP434B0335 | | AB037779 | 192 | Other | DKFZP434B0335 protein |
| DKFZP434B195 | | NM_031284 | 193 | Other | Hypothetical protein |
| | | | | | DKFZp434B195 |
| DKFZp434G043 | | AL080134 | 194 | bHLH | HLHmdelta (fly) homolog |
| DKFZP434P1750 | | NM_015527 | 195 | Other | DKFZP434P1750 |
| DKFZp547B0714 | NT_011233:43 | NM_152606 | 196 | ZnF—C2H2 | Hypothetical protein |
| | | | | | DKFZp547B0714 |
| DLX2 | | NM_004405 | 197 | Homeobox | Distal-less homeobox 2 |
| DLX3 | | NM_005220 | 198 | Homeobox | distal-less homeobox 3 |
| DLX4 | | NM_001934 | 199 | Homeobox | distal-less homeobox 4 |
| DLX5 | | NM_005221 | 200 | Homeobox | distal-less homeobox 5 |
| DLX6 | | NM_005222 | 201 | Homeobox | distal-less homeobox 6 |
| DMRT1 | | NM_021951 | 202 | ZnF-DM | doublesex and mab-3 |
| | | | | | related transcription factor 1 |
| DMRT2 | | NM_006557 | 203 | ZnF-DM | doublesex and mab-3 |
| | | | | | related transcription factor 2 |
| DMRT3 | NT_008413:158 | NM_021240 | 204 | ZnF-DM | doublesex and mab-3 |
| | | | | | related transcription factor 3 |
| DMRTA1 | NT_023974:296 | AJ290954 | 205 | ZnF-DM | DMRT-like family A1 |
| DMRTA2 | | AJ301580 | 206 | ZnF-DM | DMRT-like family A2 |
| DMRTB1 | NT_004424:223 | NM_033067 | 207 | ZnF-DM | DMRT-like family B with |
| | | | | | prolien-rich C-terminal, 1 |
| DMRTC1 | | BC029799 | 208 | ZnF-DM | DMRT-like family C1 |
| DMRTC2 | NT_011139:240 | NM_033052 | 209 | ZnF-DM | DMRT-like family C2 |
| DMTF1 | | NM_021145 | 210 | Other | cyclin D binding Nyb-like |
| | | | | | transcription factor 1 |
| DR1 | | NM_001938 | 211 | Co-repressor | down-regulator of |
| | | | | | transcription 1, TBP- |
| | | | | | binding (negative collector |
| | | | | | 2) |
| DRAP1 | | NM_006442 | 212 | Co repressor | DR1-associated protein 1 |
| | | | | | (negative cofactor 2 alpha) |
| DRIL1 | | NM_005224 | 213 | Structural | dead ringer (Drosophila)- |
| | | | | | like 1 |
| DRIL2 | | NM_006465 | 214 | Structural | dead ringer (Drosophila)- |
| | | | | | like 2 (bright and dead |
| | | | | | ringer) |
| DRPLA | | NM-001940 | 215 | Co-repressor | dentatorubral- |
| | | | | | palidoluysian atrophy |
| | | | | | (atrophin-1) |
| DSIPI | | NM-004089 | 216 | bZIP | delta sleep inducing |
| | | | | | peptide, immunoreactor |
| DTX2 | | AB040961 | 217 | ZnF-other | deltex homolog 2 |
| | | | | | (Drosophila) |
| DUX1 | | NM_012146 | 218 | Homeobox | double homeobox 1 |
| DUX2 | | NM_012147 | 219 | Homeobox | double homeobox 2 |
| DUX3 | | NM_012148 | 220 | Homeobox | double homeobox genes 3 |
| DUX4 | | NM_033178 | 221 | Homeobox | double homeobox 4 |
| DUX5 | | NM_012149 | 222 | Homeobox | double homeobox 5 |
| DXYS155E | | NM_005088 | 223 | Other | DNA segment on |
| | | | | | chromosome X and Y |
| | | | | | (unique) 155 expressed |
| | | | | | sequence |
| E2F1 | | NM_005225 | 224 | E2F | E2F transcription factor 1 |
| Text cut off | | | | | |
| EED | | NM_003797 | 225 | Structural | Embryonic echoderm |
| | | | | | development |
| EGLN1 | NT_004753:53 | NM_022051 | 226 | ZnF-MYND | egl nine homolog 1 (C. elegans) |
| EGLN2 | | NM_017555 | 227 | ZnF-MYND | egl nine homolog 2 (C. elegans) |
| EGR1 | | NM_001964 | 228 | ZnF—C2H2 | early growth response 1 |
| EGR2 | | NM_000399 | 229 | ZnF—C2H2 | early growth response 2 |
| | | | | | (Knox-20 (Drosophila) |
| | | | | | homolog) |
| EGR3 | | NM_004430 | 230 | ZnF—C2H2 | early growth response 3 |
| EGR4 | | NM_001965 | 231 | ZnF—C2H2 | early growth response 4 |
| EHF | | NM_012153 | 232 | Trp cluster- | ets homologous factor |
| | | | | Ets | |
| EHZF | NT_011044:150 | NM_015461 | 233 | ZnF-PHD | early hematopoietic zinc |
| | | | | | finger |
| ELD/OSA1 | | NM_020732 | 234 | Structural | BRG1-binding protein |
| | | | | | ELD/OSA1 |
| ELF1 | | M82882 | 235 | Trp cluster | E-74-like factor 1 (ets |
| | | | | Ets | domain transcription |
| | | | | | factor) |
| ELF2 | | NM_006874 | 236 | Trp cluster | E-74-like factor 2 (ets |
| | | | | Ets | domain transcription |
| | | | | | factor) |
| ELF3 | | NM_004433 | 237 | Trp cluster | E-74-like factor 3 (ets |
| | | | | Ets | domain transcription |
| | | | | | factor, epithelial-specific) |
| ELF4 | | NM_001421 | 238 | Trp cluster | E-74-like factor 4 (ets |
| | | | | Ets | domain transcription |
| | | | | | factor) |
| ELF5 | | NM_001422 | 239 | Trp cluster | E-74-like factor 5 (ets |
| | | | | Ets | domain transcription |
| | | | | | factor) |
| ELK1 | | NM_005229 | 240 | Trp cluster | ELK1, member of ETS |
| | | | | Ets | oncogene family |
| ELK3 | | NM_005230 | 241 | Trp cluster | ELK3, ETS-domain |
| | | | | Ets | protein (SRF accessory |
| | | | | | protein 2) |
| ELK4 | | NM_021795 | 242 | Trp cluster | ELK4, ETS-domain |
| | | | | Ets | protein (SRF accessory |
| | | | | | protein 1) |
| EME2 | NT_010552:331 | AK074080 | 243 | ZnF- | essential meiotic |
| | | | | BTB/POZ | endonuclease I homolog 2 |
| | | | | | (S. pombe) |
| EMX1 | | X68879 | 244 | Homeobox | empty spiracles homolog 1 |
| | | | | | (Drosophila) |
| EMX2 | | NM_004098 | 245 | Homeobox | empty spiracles homolog 2 |
| | | | | | (Drosophila) |
| EN1 | | NM_001426 | 246 | Homeobox | engrailed homolog 1 |
| EN2 | | NM_001427 | 247 | Homeobox | engrailed homolog 2 |
| EC1 | NT_oo6713:275 | NM_003633 | 248 | ZnF- | ectodermal-neural cortex |
| | | | | BTB/POZ | (with BTB-like domain) |
| ENO1 | | NM_001428 | 249 | Other | enolase 1 |
| EOMES | | NM_005442 | 250 | T-box | Eomesodermin (Xenopus |
| | | | | | laevis) homolog |
| ERCC3 | | NM_000122 | 251 | Other | excision repair cross- |
| | | | | | complementing rodent |
| | | | | | repair deficiency, |
| | | | | | complementation group 3 |
| ERCC6 | | NM_000124 | 252 | Other | excision repair cross- |
| | | | | | complementing rodent |
| | | | | | repair deficiency, |
| | | | | | complementation group 6 |
| ERF | | NM_006494 | 253 | Trp cluster- | Ets2 repressor factor |
| | | | | Ets | |
| ERG | | NM_004449 | 254 | Trp cluster- | v-ets avian |
| | | | | Ets | erythroblastosis virus E26 |
| | | | | | oncogene related |
| ESR1 | | NM_000125 | 255 | NHR | estrogen receptor 1 |
| ESR2 | | NM_001437 | 256 | NHR | estrogen receptor 2 |
| ESRRA | | NM_004451 | 257 | NHR | estrogen-related receptor |
| | | | | | alpha |
| ESRRB | | NM_004452 | 258 | NHR | estrogen-related receptor |
| | | | | | beta |
| ESRRG | | NM_001438 | 259 | NHR | estrogen-related receptor |
| | | | | | gamma |
| ESXIL | NT_01165135 | NM_153448 | 260 | Homeobox | extraembryonic, |
| | | | | | spermatogenesis, |
| | | | | | homeobox 1-like |
| ETR101 | | NM_004907 | 261 | Other | immediate early protein |
| ETS1 | | NM_005238 | 262 | Trp cluster- | v-ets avian |
| | | | | Ets | erythroblastosis virus E26 |
| | | | | | oncogene homolog 1 |
| ETS2 | | NM_005239 | 263 | Trp cluster- | v-ets avian |
| | | | | Ets | erythroblastosis virus E26 |
| | | | | | oncogene homolog 2 |
| ETV1 | | NM_004956 | 264 | Trp cluster- | ets variant gene 1 |
| | | | | Ets | |
| ETV2 | | AF000671 | 265 | Trp cluster- | ets variant gene 2 |
| | | | | Ets | |
| ETV3 | | L16464 | 266 | Trp cluster- | ets variant gene3 |
| | | | | Ets | |
| ETV4 | | NM_001986 | 267 | Trp cluster- | ets variant gene 4 (E1A |
| | | | | Ets | enhancer-binding protein, |
| | | | | | E1AF) |
| ETV5 | | NM_004454 | 268 | Trp cluster- | ets variant gene 5 (ets- |
| | | | | Ets | related molecule) |
| ETV6 | | NM_001987 | 269 | Trp cluster- | ets variant gene 6, TEL |
| | | | | Ets | oncogene |
| EV11 | NT_034563:55 | NM_005241 | 270 | ZnF—C2H2 | ecotropic viral integration |
| | | | | | site 1 |
| EVX1 | | NM_001989 | 271 | Homeobox | eve, even-skipped homeo |
| | | | | | box homolog 1 |
| | | | | | (Drosophila) |
| EVX2 | | M59983 | 272 | Homeobox | eve, even-skipped homeo |
| | | | | | box homolog 2 |
| | | | | | (Drosophila) |
| EYA1 | | NM_000503 | 273 | Other | eyes absent (Drosophila) |
| | | | | | homolog 1 |
| EYA2 | | NM_005204 | 274 | Other | eyes absent (Drosophila) |
| | | | | | homolog 2 |
| FBI1 | | NM_015898 | 275 | ZnF- | short transcripts binding |
| | | | | BTB/POZ | protein; lymphoma related |
| | | | | | factor |
| FEM1A | | AL359589 | 276 | Other | fem-1 homolog a |
| | | | | | (C. elegans) |
| FEZL | | NM_018008 | 277 | ZnF—C2H2 | likely ortholog of mouse |
| | | | | | and zebrafish forebrain |
| | | | | | embryonic zinc finger-like |
| FHL1 | | NM_001449 | 278 | ZnF-Other | four and a half LIM |
| | | | | | domains 1 |
| FHL2 | | NM_001450 | 279 | ZnF-Other | four and a half LIM |
| | | | | | domains 2 |
| FHL5 | | NM_020482 | 280 | Co-activator | four and a half LIM |
| | | | | | domains 5 |
| FHX | | NM_018416 | 281 | Forkhead | FOXJ2 forkhead factor |
| FKHL18 | | AF042831 | 282 | Forkhead | forkhead (Drosophila)-like |
| | | | | | 18 |
| FLI1 | | NM_002017 | 283 | Trp cluster- | friend leukemia virus |
| | | | | Ets | integration 1 |
| FMR2 | | NM_002025 | 284 | AF-4 | fragile X mental |
| | | | | | retardation 2 |
| FOS | | NM_005252 | 285 | bZIP | v-fos FBJ murine |
| | | | | | osteosarcoma viral |
| | | | | | oncogene homolog |
| FOSB | | NM_006732 | 286 | bZIP | FBJ murine osteosarcoma |
| | | | | | viral oncogene homolog B |
| FOSL1 | | NM_005438 | 287 | bZIP | FOS-like antigen 1 |
| FOSL2 | | NM_005253 | 288 | bZIP | FOS-like antigen 2 |
| FOXA1 | | NM_004496 | 289 | Forkhead | forkhead box A1 |
| FOXA2 | | NM_021784 | 290 | Forkhead | forehead box A2 |
| FOXE2 | | NM_012185 | 291 | Forkhead | forkhead box E2 |
| FOXE3 | | NM_012186 | 292 | Forkhead | forkhead box E3 |
| FOXF1 | | NM_001451 | 293 | Forkhead | forkhead box F1 |
| FOXF2 | | NM_001452 | 294 | Forkhead | forkhead box F2 |
| FOXG1B | | NM_005249 | 295 | Forkhead | forkhead box G1B |
| FOXH1 | | NM_003923 | 296 | Forkhead | forkhead box H1 |
| FOXI1 | | NM_012188 | 297 | Forkhead | forkhead box I1 |
| FOXJ1 | | NM_001454 | 298 | Forkhead | forkhead box J1 |
| FOXL1 | | NM_005250 | 299 | Forkhead | forkhead box L1 |
| FOXL2 | | NM_023067 | 300 | Forkhead | forkhead box L2 |
| FOXM1 | | NM_021953 | 301 | Forkhead | forkhead box M1 |
| FOXN4 | NT_009770:26 | AF425596 | 302 | Forkhead | forkhead/winged helix |
| | | | | | transcription factor |
| | | | | | FOXN4 |
| FOXO1A | | NM_002015 | 303 | Forkhead | forkhead box O1A |
| | | | | | (rhabdomyosarcoma) |
| FOXO3A | | NM_001455 | 304 | Forkhead | forkhead box O3A |
| FOXP1 | | AF275309 | 305 | Forkhead | forkhead box P1 |
| FOXP2 | | NM_014491 | 306 | Forkhead | forkhead box P2 |
| FOXP3 | | NM_014009 | 307 | Forkhead | forkhead box P3 |
| FOXP4 | NT_007592:3277 | NM_138457 | 308 | Forkhead | forkhead box P4 |
| FOXQ1 | | NM_033260 | 309 | Forkhead | forkhead box Q1 |
| FREQ | NT_029366:864 | NM_014286 | 310 | Other | frequenin homolog |
| | | | | | (Drosophila) |
| FUBP1 | | NM_003902 | 311 | Other | far upstream element- |
| | | | | | binding protein |
| FUBP3 | NT_008338:25 | BC001325 | 312 | Other | far upstream element |
| | | | | | (FUSE) binding protein 3 |
| GABPA | | NM_002040 | 313 | Trp cluster- | GA-binding protein |
| | | | | Ets | transcription factor, alpha |
| | | | | | subunit (60 kD) |
| GABPB1 | | NM_005254 | 314 | Co-activator | GA-binding protein |
| | | | | | transcription factor, beta |
| | | | | | subunit 1 (53 kD) |
| GABPB2 | | NM_016655 | 315 | Trp cluster- | GA-binding protein |
| | | | | Ets | transcription factor, beta |
| | | | | | subunit 2 (47 kD) |
| GAS41 | | NM_006530 | 316 | Structural | glioma-amplified |
| | | | | | sequence-41 |
| GASC1 | | AB018323 | 317 | ZnF-PHD | gene amplified in |
| | | | | | squamous cell carcinoma 1 |
| GATA1 | | NM_002049 | 318 | ZnF-GATA | GATA-binding protein 1 |
| | | | | | (globin transcription factor |
| | | | | | 1) |
| GATA2 | | NM_002050 | 319 | ZnF-GATA | GATA-binding protein 2 |
| GATA3 | | NM_002051 | 320 | ZnF-GATA | GATA-binding protein 3 |
| GATA4 | | NM_002052 | 321 | ZnF-GATA | GATA-binding protein 4 |
| GATA5 | | NM_080473 | 322 | ZnF-GATA | GATA-binding protein 5 |
| GATA6 | | NM_005257 | 323 | ZnF-GATA | GATA-binding protein 6 |
| GBX1 | | L11239 | 324 | Homeobox | gastrulation brain |
| | | | | | homeobox 1 |
| GBX2 | | NM_001485 | 325 | Homeobox | gastrulation brain |
| | | | | | homeobox 2 |
| GFI1 | | NM_005263 | 326 | ZnF—C2H2 | growth factor independent 1 |
| GFI1B | | NM_004188 | 327 | ZnF—C2H2 | growth factor independent |
| | | | | | 1B (potential regulator of |
| | | | | | CDKN1A, translocated in |
| | | | | | CML) |
| GIOT-1 | | AB021641 | 328 | ZnF—C2H2 | gonadotropin inducible |
| | | | | | transcription repressor 1 |
| GIOT-2 | | NM_016264 | 329 | ZnF—C2H2 | gonadotropin inducible |
| | | | | | transcription repressor-2 |
| GL1 | | NM_005269 | 330 | ZnF—C2H2 | glioma-associated |
| | | | | | oncogene homolog (zinc |
| | | | | | finger protein) |
| GLI2 | | NM_005270 | 331 | ZnF—C2H2 | GLI-Kruppel family |
| | | | | | member GLI2 |
| GLI3 | | NM_000168 | 332 | ZnF—C2H2 | GLI-Kruppel family |
| | | | | | member GLI3 (Greig |
| | | | | | cephalopolysyndactyly |
| | | | | | syndrome) |
| GLI4 | NT_023684:15 | NM_138465 | 333 | ZnF—C2H2 | GLI-Kruppel family |
| | | | | | member GLI4 |
| GLIS2 | | NM_032575 | 334 | ZnF—C2H2 | Kruppel-like zinc finger |
| | | | | | protein GLIS2 |
| GREB1 | NT_005334:553 | NM_014668 | 335 | Co-repressor | GREB1 protein |
| GRLF1 | | NM_004491 | 336 | ZnF-Other | glucocorticoid receptor |
| | | | | | DNA binding factor 1 |
| GSC | | NM_173849.2 | 337 | Homeobox | goosecoid |
| GSCL | | NM_005315 | 338 | Homeobox | goosecoid-like |
| GSH1 | | XM_046853 | 339 | Homeobox | genomic screened homeo |
| | | | | | box 1 homolog (mouse) |
| GSH2 | | NM_133267 | 340 | Homeobox | genomic screened homeo |
| | | | | | box 2 homolog (mouse) |
| GTF2A1 | | NM_015859 | 341 | Other | general transcription factor |
| | | | | | 11A, 1 (37 kD and 19 kD |
| | | | | | subunits) |
| GTF2A2 | | NM_004492 | 342 | Other | general transcription factor |
| | | | | | IIA, 2 (12 kD subunit) |
| GTF2B | | NM_001514 | 343 | Other | general transcription factor |
| | | | | | 11B |
| GTF2E1 | | NM_005513 | 344 | Other | general transcription factor |
| | | | | | IIE, polypeptide 1 (alpha |
| | | | | | subunit, 56 kD) |
| GTF2E2 | | NM_002095 | 345 | Other | general transcription factor |
| | | | | | IIE, polypeptide 2 (beta |
| | | | | | subunit, 34 kD) |
| GTF2F1 | | NM_002096 | 346 | Other | general transcription factor |
| | | | | | IIF, polypeptide I (74 kD |
| | | | | | subunit) |
| GTF2F2 | | NM_004128 | 347 | Other | general transcription factor |
| | | | | | IIF, polypeptide 2 (30 kD |
| | | | | | subunit) |
| GTF2H1 | | NM_005316 | 348 | Other | general transcription factor |
| | | | | | IIH, polypeptide I (62 kD |
| | | | | | subunit) |
| GTF2IRD1 | NT_007758:1220 | NM_005685 | 349 | bHLH | GTF21 repeat domain |
| | | | | | containing 1 |
| GTF2IRD2 | NT_007758:1320 | NM_173537 | 350 | bHLH | transcription factor |
| | | | | | GTF2IRD2 |
| GTF3A | | NM_002097 | 351 | Other | general transcription factor |
| | | | | | IIIA |
| GTF3C1 | | NM_001520 | 352 | Other | general transcription factor |
| | | | | | IIIC, polypeptide 1 (alpha |
| | | | | | subunit, 220 kD) |
| GTF3C2 | | NM_001521 | 353 | Other | general transcription factor |
| | | | | | IIIC, polypeptide 2 (beta |
| | | | | | subunit, 110 kD) |
| GTF3C3 | | NM_012086 | 354 | Other | general transcription factor |
| | | | | | IIIC, polypeptide 3 |
| | | | | | (102 kD) |
| GTF3C4 | | NM_012204 | 355 | Other | general transcription factor |
| | | | | | IIIC, polypeptide 4 (90 kD) |
| GTF3C5 | | NM_012087 | 356 | Other | general transcription factor |
| | | | | | IIIC, polypeptide 5 (63 kD) |
| HAND1 | | NM_004821 | 357 | bHLH | heart and neural crest |
| | | | | | derivatives expressed 1 |
| HAND2 | | NM_021973 | 358 | bHLH | basic helix-loop-helix |
| | | | | | transcription factor |
| | | | | | HAND2 |
| HATH6 | NT_015805:94 | NM_032827 | 359 | bHLH | basic helix-loop-helix |
| | | | | | transcription factor 6 |
| HBOA | | NM_007067 | 360 | Co-activator | histone acetyltransferase |
| HCF2 | | NM_013320 | 361 | Other | host cell factor 2 |
| HCNGP | | NM_013260 | 362 | Other | transcriptional regulator |
| | | | | | protein |
| HDAC1 | | NM_004964 | 363 | Co-repressor | histone deacetylase 1 |
| HDAC2 | | NM_001527 | 364 | Co-repressor | histone deacetylase 2 |
| HDAC4 | | NM_006037 | 365 | Co-repressor | histone deacetylase 4 |
| HDAC8 | NT-011594:18 | NM_018486 | 366 | Structural | histone deacetylase 8 |
| HES2 | | NM_019089 | 367 | bHLH | hairy and enhancer of split |
| | | | | | 2 (Drosophila) |
| HES5 | | BQ924744 | 368 | bHLH | hairy and enhancer of split |
| | | | | | 5 (Drosophila) |
| HES6 | | NM_018645 | 369 | bHLH | hairy and enhancer of split |
| | | | | | 6 (Drosophila) |
| HES7 | | NM_032580 | 370 | bHLH | hairy and enhancer of split |
| | | | | | 7 (Drosophila) |
| HESX1 | | NM_003865 | 371 | Homeobox | homeobox (expressed in |
| | | | | | ES cells) 1 |
| HEY1 | | NM_012258 | 372 | bHLH | hairy/enhancer-of-split |
| | | | | | related with YRPW motif |
| | | | | | 1 (‘YRPW’ disclosed as |
| | | | | | SEQ ID NO: 1482) |
| HEY2 | | NM_012259 | 373 | bHLH | hairy/enhancer-of-split |
| | | | | | related with YRPW motif |
| | | | | | 2 (‘YRPW’ disclosed as |
| | | | | | SEQ ID NO: 1482) |
| HEYL | | NM_014571 | 374 | bHLH | hairy/enhancer-of-split |
| | | | | | related with YRPW motif- |
| | | | | | life (‘YRPW’ disclosed as |
| | | | | | SEQ ID NO: 1482) |
| HHEX | | NM_002729 | 375 | Homeobox | hematopoietically |
| | | | | | expressed homeobox |
| cutoff | | | | | |
| HIVEP1 | | NM_002114 | 376 | ZnF—C2H2 | human immunodeficiency |
| | | | | | virus type I enhancer- |
| | | | | | binding protein 1 |
| HIVEP2 | | NM_006734 | 377 | ZnF—C2H2 | human immunodeficiency |
| | | | | | virus type I enhancer- |
| | | | | | binding protein 2 |
| HIVEP3 | NT_004852:421 | NM_024503 | 378 | ZnF—C2H2 | human immunodeficiency |
| | | | | | virus type 1 enhancer |
| | | | | | binding protein 3 |
| HKR1 | | BC004513 | 379 | ZnF—C2H2 | GLI-Kruppel family |
| | | | | | member HKR1 |
| HKR2 | | M20676 | 380 | ZnF—C2H2 | GL1-Kruppel family |
| | | | | | member HKR2 |
| HKR3 | | NM_005341 | 381 | ZnF- | GLI-Kruppel family |
| | | | | BTB/POZ | member HKR3 |
| HLF | | NM_002126 | 382 | bZIP | hepatic leukemia factor |
| HLX1 | | NM_021958 | 383 | Homeobox | H2.0 (Drosophila)-like |
| | | | | | homeo box 1 |
| HLXB9 | | NM_005515 | 384 | Homeobox | homeo box HB9 |
| HMG20A | NT_024654:319 | NM_018200 | 385 | Structural | high-mobility group 20A |
| HMG20B | | NM_006339 | 386 | Structural | high-mobility group 20B |
| HMGA1 | | NM_002131 | 387 | Beta-scaffold- | high mobility group AT- |
| | | | | HMG | hook 1 |
| HMGA2 | | NM_003483 | 388 | Beta-scaffold- | high mobility group AT- |
| | | | | HMG | hook 2 |
| HMGB1 | | NM_002128 | 389 | Structural | high-mobility group box 1 |
| HMGB2 | | NM_002129 | 390 | Structural | high-mobility group box 2 |
| HMGB3 | NT_011602:55 | NM_005342 | 391 | Structural | high-mobility group box 3 |
| HMGN2 | | NM_005517 | 392 | Structural | high-mobility group |
| | | | | | nucleosomal binding |
| | | | | | domain 2 |
| HMX1 | | NM_018942 | 393 | Homeobox | homeo box (H6 family) 1 |
| HMX2 | | NM_005519.1 | 394 | Homeobox | homeo box (H6 family) 2 |
| HMX3 | | XM_114950 | 395 | Homeobox | homeo box (H6 family) 3 |
| HNF4A | | NM_000457 | 396 | NHR | hepatocyte nuclear factor |
| | | | | | 4, alpha |
| HNF4G | | NM_004133 | 397 | NHR | hepatocyte nuclear factor |
| | | | | | 4, gamma |
| HOP | | NM_032495 | 398 | Homeobox | homeodomain-only |
| | | | | | Protein |
| HOXA1 | | NM_005522 | 399 | Homeobox | homeobox A1 |
| HOXA10 | | NM_018951 | 400 | Homeobox | homeobox A10 |
| HOXA11 | | NM_005523 | 401 | Homeobox | homeobox A11 |
| HOXA13 | | NM_000522 | 402 | Homeobox | homeobox A13 |
| HOXA2 | | NM_006735 | 403 | Homeobox | homeobox A2 |
| HOXA3 | | NM_030661 | 404 | Homeobox | homeobox A3 |
| HOXA4 | | NM_002141 | 405 | Homeobox | homeobox A4 |
| HOXA5 | | NM_019102 | 406 | Homeobox | homeobox A5 |
| HOXB9 | | NM_024017 | 407 | Homeobox | homeobox B9 |
| HOXC10 | | NM_017409 | 408 | Homeobox | homeobox C10 |
| HOXC11 | | NM_014212 | 409 | Homeobox | homeobox C11 |
| HOXC12 | | X99631 | 410 | Homeobox | homeoboxC12 |
| HOXC13 | | NM_017410 | 411 | Homeobox | homeoboxC13 |
| HOXC4 | | NM_014620 | 412 | Homeobox | homeoboxC4 |
| HOXC5 | | NM_018953 | 413 | Homeobox | homeobox C5 |
| HOXC6 | | NM_004503 | 414 | Homeobox | homeobox C6 |
| HOXC8 | | NM_022658 | 415 | Homeobox | homeobox C8 |
| HOXC9 | | NM_006897 | 416 | Homeobox | homeobox C9 |
| HOXD1 | | NM_024501 | 417 | Homeobox | homeobox D1 |
| HOXD10 | | NM_002148 | 418 | Homeobox | homeobox D10 |
| HOXD11 | | NM_021192 | 419 | Homeobox | homeobox D11 |
| HOXD12 | | NM_021193 | 420 | Homeobox | homeobox D12 |
| HOXD13 | | NM_000523 | 421 | Homeobox | homeobox D13 |
| HOXD3 | | NM_006898 | 422 | Homeobox | homeobox D3 |
| HOXD4 | | NM_014621 | 423 | Homeobox | homeobox D4 |
| HOXD8 | | NM_019558 | 424 | Homeobox | homeobox D8 |
| HOXD9 | | NM_014213 | 425 | Homeobox | homeobox D9 |
| HPCA | NT_00451193 | NM_002143 | 426 | Other | hippocalcin |
| HPCAL1 | NT_005334:412 | NM_002149 | 427 | Other | hippocalcin-like 1 |
| H-plk | | NM_015852 | 428 | ZnF—C2H2 | Krueppel-related zinc |
| | | | | | finger protein |
| HR | | AF039196 | 429 | Jumonji | hairless |
| HRIHFB2122 | | NM_007032 | 430 | Other | Tara-like protein |
| | | | | | (Drosophila) |
| HRY | | NM_005524 | 431 | bHLH | hairy (Drosophila)- |
| | | | | | homolog |
| HS747E2A | | NM_015370 | 432 | Other | hypothetical protein |
| | | | | | (RING domain) |
| HSA275986 | | NM_018403 | 433 | Other | transcription factor SMIF |
| HSAJ2425 | | NM_017532 | 434 | NHR | p65 protein |
| HSF1 | | NM_005526 | 435 | Heat shock | Heat shock transcription |
| | | | | | factor 1 |
| HSF2 | | NM_004506 | 436 | Heat shock | Heat shock transcription |
| | | | | | factor 2 |
| HSF2BP | | NM_007031 | 437 | Co-activator | Heat shock transcription |
| | | | | | factor 2 binding protein |
| HSF4 | | NM_001538 | 438 | Heat shock | Heat shock transcription |
| | | | | | factor 4 |
| HSFY | | NM_033108 | 439 | Heat shock | Heat shock transcription |
| | | | | | factor, Y-linked |
| HSGT1 | | NM_007265 | 440 | Other | suppressor of S. cerevisiae |
| | | | | | gcr2 |
| HSHPX5 | | X74862 | 441 | Other | HPX-5 |
| HSPC018 | | NM_014027 | 442 | Other | HSPC018 protein |
| HSPC059 | NT_011233:37 | NM_016536 | 443 | ZnF—C2H2 | HSPC059 protein |
| HSPC063 | NT_033899:972 | NM_014155 | 444 | ZnF—C2H2 | HSPC063 protein |
| HSPC189 | | NM_016535 | 445 | Other | HSPC189 protein |
| HSPX153 | | X76978 | 446 | Homeobox | HPX-153 homeobox |
| HSRNAFEV | NT_005403:123 | NM_017521 | 447 | Trp Cluster- | FEV protein |
| | | | | Ets | |
| HSU79252 | | NM_013298 | 448 | Other | hypothetical protein |
| ID1 | | NM_002165 | 449 | bHLH | inhibitor of DNA binding |
| | | | | | 1, negative helix-loop- |
| | | | | | helix protein |
| ID2 | | NM_002166 | 450 | bHLH | inhibitor of DNA binding |
| | | | | | 2, dominant negative |
| | | | | | helix-loop-helix protein |
| ID2B | NT_005999:169 | M96843 | 451 | bHLH | inhibitor of DNA binding |
| | | | | | 2B, dominant negative |
| | | | | | helix-loop-helix protein |
| ID3 | | NM_002167 | 452 | bHLH | inhibitor of DNA binding |
| | | | | | 3, dominant negative |
| | | | | | helix-loop-helix protein |
| ID4 | | NM_001546 | 453 | bHLH | inhibitor of DNA binding |
| | | | | | 4, dominant negative |
| | | | | | helix-loop-helix protein |
| IGHMBP2 | | NM_002180 | 454 | ZnF-AN1 | immunoglobulin mu |
| | | | | | binding protein 2 |
| ILF1 | | NM_004514 | 455 | Forkhead | interleukin in enhancer |
| | | | | | binding factor 1 |
| ILF2 | | NM_004515 | 456 | ZnF—C2H2 | interleukin enhancer |
| | | | | | binding factor 2, 45 kDa |
| ILF3 | | NM_012218 | 457 | ZnF—C2H2 | interleukin enhancer |
| | | | | | binding factor, 3, 90 kDa |
| INSM1 | | NM_002196 | 458 | ZnF—C2H2 | insulinoma-associated 1 |
| INSM2 | | NM_032594 | 459 | ZnF—C2H2 | insulinoma-associated |
| | | | | | protein 1A-6 |
| IPF1 | | NM_000209 | 460 | Homeobox | insulin promoter factor 1, |
| | | | | | homeodomain |
| | | | | | transcription factor |
| IRF1 | | NM_002198 | 461 | Trp cluster- | interferon regulatory |
| | | | | IRF | factor 1 |
| IRF2 | | NM_002199 | 462 | Trp cluster- | interferon regulatory |
| | | | | IRF | factor 2 |
| IRF3 | | NM_001571 | 463 | Trp cluster- | interferon regulatory |
| | | | | IRF | factor 3 |
| IRF4 | | NM_002460 | 464 | Trp cluster- | interferon regulatory |
| | | | | IRF | factor 4 |
| IRF5 | | NM_002200 | 465 | Trp cluster- | interferon regulatory |
| | | | | IRF | factor 5 |
| IRF6 | | NM_006147 | 466 | Trp cluster- | interferon regulatory |
| | | | | IRF | factor 6 |
| IRF7 | | NM_001572 | 467 | Trp cluster- | interferon regulatory |
| | | | | IRF | factor 7 |
| IRLB | | X63417 | 468 | Other | c-myc promoter-binding |
| | | | | | protein |
| IRX1 | | U90307 | 469 | Homeobox | iroquois homeobox protein 1 |
| IRX2 | | AF319967 | 470 | Homeobox | iroquois homeobox protein 2 |
| IRX3 | | U90308 | 471 | Homeobox | iroquois homeobox protein 3 |
| IRX4 | | NM_016358 | 472 | Homeobox | Iroquois homeobox |
| | | | | | protein 4 |
| IRX5 | | NM_005853 | 473 | Homeobox | Iroquois homeobox |
| | | | | | protein 5 |
| IRX6 | | U90305 | 474 | Homeobox | Iroquois homeobox |
| | | | | | protein 6 |
| JARID1A | NT_009759:29 | NM_005056 | 475 | Jumonji | Jumonji, AT rich |
| | | | | | interactive domain 1A |
| | | | | | (RBP2-like) |
| JARID1B | NT_034408:191 | NM_006618 | 476 | Jumonji | Jumonji, AT rich |
| | | | | | interactive domain 1B |
| | | | | | (RBP2-like) |
| JARID1D | NT_011875:152 | NM_004653 | 477 | Jumonji | Jumonji, AT rich |
| | | | | | interactive domain 1D |
| | | | | | (RBP2-like) |
| JDP2 | NT_026437:1173 | NM_130469 | 478 | bZIP | jun dimerization protein 2 |
| JMJ | | NM_004973 | 479 | Jumonji | jumonji homolog (mouse) |
| JMJD1 | NT_015805:184 | NM_018433 | 480 | Jumonji | jumonji domain containing 1 |
| JMJD2 | NT_032971:21 | BC002558 | 481 | Jumonji | jumonji domain containing 2 |
| JMJD2B | NT_011255:298 | AK026040 | 482 | Jumonji | jumonji domain- |
| | | | | | containing 2B |
| JUN | | NM_002228 | 483 | bZIP | v-jun avan sarcoma virus |
| | | | | | 17 oncogene homolog |
| JUNB | | NM_002229 | 484 | bZIP | Jun B proto-oncogene |
| JUND | | NM_005354 | 485 | bZIP | Jun D proto-oncogene |
| KBTBD10 | NT_005332:189 | NM_006063 | 486 | ZnF- | kelch repeat and BTB |
| | | | | BTB/POZ | (POZ) domain containing |
| | | | | | 10 |
| KBTBD5 | NT_005825:210 | NM_152393 | 487 | ZnF- | kelch repeat and BTB |
| | | | | BTB/POZ | (POZ) domain containing 5 |
| KBTBD7 | NT_009984:758 | NM_032138 | 488 | ZnF- | kelch repeat and BTB |
| | | | | BTB/POZ | (POZ) domain containing 7 |
| KCNIP1 | NT_023132:191 | NM_014592 | 489 | Other | Kv channel interacting |
| | | | | | protein 1 |
| KCNIP2 | NT_030059:932 | NM_014591 | 490 | Other | Kv channel interacting |
| | | | | | protein 2 |
| KCNIP4 | NT_006344:469 | NM_025221 | 491 | Other | Kv channel interacting |
| | | | | | protein 4 |
| KEAP1 | | NM_012289 | 492 | Other | Kelch-like ECH- |
| | | | | | associated protein 1 |
| KLF1 | | NM_006563 | 493 | ZnF—C2H2 | Kruppel-like factor 1 |
| | | | | | (erythroid) |
| KLF12 | | NM_007249 | 494 | ZnF—C2H2 | Kruppel-like factor 12 |
| KLF13 | | NM_015995 | 495 | ZnF—C2H2 | Kruppel-like factor 13 |
| KLF14 | | NM_138693 | 496 | ZnF—C2H2 | Kruppel-like factor 14 |
| KLF15 | | NM_014079 | 497 | ZnF—C2H2 | Kruppel-like factor 15 |
| KLF16 | | NM_031918 | 498 | ZnF—C2H2 | Kruppel-like factor 16 |
| KLF2 | | NM_016270 | 499 | ZnF—C2H2 | Kruppel-like factor 2 |
| | | | | | (lung) |
| KLF3 | | NM_016531 | 500 | ZnF—C2H2 | Kruppel-like factor 3 |
| | | | | | (basic) |
| KLF4 | | NM_004235 | 501 | ZnF—C2H2 | Kruppel-like factor 4 (gut) |
| KLF5 | | NM_001730 | 502 | ZnF—C2H2 | Kruppel-like factor 5 |
| | | | | | (intestinal) |
| KLF7 | | NM_003709 | 503 | ZnF—C2H2 | Kruppel-like factor 7 |
| | | | | | (ubiquitous) |
| KLF8 | | NM_007250 | 504 | ZnF—C2H2 | Kruppel-like factor 8 |
| KLHL1 | NT_024524:413 | NM_020866 | 505 | ZnF- | kelch-like 1 (Drosophila) |
| | | | | BTB/POZ | |
| KLHL3 | NT_016714:116 | NM_017415 | 506 | ZnF- | kelch-like 3 (Drosophila) |
| | | | | BTB/POZ | |
| KLHL4 | NT_011689:82 | NM_019117 | 507 | ZnF- | kelch-like 4 (Drosophila) |
| | | | | BTB/POZ | |
| KLHL5 | | NM_015990 | 508 | ZnF- | kelch-like 5 (Drosophila) |
| | | | | BTB/POZ | |
| KLHL6 | NT_022676:150 | NM_130446 | 509 | ZnF- | kelch-like 6 (Drosophila) |
| | | | | BTB/POZ | |
| KLHL8 | NT_006204:183 | NM_020803 | 510 | ZnF- | kelch-like 8 |
| | | | | BTB/POZ | |
| LDB1 | | NM_003893 | 511 | Co-activator | LIM domain binding 1 |
| LDB2 | | NM_001290 | 512 | Co-activator | LIM domain binding 2 |
| LDOC1 | | NM_012317 | 513 | bZIP | leucine zipper, down- |
| | | | | | regulated in cancer 1 |
| LEF1 | | NM_016269 | 514 | Beta-scaffold- | lymphoid enhancer factor 1 |
| | | | | HMG | |
| LHX1 | | NM_005568 | 515 | Homeobox | LIM homeobox protein 1 |
| LHX2 | | NM_004789 | 516 | Homeobox | LIM homeobox protein 2 |
| LHX3 | | NM_014564 | 517 | Homeobox | LIM homeobox protein 3 |
| LHX4 | | NM_033343 | 518 | Homeobox | LIM homeobox protein 4 |
| LHX5 | | NM_022363 | 519 | Homeobox | LIM homeobox protein 5 |
| LHX6 | | NM_014368 | 520 | Homeobox | LIM homeobox protein 6 |
| LHX8 | | AB050476 | 521 | Homeobox | LIM homeobox protein 8 |
| LHX9 | | AJ277915 | 522 | Homeobox | LIM homeobox protein 9 |
| LIM | | NM_006457 | 523 | Co-activator | LIM protein (similar to rat |
| | | | | | protein kinase C-binding |
| | | | | | enigma) |
| LIN28 | | NM_024674 | 524 | Beta-scaffold- | RNA-binding protein LIN- |
| | | | | cold-shock | 28 |
| LISCH7 | | NM_015925 | 525 | bHLH | liver-specific bHLH-Zip |
| | | | | | transcription factor |
| LMO1 | | NM_002315 | 526 | ZnF-Other | LIM domain only 1 |
| | | | | | (rhombotin 1) |
| LMO2 | | NM_005574 | 527 | ZnF-Other | LIM domain only 2 |
| | | | | | (rhombotin-like 1) |
| LMO4 | | NM_006769 | 528 | ZnF-Other | LIM domain only 4 |
| LMO6 | | NM_006150 | 529 | ZnF-Other | LIM domain only 6 |
| LMO7 | | NM_005358 | 530 | ZnF-Other | LIM domain only 7 |
| LMX1A | | AY078398 | 531 | Homeobox | LIM homeobox |
| | | | | | transcription factor 1, |
| | | | | | alpha |
| LMX1B | | NM_002316 | 532 | Homeobox | LIM homeobox |
| | | | | | transcription factor 1, beta |
| LOC113655 | | BC011982 | 533 | Other | hypothetical protein |
| | | | | | BC011982 |
| LOC115468 | NT_035560:126a | NM_145326 | 534 | ZnF—C2H2 | similar to hypothetical |
| | | | | | protein FLJ13659 |
| LOC115509 | NT_024802:36 | NM_138447 | 535 | ZnF—C2H2 | hypothetical protein |
| | | | | | BC014000 |
| LOC115950 | NT_011176:403 | NM_138783 | 536 | ZnF—C2H2 | hypothetical protein |
| | | | | | BC016816 |
| LOC126295 | NT_011255:1 | NM_173480 | 537 | ZnF—C2H2 | hypothetical protein |
| | | | | | LOC126295 |
| LOC146542 | NT_024802:32a | NM_145271 | 538 | ZnF—C2H2 | similar to hypothetical |
| | | | | | protein MGC13138 |
| LOC148213 | NT_033317:111 | NM_138286 | 539 | ZnF—C2H2 | hypothetical protein |
| | | | | | FLJ31526 |
| LOC151162 | | AF055029 | 540 | Other | hypothetical protein |
| | | | | | LOC151162 |
| LOC283248 | NT_033241:294 | NM_173587 | 541 | Trp Cluster- | hypothetical protein |
| | | | | Myb | LOC283248 |
| LOC284346 | NT_011109:18 | NM_174945 | 542 | ZnF—C2H2 | hypothetical protein |
| | | | | | LOC284346 |
| LOC285346 | NT_034534:55 | BC014381 | 543 | Methyl-CpG- | hypothetical protein |
| | | | | binding | LOC285346 |
| LOC286103 | NT_031818:174 | NM_178535 | 544 | ZnF—C2H2 | hypothetical protein |
| | | | | | LOC286103 |
| LOC51036 | | NM_015854 | 545 | Other | retinoic acid receptor-beta |
| | | | | | associated open reading |
| | | | | | frame |
| LOC51042 | | NM_015871 | 546 | ZnF—C2H2 | zinc finger protein |
| LOC51045 | | NM_015877 | 547 | ZnF—C2H2 | Kruppel-associated box |
| | | | | | protein |
| LOC51058 | | NM_015911 | 548 | ZnF—C2H2 | hypothetical protein |
| LOC51123 | | NM_016096 | 549 | ZnF—C2H2 | HSPC038 protein |
| LOC51186 | | NM_016303 | 550 | Other | pp21 homolog |
| LOC51193 | | NM_016331 | 551 | ZnF—C2H2 | zinc finger protein |
| | | | | | ANC_2H01 |
| LOC51270 | | NM_016521 | 552 | E2F | E2F-like protein |
| LOC51290 | | NM_016570 | 553 | Other | CDA14 |
| LOC51333 | NT_024802:6 | NM_016643 | 554 | ZnF—C2H2 | mesenchymal stem cell |
| | | | | | protein DSC43 |
| LOC55893 | | NM_018660 | 555 | ZnF—C2H2 | papillomavirus regulatory |
| | | | | | factor PRF-1 |
| LOC56270 | | NM_019613 | 556 | Other | hypothetical protein 628 |
| LOC56930 | | AL365410 | 557 | Other | hypothetical protein from |
| | | | | | EUROIMAGE 1669387 |
| LOC57209 | | AJ245587 | 558 | ZnF—C2H2 | Kruppel-type zinc finger |
| | | | | | protein |
| LOC57801 | | NM_021170 | 559 | bHLH | hairy and enhancer of split |
| | | | | | 4 (Drosophila) |
| LOC58500 | | X16282 | 560 | ZnF—C2H2 | zinc finger protein (clone |
| | | | | | 647) |
| LOC65243 | | NM_023070 | 561 | ZnF—C2H2 | hypothetical protein |
| LOC86614 | | NM_033108 | 562 | Heat shock | Heat shock transcription |
| | | | | | factor 2-like |
| LOC90322 | | AK001357 | 563 | ZnF—C2H2 | similar to KRAB zinc |
| | | | | | finger protein KR18 |
| LOC90462 | | AK027873 | 564 | ZnF—C2H2 | similar to Zinc finger |
| | | | | | protein 84 (Zinc finger |
| | | | | | protein HPF2) |
| LOC90589 | NT_011176:506 | NM_145233 | 565 | bZIP | similar to Zinc finger |
| | | | | | protein 20 (Zinc finger |
| | | | | | protein KOX13) |
| LOC90987 | | AK000435 | 566 | ZnF—C2H2 | similar to ZINC FINGER |
| | | | | | PROTEIN 184 |
| LOC91120 | | NM_033196 | 567 | ZnF—C2H2 | similar to ZINC FINGER |
| | | | | | PROTEIN 85 (ZINC |
| | | | | | FINGER PROTEIN |
| | | | | | HPF4) (HTF1) (H. sapiens) |
| LOC91464 | NT_011520:1976 | AK025181 | 568 | Homeobox | hypothetical protein |
| | | | | | LOC91464 |
| LOC91614 | | AJ245600 | 569 | Other | novel 58.3 KDA protein |
| M96 | | NM_007358 | 570 | ZnF-PHD | likely ortholog of mouse |
| | | | | | metal response element |
| | | | | | binding transcription |
| | | | | | factor 2 |
| MAD | | NM_002357 | 571 | bHLH | MAX dimerization protein 1 |
| MADH1 | | NM_005900 | 572 | Dwarfin | MAD, mothers against |
| | | | | | decapentaplegic homolog |
| | | | | | 1 (Drosophila) |
| MADH2 | | NM_005901 | 573 | Dwarfin | MAD, mothers against |
| | | | | | decapentaplegic homolog |
| | | | | | 2 (Drosophila) |
| MADH3 | | NM_005902 | 574 | Dwarfin | MAD, mothers against |
| | | | | | decapentaplegic homolog |
| | | | | | 3 (Drosophila) |
| MADH4 | | NM_005359 | 575 | Dwarfin | MAD, mothers against |
| | | | | | decapentaplegic homolog |
| | | | | | 4 (Drosophila) |
| MADH5 | | NM_005903 | 576 | Dwarfin | MAD, mothers against |
| | | | | | decapentaplegic homolog |
| | | | | | 5 (Drosophila) |
| MADH6 | | NM_005585 | 577 | Dwarfin | MAD, mothers against |
| | | | | | decapentaplegic homolog |
| | | | | | 6 (Drosophila) |
| MADH7 | | NM_005904 | 578 | Dwarfin | Mad, mothers against |
| | | | | | decapentaplegic homolog |
| | | | | | 7 (Drosophila) |
| MADH9 | | NM-005905 | 579 | Dwarfin | MAD, mothers against |
| | | | | | decapentaplegic homolog |
| | | | | | 9 (Drosophila) |
| MAF | | NM_005360 | 580 | bZIP | v-maf musculoaponeurotic |
| | | | | | fibrosarcoma oncogene |
| | | | | | homolog (avian) |
| MAFB | | NM_005461 | 581 | bZIP | v-maf musculoaponeurotic |
| | | | | | fibrosarcoma oncogene |
| | | | | | homolog B (avian) |
| MAFF | | NM_012323 | 582 | bZIP | v-maf musculoaponeurotic |
| | | | | | fibrosarcoma oncogene |
| | | | | | family, protein F (avian) |
| MAFG | | NM_002359 | 583 | bZIP | v-maf musculoaponeurotic |
| | | | | | fibrosarcoma oncogene |
| | | | | | family, protein G (avian) |
| | | | | | v-maf musculoaponeurotic |
| MBD4 | | NM_003925 | 584 | Methyl-CpG- | methyl-CpG binding |
| | | | | binding | domain protein 4 |
| MBNL2 | | NM_005757 | 585 | ZnF—C3H | muscleblind-like 2 |
| | | | | | (Drosophila) |
| MDS032 | | NM_018467 | 586 | Other | uncharacterized |
| | | | | | hematopoietic |
| | | | | | stem/progenitor cells |
| | | | | | protein MDS032 |
| MDS1 | | NM_004991 | 587 | Other | myelodysplasia syndrome 1 |
| MECP2 | | NM_004992 | 588 | Methyl-CpG- | methyl CpG binding |
| | | | | binding | protein 2 (Rett syndrome) |
| MED6 | | NM_005466 | 589 | Co-activator | mediator of RNA |
| | | | | | polymerase II |
| | | | | | transcription, subunit 6 |
| | | | | | homolog (yeast) |
| MEF2A | | NM_005587 | 590 | Beta-scaffold- | MADS box transcription |
| | | | | MADS | enhancer factor 2, |
| | | | | | polypeptide A (myocyte |
| | | | | | enhancer factor 2A) |
| MEF2B | | NM_005919 | 591 | Beta-scaffold- | MADS box transcription |
| | | | | MADS | enhancer factor 2, |
| | | | | | polypeptide B (myocyte |
| | | | | | enhancer factor 2B) |
| MEF2C | | NM_002397 | 592 | Beta-scaffold- | MADS box transcription |
| | | | | MADS | enhancer factor 2, |
| | | | | | polypeptide C (myocyte |
| | | | | | enhancer factor 2C) |
| MEF2D | | NM_005920 | 593 | Beta-scaffold- | MADS box transcription |
| | | | | MADS | enhancer factor 2, |
| | | | | | polypeptide D (myocyte |
| | | | | | enhancer factor 2D) |
| MEFV | | NM_000243 | 594 | Co-activator | Mediterranean fever |
| | | | | | (pyrin) |
| MEIS1 | | NM_002398 | 595 | Homeobox | Meis1, myeloid ecotropic |
| | | | | | viral integration site 1 |
| | | | | | homolog (mouse) |
| MEIS2 | | NM_020149 | 596 | Homeobox | Meis1, myeloid ecotropic |
| | | | | | viral integration site 1 |
| | | | | | homolog 2 (mouse) |
| MEIS3 | | U68385 | 597 | Homeobox | Meis1, myeloid ecotropic |
| | | | | | viral integration site 1 |
| | | | | | homolog 3 (mouse) |
| MEOX1 | | NM_004527 | 598 | Homeobox | mesenchyme homeobox 1 |
| MEOX2 | | NM_005924 | 599 | Homeobox | mesenchyme homeobox 2 |
| | | | | | (growth arrest-specific |
| | | | | | homeo box) |
| MESP1 | NT_033276:146 | NM_018670 | 600 | bHLH | mesoderm posterior 1 |
| MESP2 | | AL360139 | 601 | bHLH | mesoderm posterior 2 |
| METTL3 | | NM_019852 | 602 | Other | methyltransferase like 3 |
| MGA | | AB011090 | 603 | bHLH | MAX gene associated |
| MHC2TA | | NM_000246 | 604 | Other | MHC class II |
| | | | | | transactivator |
| MID1 | | NM_000381 | 605 | Structural | midline 1 (Opitz/BBB |
| | | | | | syndrome) |
| MID2 | NT_011651:146 | NM_012216 | 606 | Structural | midline 2 |
| MI-ER1 | | NM_020948 | 607 | Other | mesoderm induction early |
| | | | | | response 1 |
| MILD1 | | NM_031944 | 608 | Homeobox | Mix1 homeobox-like 1 |
| | | | | | (Xenopus laevis) |
| MITF | | NM_000248 | 609 | bHLH | microphthalmia-associated |
| | | | | | transcription factor |
| MLLT1 | | NM_005934 | 610 | AF-4 | myeloid/lymphoid or |
| | | | | | mixed-lineage leukemia |
| | | | | | (thrithorax (Drosophila) |
| | | | | | homolog); translocated to, 1 |
| MLLT10 | | NM_004641 | 611 | ZnF-PHD | myeloid/lymphoid or |
| | | | | | mixed-lineage keukemia |
| | | | | | (trithorax (Drosophila) |
| | | | | | homolog); translocated to |
| | | | | | 10 |
| MLLT2 | | NM_005935 | 612 | AF-4 | myeloid/lymphoid or |
| | | | | | mixed-lineage leukemia |
| | | | | | (trithorax (Drosophila) |
| | | | | | homolog); translocated to 2 |
| MLLT3 | | NM_004529 | 613 | AF-4 | myleloid/lymphoid or |
| | | | | | mixed-lineage leukemia |
| | | | | | (trithorax (Drosophila) |
| | | | | | homolog); translocated to 3 |
| MLLT4 | | NM_005936 | 614 | Structural | myeloid/lymphoid or |
| | | | | | mixed-lineage leukemia |
| | | | | | (trithorax (Drosophila) |
| | | | | | homolog); translocated to 4 |
| MLLT6 | | NM_005937 | 615 | ZnF-PHD | myeloid/lymphoid or |
| | | | | | mixed-lineage leukemia |
| | | | | | (trithorax (Drosophila) |
| | | | | | homolog); translocated to 6 |
| MLLT7 | | NM_005938 | 616 | Forkhead | myeloid/lymphoid or |
| | | | | | mixed-lineage leukemia |
| | | | | | (trithorax (Drosophila) |
| | | | | | homolog); translocated to, 7 |
| MNAT1 | | NM_002431 | 617 | ZnF-Other | menage a trois 1 (CAK |
| | | | | | assembly factor) |
| MNDA | | NM_002432 | 618 | Other | myeloid cell nuclear |
| | | | | | differentiation antigen |
| MNT | | NM_020310 | 619 | bHLH | MAX binding protein |
| MONDOA | | NM_014938 | 620 | bHLH | Mix interactor |
| MORF | | NM_012330 | 621 | ZnF-PHD | monocytic leukemia zinc |
| | | | | | finger protein-related facto |
| MORF4 | | NM_006792 | 622 | Structural | mortality factor 4 |
| MORF4L1 | | NM_006791 | 623 | Structural | mortality factor 4 like 1 |
| MORF4L2 | | NM_012286 | 624 | Structural | mortality factor 4 like 2 |
| MRF-1 | | BC032488 | 625 | Structural | modulator recognition |
| | | | | | factor 1 |
| MRF2 | | BC015120 | 626 | Structural | modulator recognition |
| | | | | | factor 2 |
| MRG2 | | AL359938 | 627 | Homeobox | likely ortholog of mouse |
| | | | | | myeloid ecotropic viral |
| | | | | | integration site-related |
| | | | | | gene 2 |
| MTF1 | | NM_005955 | 628 | ZnF—C2H2 | [cut off] transcription |
| | | | | | factor 1 |
| MXD3 | | NM_031300 | 629 | bHLH | MAX dimerization protein 3 |
| MXD4 | | NM_006454 | 630 | bHLH | MAX dimerization protein 4 |
| MXI1 | | NM_005962 | 631 | bHLH | MAX interacting protein 1 |
| MYB | | NM_005375 | 632 | Trp cluster- | v-myb myeloblastosis |
| | | | | Myb. | viral oncogene homolog |
| | | | | | (avian) |
| MYBBP1A | | NM_014520 | 633 | Co-repressor | MYB binding protein |
| | | | | | (P160) 1a |
| MYBL1 | | X66087 | 634 | Trp cluster- | v-myb myeloblastosis |
| | | | | Myb | viral oncogene homolog |
| | | | | | (avian)-like 1 |
| MYBL2 | | NM_002466 | 635 | Trp cluster- | v-myb myeloblastosis |
| | | | | Myb | viral oncogene homolog |
| | | | | | (avian)-like 2 |
| MYC (c- | | NM_002467 | 636 | bHLH | v-myc myelocytomatosis |
| MYC) | | | | | viral oncogene homolog |
| | | | | | (avian) |
| MYCBP | | NM_012333 | 637 | Co-activator | c-myc binding protein |
| MYCL1 | | M19720 | 638 | bHLH | v-myc myelocytomatosis |
| | | | | | viral oncogene homolog, |
| | | | | | lung carcinoma derived |
| | | | | | (arivan) |
| MYCL2 | | NM_005377 | 639 | bHLH | v-myc myelocytomatosis |
| | | | | | viral oncogene homolog 2 |
| | | | | | (avian) |
| MYCLK1 | | M64786 | 640 | bHLH | v-myc myelocytomatosis |
| | | | | | viral oncogene homolog |
| | | | | | (avian)-like 1 |
| MYCN | | NM_005378 | 641 | bHLH | v-myc myelocytomatosis |
| | | | | | viral related oncogene, |
| | | | | | neuroblastoma derived |
| | | | | | (avian) |
| MYF5 | | NM_005593 | 642 | bHLH | myogenic factor 5 |
| MYF6 | | NM_002469 | 643 | bHLH | myogenic factor 6 |
| | | | | | (herculin) |
| MYNN | NT_010840:25 | NM_018657 | 644 | ZnF- | myoneurin |
| | | | | BTB/POZ | |
| MYOD1 | | NM_002478 | 645 | bHLH | myogenic factor 3 |
| MYOG | | NM_002479 | 646 | bHLH | myogenin (myogenic |
| | | | | | factor 4) |
| MYT1 | | NM_004535 | 647 | ZnF-Other | myelin transcription factor 1 |
| MYT1L | | AF036943 | 648 | ZnF-Other | myelin transcription factor |
| | | | | | 1-like |
| MYT2 | | NM_003871 | 649 | Other | myelin transcription factor 2 |
| NAB1 | | NM_005966 | 650 | Co-repressor | NGFI-A binding protein 1 |
| | | | | | (EGR1 binding protein 1) |
| NAB2 | | NM_005967 | 651 | Co-repressor | NGFI-A binding protein 2 |
| | | | | | (EGR1 binding protein 2) |
| NCALD | | NM_032041 | 652 | Other | neurocalcin delta |
| NCOA1 | | NM_003743 | 653 | Co-activator | nuclear receptor |
| NCYM | | NM_006316 | 654 | Other | transcriptional activator |
| NEUD4 | | NM_004647 | 655 | ZnF-PHD | Neuro-d4 (rat) homolog |
| NEUROD1 | | NM_002500 | 656 | bHLH | neurogenic differentiation 1 |
| NEUROD2 | | NM_006160 | 657 | bHLH | neurogenic differentiation 2 |
| NEUROD4 | | NM_021191 | 658 | bHLH | neurogenic differentiation 4 |
| NEUROD6 | | NM_022728 | 659 | bHLH | neurogenic differentiation 6 |
| NEUROG1 | | NM_006161 | 660 | bHLH | neurogenin 1 |
| NEUROG2 | | AF303002 | 661 | bHLH | neurogenin 2 |
| NEUROG3 | | NM_020999 | 662 | bHLH | neurogenin 3 |
| NFAT5 | | NM_006599 | 663 | Beta-scaffold- | nuclear factor of activated |
| | | | | RHD | T-cells 5, tonicity- |
| | | | | | responsive |
| NFATC1 | | NM_006162 | 664 | Beta-scaffold- | nuclear factor of activated |
| | | | | RHD | T-cells, cytoplasmic, |
| | | | | | calcineurin-dependent 1 |
| NFATC2 | | NM_012340 | 665 | Beta-scaffold- | nuclear factor of activated |
| | | | | RHD | T-cells, cytoplasmic, |
| | | | | | calcineurin-dependent 2 |
| NFATC3 | | NM_004555 | 666 | Beta-scaffold- | nuclear factor of activated |
| | | | | RHD | T-cells, cytoplasmic, |
| | | | | | calcineurin-dependent 3 |
| NFATC4 | | NM_004554 | 667 | Beta-scaffold- | nuclear factor of activated |
| | | | | RHD | T-cells, cytoplasmic, |
| | | | | | calcineurin-dependent 4 |
| NFE2 | | NM_006163 | 668 | bZIP | nuclear factor (erythroid- |
| | | | | | derived 2), 45 kD |
| NFE2L1 | | NM_003204 | 669 | bZIP | nuclear factor (erythroid- |
| | | | | | derived 2)-like 1 |
| NFE2L2 | | NM_006164 | 670 | bZIP | nuclear factor (erythroid- |
| | | | | | derived 2)-like 2 |
| NFE2L3 | | NM_004289 | 671 | bZIP | nuclear factor (erythroid- |
| | | | | | derived 2)-like 3 |
| NFIA | | AB037860 | 672 | Beta-scaffold- | nuclear factor I/A |
| | | | | CCAAT | |
| NFIB | | NM_005596 | 673 | Beta-scaffold- | nuclear factor I/B |
| | | | | CCAAT | |
| NFIC | | NM_005597 | 674 | Beta-scaffold- | nuclear factor I/C |
| | | | | CCAAT | (CCAAT-binding |
| | | | | | transcription factor) |
| NFIL3 | | NM_005384 | 675 | bZIP | nuclear factor, interleukin |
| | | | | | 3 regulated |
| NFIX | | NM_002501 | 676 | Beta-scaffold- | nuclear factor I/X |
| | | | | CCAAT | (CCAAT-binding |
| | | | | | transcription factor) |
| NFKBIB | | NM_002503 | 677 | Co-activator | kappa light polypeptide |
| | | | | | gene enhancer in B-cells |
| | | | | | inhibitor, beta |
| NFKBIE | | NM_004556 | 678 | Co-repressor | nuclear factor of kappa |
| | | | | | light polypeptide gene |
| | | | | | enhancer in B-cells |
| | | | | | inhibitor, epsilon |
| NFKBIL1 | | NM_005007 | 679 | Co-repressor | nuclear factor of kappa |
| | | | | | light polypeptide gene |
| | | | | | enhancer in B-cells |
| | | | | | inhibitor-like 1 |
| NFKBIL2 | | NM_013432 | 680 | Co-repressor | nuclear factor of kappa |
| | | | | | light polypeptide gene |
| | | | | | enhancer in B-cells |
| | | | | | inhibitor-like 2 |
| NFRKB | | NM_006165 | 681 | Beta-scaffold- | nuclear factor related to |
| | | | | RHD | kappa B binding protein |
| NFX1 | | NM_002504 | 682 | RFX | nuclear transcription |
| | | | | | factor, X-box binding 1 |
| NFYA | | NM_002505 | 683 | Beta-scaffold- | nuclear transcription factor |
| | | | | CCAAT | Y, alpha |
| NFYB | | NM_006166 | 684 | Beta-scaffold- | nuclear transcription factor |
| | | | | CCAAT | Y, beta |
| NFYC | | NM_014223 | 685 | Beta-scaffold- | nuclear transcription factor |
| | | | | CCAAT | Y, gamma |
| NHLH1 | NT_004982:183 | NM_005598 | 686 | bHLH | nescient helix loop helix 1 |
| NHLH2 | | NM_005599 | 687 | bHLH | nescient helix loop helix 2 |
| NKX2-2 | | NM_002509 | 688 | Homeobox | NK2 transcription factor |
| | | | | | related, locus 2 |
| | | | | | (Drosophila) |
| NKX2-3 | | NM_145285 | 689 | Homeobox | NK2 transcription factor |
| | | | | | related, locus 3 |
| | | | | | (Drosophila) |
| NKX2-4 | | AF202037 | 690 | Homeobox | NK2 transcription factor |
| | | | | | related, locus 4 |
| | | | | | (Drosophila) |
| NKX2-5 | | NM_004387 | 691 | Homeobox | NK2 transcription factor |
| | | | | | related, locus 5 |
| | | | | | (Drosophila) |
| NKX2-8 | | NM_014360 | 692 | Homeobox | NK2 transcription factor |
| | | | | | related, locus 8 |
| | | | | | (Drosophila) |
| NKX3-1 | | NM_006167 | 693 | Homeobox | NK3 transcription factor |
| | | | | | related, locus 1 |
| | | | | | (Drosophila) |
| NKX6-1 | | NM_006168 | 694 | Homeobox | NK6 transcription factor |
| | | | | | related, locus 1 |
| | | | | | (Drosophila) |
| NKX6-2 | | NM_177400 | 695 | Homeobox | NK6 transcription factor |
| | | | | | related, locus 2 |
| | | | | | (Drosophila) |
| NM1 | | NM_004688 | 696 | Co-activator | N-myc (and STAT) |
| | | | | | interactor |
| NPAS1 | | NM_002517 | 697 | bHLH | neuronal PAS domain |
| | | | | | protein 1 |
| NR1D2 | | NM_005126 | 698 | NHR | subfamily 1, group D, |
| | | | | | member 2 |
| NR1H2 | | NM_007121 | 699 | NHR | nuclear receptor subfamily |
| | | | | | 1, group H, member 2 |
| NR1H3 | | NM_005693 | 700 | NHR | nuclear receptor subfamily |
| | | | | | 1, group H, member 3 |
| NR1H4 | | NM_005123 | 701 | NHR | nuclear receptor subfamily |
| | | | | | 1, group H, member 4 |
| NR1I2 | | NM_003889.3 | 702 | NHR | nuclear receptor subfamily |
| | | NM_022002.2 | 1485 | | 1, group I, member 2 |
| | | NM_033013.2 | 1486 | | (isoforms 1-3) |
| NRI13 | | NM_005122 | 703 | NHR | nuclear receptor subfamily |
| | | | | | 1, group I, member 3 |
| NR2C1 | | NM_003297 | 704 | NHR | nuclear receptor subfamily |
| | | | | | 2, group C, member 1 |
| NR2C2 | | NM_003298 | 705 | NHR | nuclear receptor subfamily |
| | | | | | 2, group C, member 2 |
| NR2E1 | | NM_003269 | 706 | NHR | nuclear receptor subfamily |
| | | | | | 2, group E, member 1 |
| NR2E3 | | NM_016346 | 707 | NHR | nuclear receptor subfamily |
| | | | | | 2, group E, member 3 |
| NR2F1 | | NM_005654 | 708 | NHR | nuclear receptor subfamily |
| | | | | | 2, group F, member 1 |
| NR2F2 | | NM_021005 | 709 | NHR | nuclear receptor subfamily |
| | | | | | 2, group F, member 2 |
| NR2F6 | | NM_005234 | 710 | NHR | nuclear receptor subfamily |
| | | | | | 2, group F, member 6 |
| NR3C1 | | NM_000176 | 711 | NHR | nuclear receptor subfamily |
| | | | | | 3, group C, member 1 |
| | | | | | (glucocorticoid receptor) |
| NR3C2 | | NM_000901 | 712 | NHR | nuclear receptor subfamily |
| | | | | | 3, group C, member 2 |
| NR4A1 | | NM_002135 | 713 | NHR | nuclear receptor subfamily |
| | | | | | 4, group A, member 1 |
| NR4A2 | | NM_006186 | 714 | NHR | nuclear receptor subfamily |
| | | | | | 4, group A, member 2 |
| NR4A3 | | NM_006981 | 715 | NHR | nuclear receptor subfamily |
| | | | | | 4, group A, member 3 |
| NR5A1 | | NM_004959 | 716 | NHR | nuclear receptor subfamily |
| | | | | | 5, group A, member 1 |
| NR5A2 | | NM_003822 | 717 | NHR | nuclear receptor subfamily |
| | | | | | 5, group A, member 2 |
| NR6A1 | | NM_001489 | 718 | NHR | nuclear receptor subfamily |
| | | | | | 6, group A, member 1 |
| NRF | | NM_017544 | 719 | Other | transcription factor |
| OG2x | | AC004534 | 720 | Homeobox | homeobox (mouse) |
| | | | | | homolog |
| OLIG1 | | BC026989 | 721 | bHLH | oligodendrocyte |
| | | | | | transcription factor 1 |
| OLIG2 | | NM_005806 | 722 | bHLH | oligodendrocyte |
| | | | | | transcription factor 2 |
| OLIG3 | | NM_175747 | 723 | bHLH | oligodendrocyte |
| | | | | | transcription factor 3 |
| ONECUT1 | | U96173 | 724 | Homeobox | one cut domain, family |
| | | | | | member 1 |
| ONECUT2 | | NM-004852 | 725 | Homeobox | one cut domain, family |
| | | | | | member 2 |
| OPTN | | NM_021980 | 726 | Co-activator | optineurin |
| OSR1 | | NM_145260 | 727 | ZnF—C2H2 | odd-skipped related 1 |
| OSR2 | NT_008046:515 | NM_053001 | 728 | ZnF—C2H2 | odd-skipped-related 2A |
| | | | | | protein |
| OTEX | NT_011588:87 | NM_139282 | 729 | Homeobox | paired-like homeobox |
| | | | | | protein OTEX |
| OTP | NT_006713:546 | NM_032109 | 730 | Homeobox | orthopedia homolog |
| | | | | | (Drosophila) |
| OTX1 | | NM_014562 | 731 | Homeobox | orthodenticle homolog 1 |
| | | | | | (Drosophila) |
| OTX2 | | NM_021728 | 732 | Homeobox | orthodenticle homolog 2 |
| | | | | | (Drosophila) |
| OTX3 | | NM_147192 | 733 | Homeobox | orthodenticle homolog 3 |
| | | | | | (Drosophila) |
| OVOL1 | | NM_004561 | 734 | ZnF—C2H2 | ovo-like 1(Drosophila) |
| OVOL3 | | AD001527 | 735 | ZnF—C2H2 | ovo-like 3 (Drosophila) |
| p100 | | NM_014390 | 736 | Co-activator | EBNA-2 Co-activator |
| | | | | | (100 kD) |
| P1P373C6 | | NM_019110 | 737 | ZnF—C2H2 | hypothetical protein P1 |
| | | | | | p373c6 |
| P381IP | | NM_017569 | 738 | Other | transcription factor (p38 |
| | | | | | interacting protein) |
| PAWR | NT_019546:106 | NM_002583 | 739 | bZIP | PRKC, apoptosis, WT1, |
| | | | | | regulator |
| PAX1 | | NM_006192 | 740 | Paired Box | paired box gene 1 |
| PAX2 | | NM_000278 | 741 | Paired Box | paired box gene 2 |
| PAX3 | | NM_000438 | 742 | Paired Box | paired box gene 3 |
| | | | | | (Waardenburg syndrome |
| | | | | | 1) |
| PAX4 | | NM_006193 | 743 | Paired Box | paired box gene 4 |
| PAX5 | | NM_016734 | 744 | Paired Box | paired box gene 6 (B-cell |
| | | | | | lineage specific activator |
| | | | | | protein) |
| PAX6 | | NM_000280 | 745 | Paired Box | paired box gene 6 |
| | | | | | (aniridia, keratitis) |
| PAX7 | | NM_002584 | 746 | Paired box | paired box gene 7 |
| PAX8 | | NM_003466 | 747 | Paired Box | paired box gene 8 |
| PAX9 | | NM_006194 | 748 | Paired Box | paired box gene 9 |
| PAXIP1L | | U80735 | 749 | Co-activator | PAX transcription |
| | | | | | activation domain |
| | | | | | interacting protein 1 like |
| PBX1 | | NM_002585 | 750 | Homeobox | pre-B-cell leukemia |
| | | | | | transcription factor 1 |
| PBX2 | | NM_002586 | 751 | Homeobox | pre-B-cell leukemia |
| | | | | | transcription factor 2 |
| | | | | | glutamine/Q-rich- |
| | | | | | associated protein |
| PDEF | | NM_012391 | 752 | Trp cluster- | prostate epithelium- |
| | | | | Ets | specific Ets transcription |
| | | | | | factor |
| PEGASUS | | NM_022466 | 753 | ZnF—C2H2 | zinc finger protein, |
| | | | | | subfamily 1A, 5 (Pegasus) |
| PER1 | | NM_002616 | 754 | bHLH | period homolog 1 |
| | | | | | (Drosophila) |
| PER2 | | NM_003894 | 755 | bHLH | period homolog 2 |
| | | | | | (Drosophila) |
| PER3 | | NM_016831 | 756 | bHLH | period homolog 3 |
| | | | | | (Drosophila) |
| PFDN5 | | NM_002624 | 757 | Co-repressor | prefoldin 5 |
| PGR | | NM_000926 | 758 | NHR | progesterone receptor |
| PHC1 | | NM_004426 | 759 | Structural | polyhomeotic-like 1 |
| | | | | | (Drosophila) |
| PHD3 | | NM_015153 | 760 | ZnF-PHD | PHD finger protein 3 |
| PHF15 | NT_034776:94 | NM_015288 | 761 | ZnF-PHD | PHD finger protein 15 |
| PHF16 | NT_011568:120 | NM_014735 | 762 | ZnF-PHD | PHD finger protein 6 |
| PHTF1 | | NM_006608 | 763 | Homeobox | putative homeodomain |
| | | | | | transcription factor |
| PIAS1 | NT_010222:2 | NM_016166 | 764 | ZnF-MIZ | protein inhibitor of |
| | | | | | activated STAT, 1 |
| PIAS3 | | NM_006099 | 765 | ZnF-MIZ | protein inhibitor of |
| | | | | | activated STAT3 |
| PIASY | NT_011255:153 | NM_015897 | 766 | ZnF-MIZ | protein inhibitor of |
| | | | | | activated STAT protein |
| | | | | | PIASy |
| PIG7 | | NM_004862 | 767 | Other | LPS-induced TNF-alpha |
| | | | | | factor |
| PILB | | NM_012228 | 768 | Other | pilin-like transcription |
| | | | | | factor |
| PITX1 | | NM_002653 | 769 | Homeobox | paired-like homeodomain |
| | | | | | transcription factor 1 |
| PITX2 | | NM_000325 | 770 | Homeobox | paired-like homeodomain |
| | | | | | transcription factor 2 |
| PITX3 | | NM_005029 | 771 | Homeobox | paired-like homeodomain |
| | | | | | transcription factor 3 |
| PKNOX1 | | NM_004571 | 772 | Homeobox | PBX/knotted 1 homeobox 1 |
| PKNOX2 | | NM_022062 | 773 | Homeobox | PBX/knotted 1 homeobox 2 |
| PLAG1 | | NM_002655 | 774 | ZnF—C2H2 | pleiomorphic adenoma |
| | | | | | gene 1 |
| PLGAL1 | | NM_002656 | 775 | ZnF—C2H2 | pleiomorphic adenoma |
| | | | | | gene-like 1 |
| PLAGL2 | | NM_002657 | 776 | ZnF—C2H2 | pleiomorphic adenoma |
| | | | | | gene-like 2 |
| PLRG1 | | NM_002669 | 777 | Co-repressor | pleiotropic regulator 1 |
| | | | | | (PRL1 homolog, |
| | | | | | Arabidopsis) |
| PMF1 | | NM_007221 | 778 | Co-activator | polyamine-modulated |
| | | | | | factor 1 |
| PML | | NM_002675 | 779 | Structural | promyelocytic leukemia |
| PMX1 | | NM_006902 | 780 | Homeobox | paired mesoderm homeo |
| | | | | | box 1 |
| POU3F1 | | NM_002699 | 781 | Homeobox | POU domain, class 3, |
| | | | | | transcription factor 1 |
| POU3F2 | | NM_005604 | 782 | Homeobox | POU domain, class 3, |
| | | | | | transcription factor 2 |
| POU3F3 | | NM_006236 | 783 | Homeobox | POU domain, class 3, |
| | | | | | transcription factor 3 |
| POU3F4 | | NM_000307 | 784 | Homeobox | POU domain, class 3, |
| | | | | | transcription factor 4 |
| POU4F1 | | NM_006237 | 785 | Homeobox | POU domain, class 4, |
| | | | | | transcription factor 1 |
| POU4F2 | | NM_004575 | 786 | Homeobox | POU domain, class 4, |
| | | | | | transcription factor 2 |
| POU4F3 | | NM_002700 | 787 | Homeobox | POU domain, class 4, |
| | | | | | transcription factor 3 |
| POU5F1 | | NM_002701 | 788 | Homeobox | POU domain, class 5, |
| (OCT4) | | | | | transcription factor 1 |
| POU6F1 | | NM_002702 | 789 | Homeobox | POU domain, class 6, |
| | | | | | transcription factor 1 |
| PPARA | | NM_005036 | 790 | NHR | peroxisome proliferative |
| | | | | | activated receptor, alpha |
| PPARBP | | NM_004774 | 791 | Co-activator | peroxisome proliferator |
| | | | | | activated receptor binding |
| | | | | | protein |
| PPARD | | NM_006238 | 792 | NHR | peroxisome proliferative |
| | | | | | activated receptor, delta |
| PPARG | | NM_005037 | 793 | NHR | peroxisome proliferative |
| | | | | | activated receptor, gamma |
| PPARGC1 | | NM_013261 | 794 | Co-activator | peroxisome proliferative |
| | | | | | activated receptor, gamma, |
| | | | | | coactivator 1 |
| PRDM1 | | NM_001198 | 795 | Structural | PR domain containing 1, |
| | | | | | with ZNF domain |
| PRDM10 | | NM_020228 | 796 | Structural | PR domain containing 10 |
| PRDM11 | | NM_020229 | 797 | Structural | PR domain containing 11 |
| PRDM12 | | NM_021619 | 798 | Structural | PR domain containing 12 |
| PRDM13 | | NM_021620 | 799 | Structural | PR domain containing 13 |
| PRDM14 | | NM_024504 | 800 | Structural | PR domain containing 14 |
| PRDM15 | | NM_144771 | 801 | Structural | PR domain containing 15 |
| PRDM16 | | NM_022114 | 802 | Structural | PR domain containing 16 |
| PRDM2 | | NM_012231 | 803 | Structural | PR domain containing 2, |
| | | | | | with ZNF domain |
| PRDM4 | | NM_012406 | 804 | Structural | PR domain containing 4 |
| PRDM5 | | NM_018699 | 805 | Structural | PR domain containing 5 |
| PRDM6 | | AF272898 | 806 | Structural | PR domain containing 6 |
| PRDM7 | | AF274348 | 807 | Structural | PR domain containing 7 |
| PRDM8 | | NM_020226 | 808 | Structural | PR domain containing 8 |
| PROX1 | | NM_002763.3 | 809 | Homeobox | homeobox 1 |
| PRX2 | | NM_016307 | 810 | Homeobox | paired related homeobox |
| | | | | | protein |
| PSIP1 | | NM_021144.3 | 811 | Co-activator | PC4 and SFRS1 |
| | | NM_001128217.1 | 1487 | | interacting protein 1 |
| | | NM_033222.3 | 1488 | | (isoforms 1-3) |
| PSMC2 | NT_007933:2739 | NM_002803 | 812 | Co-activator | proteasome (prosome, |
| | | | | | macropain) 26S subunit, |
| | | | | | ATPase, 2 |
| PSMC5 | | NM_002805 | 813 | Co-activator | proteasomes (prosome, |
| | | | | | macropain) 26S subunit, |
| | | | | | ATPase, 5 |
| PTF1A | NT_008705:1995 | NM_178161 | 814 | bHLH | pancreas specific |
| | | | | | transcription factor, 1a |
| PTTG1IP | | NM_004339 | 815 | Co-activator | pituitary tumor- |
| | | | | | transforming 1 interacting |
| | | | | | protein |
| PURA | | NM_005859 | 816 | Other | purine-rich element |
| | | | | | binding protein A |
| R28830_2 | | AC003682 | 817 | ZnF-Other | similar to ZNF197 |
| | | | | | (ZNF20) |
| R32184_3 | | NM_033420 | 818 | Other | hypothetical protein |
| | | | | | MGC4022 |
| RAI | | NM_006663 | 819 | Co-repressor | RelA-associated inhibitor |
| RAI15 | | U50383 | 820 | Other | retinoic acid induced 15 |
| RAA | | NM_000964 | 821 | NHR | retinoic acid receptor, |
| | | | | | alpha |
| RARB | | NM_000965 | 822 | NHR | retinoic acid receptor, beta |
| RARG | | NM_000966.4 | 823 | NHR | retinoic acid receptor, |
| | | NM_001042728.1 | 1489 | | gamma (isoforms 1-2) |
| RAX | | NM_013435 | 824 | Homeobox | retina and anterior neural |
| | | | | | fold homeobox |
| RB1 | | NM_000321 | 825 | Pocket | retinoblastoma 1 |
| | | | | domain | (including osteosarcoma) |
| RBAF600 | | AB007931 | 826 | ZnF—C2H2 | retinoblastoma-associated |
| | | | | | factor 600 |
| RBAK | NT_007819:532 | NM_021163 | 827 | Other | RB-associated KRAB |
| | | | | | repressor |
| RBBP5 | | NM_005057 | 828 | Co-repressor | retinoblastoma binding |
| | | | | | protein 5 |
| RBBP9 | | NM_006606 | 829 | Co-repressor | retinoblastoma binding |
| | | | | | protein 9 |
| RBL1 | | NM_002895 | 830 | Pocket | retinoblastoma-like 1 |
| | | | | domain | (p107) |
| RBL2 | | NM_005611 | 831 | Pocket | retinoblastoma-like 2 |
| | | | | domain | (p130) |
| RBPSUH | | NM_016270 | 832 | ZnF—C2H2 | recombining binding |
| | | | | | protein suppressor of |
| | | | | | hairless (Drosophila) |
| RBPSUHL | | NM_014276 | 833 | Other | recombining binding |
| | | | | | protein suppressor of |
| | | | | | hairless-like (Drosophila) |
| RCOR | | NM_015156 | 834 | Other | REST corepressor |
| RCV1 | | NM_002903 | 835 | Other | recoverin |
| REL | | NM_002908 | 836 | Beta-scaffold- | v-rel reticuloendotheliosis |
| | | | | RHD | viral oncogene |
| | | | | | (avian) |
| REQ | | NM_006268 | 837 | ZnF-PHD | requiem, apoptosis |
| | | | | | response zinc finger gene |
| RERE | | NM_012102 | 838 | Other | arginine-glutamic acid |
| | | | | | dipeptide (RE) repeats |
| REST | | NM_005612 | 839 | ZnF—C2H2 | RE1-silencing |
| | | | | | transcription factor |
| TRIM27 | NT_033168:4 | NM_006510.4 | 840 | Structural | tripartite motif containing |
| | | | | | 27 |
| TRIM13 | | NM_005798.3 | 841 | Structural | tripartite motif containing |
| | | NM_052811.2 | 1499 | | 13 (isoforms 1, 1, 1, and 2, |
| | | NM_213590.1 | 1500 | | respectively) |
| | | NM_001007278.1 | 136 | | |
| RFPL3 | NT_011520:1735 | NM_006604 | 842 | Structural | ret finger protein-like 3 |
| RFX1 | | NM_002918 | 843 | RFX | regulatory factor X, 1 |
| | | | | | (influences HLA class II |
| | | | | | expression) |
| RFX2 | | NM_000635 | 844 | RFX | regulatory factor X, 2 |
| | | | | | (influences HLA class II |
| | | | | | expression) |
| RFX3 | | NM_002919 | 845 | RFX | regulatory factor X, 3 |
| | | | | | (influences HLA class II |
| | | | | | expression) |
| RFX4 | | NM_002920 | 846 | RFX | regulatory factor X, 4 |
| | | | | | (influences HLA class II |
| | | | | | expression) |
| RFX5 | | NM_000449 | 847 | RFX | regulatory factor X, 5 |
| | | | | | (influences HLA class II |
| | | | | | expression) |
| RFXANK | | NM_003721 | 848 | Co-activator | regulatory factor X- |
| | | | | | associated ankyrin- |
| | | | | | containing protein |
| RGC32 | | NM_014059 | 849 | Other | RGC32 protein |
| RIN3 | NT_026437:2459 | NM_024832 | 850 | bHLH | Ras and Rab interactor 3 |
| RING1 | | NM_002931 | 851 | ZnF-Other | ring finger protein 1 |
| RIP60 | | NM_013400 | 852 | ZnF—C2H2 | replication initiation |
| | | | | | region protein (60 kD) |
| RIPX | NT_006216:11 | NM_014961 | 853 | ZnF-PHD | rap2 interacting protein x |
| RLF | | NM_012421 | 854 | ZnF—C2H2 | rearranged L-myc fusion |
| | | | | | sequence |
| RNF10 | | NM_014868 | 855 | ZnF-Other | ring finger protein 10 |
| RNF12 | | NM_016120 | 856 | ZnF-Other | ring finger protein 12 |
| RNF 13 | | NM_007282 | 857 | ZnF-Other | ring finger protein 13 |
| RNF135 | NT_035420:144 | NM_032322 | 858 | ZnF-MIZ | ring finger protein 135 |
| | | | | | isoform 1 |
| RNF137 | NT_028310:82 | NM_018073 | 859 | Structural | ring finger protein 137 |
| RNF14 | | NM_004290 | 860 | Co-activator | ring finger protein 14 |
| RNF144 | | NM_014746 | 861 | ZnF-Other | Ring finger protein 144 |
| RNF18 | NT_033240:76 | NM_020358 | 862 | Structural | ring finger protein 18 |
| RNF2 | | NM_007212 | 863 | Co-repressor | ring finger protein 2 |
| RNF24 | | NM_007219 | 864 | ZnF-Other | ring finger protein 24 |
| RNF3 | | NM_006315 | 865 | ZnF-Other | ring finger protein 3 |
| RNF36 | NT_0101942 | NM_080745 | 866 | Structural | ring finger protein 36 |
| RNF4 | | NM_002938 | 867 | ZnF-Other | ring finger protein 4 |
| RNF8 | | NM_003958 | 868 | ZnF-Other | ring finger protein |
| | | | | | (C3HC4 type) 8 |
| RORA | | NM_134261.2 | 869 | — | RAR-related orphan |
| | | NM_134260.2 | 1490 | | receptor A (isoforms a-d) |
| | | NM_002943.3 | 1491 | | |
| | | NM_134262.2 | 1492 | | |
| RORB | | NM_006914.3 | 1493 | | RAR-related orphan |
| | | | | | receptor B |
| RORC | | NM_005060.3 | 1494 | | RAR-related orphan |
| | | NM_001001523.1 | 1495 | | receptor C (isoforms a-b) |
| RUNX1 | | NM_001754 | 870 | scaffold- | (acute myeloid leukemia |
| | | | | RUNT | 1; aml1 oncogene) |
| RUNX2 | | NM_004348 | 871 | Beta-scaffold- | runt-related transcription |
| | | | | RUNT | factor 2 |
| RUNX3 | | NM_004350 | 872 | Beta-scaffold- | runt-related transcription |
| | | | | RUNT | factor 3 |
| RXRA | | NM_002957 | 873 | NHR | retinoid X receptor, alpha |
| RXRB | | NM_021976 | 874 | NHR | retinoid X receptor, beta |
| RXRG | | NM_006917 | 875 | NHR | retinoid X receptor, |
| | | | | | gamma |
| RYBP | NT_005526:6 | NM_012234 | 876 | Co-repressor | RING1 and YY1 binding |
| | | | | | protein |
| SAFB | | NM_002967 | 877 | Other | scaffold attachment factor B |
| SALL1 | | NM_002968 | 878 | ZnF—C2H2 | sal-like 1 (Drosophila) |
| SALL2 | | AB002358 | 879 | ZnF—C2H2 | sal-like 2 (Drosophila) |
| SALL3 | | NM_171999 | 880 | ZnF—C2H2 | sal-like 3 (Drosophila) |
| SALL4 | | NM_020436 | 881 | ZnF—C2H2 | similar to SALL1 (sal |
| | | | | | (Drosophila)-like |
| SAP18 | | NM_005870 | 882 | Co-repressor | sin3-associated |
| | | | | | polypeptide, 18 kD |
| SAP30 | | NM_003864 | 883 | Co-repressor | sin3-associated |
| | | | | | polypeptide, 30 kD |
| SART3 | | NM_014706 | 884 | Co-activator | squamous cell carcinoma |
| | | | | | antigen recognized by T |
| | | | | | cells 3 |
| SATB1 | | NM_002971 | 885 | Homeobox | special AT-rich sequence |
| | | | | | binding protein 1 (binds to |
| | | | | | nuclear matrix/scaffold- |
| | | | | | associating DNAs) |
| SATB2 | NT_005037:10 | NM_015265 | 886 | Homeobox | SATB family member 2 |
| SBB103 | | NM_005785 | 887 | ZnF-Other | hypothetical SBB103 |
| | | | | | protein |
| SBLF | | NM_006873 | 888 | Other | stoned B-like factor |
| SBZF3 | NT_031730:7 | NM_020394 | 889 | ZnF—C2H2 | zinc finger protein SBZF3 |
| SCA2 | | NM_002973 | 890 | Other | spinocerebellar ataxia 2 |
| | | | | | (Olivopontocerebellar |
| | | | | | ataxia 2, autosomal |
| | | | | | dominant, ataxin 2) |
| SCAND1 | | NM_016558 | 891 | Co-activator | SCAN domain-containing 1 |
| SCAND2 | | NM_022050 | 892 | Co-activator | SCAN domain-containing 2 |
| SCMH1 | NT_004852:374 | NM_012236 | 893 | Structural | sex comb on midleg |
| | | | | | homolog 1 (Drosophila) |
| SCML1 | | NM_006746 | 894 | Structural | sex comb on midleg-like 1 |
| | | | | | (Drosophila) |
| SCML2 | | NM_006089 | 895 | Structural | sex comb on midleg-like 2 |
| | | | | | (Drosophila) |
| SCML4 | NT_033944:303 | NM_198081 | 896 | Trp Cluster- | sex comb on midleg-like 4 |
| | | | | Ets | |
| SETDB1 | | NM_012432 | 897 | Structural | [cut off] bifurcated 1 |
| SF1 | | NM_004630 | 898 | ZnF-Other | splicing factor 1 |
| SHARP | | NM_015001 | 899 | Co-repressor | SMART/HDAC1 |
| | | | | | associated repressor |
| | | | | | protein |
| SHOX | | NM_000451.3 | 900 | Homeobox | short stature homeobox |
| | | NM_006883.2 | 1496 | | (isoforms a-b) |
| SHOX2 | | NM_003030 | 901 | Homeobox | short stature homeobox 2 |
| SIAH1 | | NM_003031 | 902 | Co-repressor | seven in absentia homolog |
| | | | | | 1 (Drosophila) |
| SIAH2 | | NM_005067 | 903 | Co-repressor | seven in absentia homolog |
| | | | | | 2 (Drosophila) |
| SIM1 | | NM_005068 | 904 | bHLH | single-minded homolog 1 |
| | | | | | (Drosophila) |
| SIM2 | | NM_005069 | 905 | bHLH | single-minded homolog 2 |
| | | | | | (Drosophila) |
| SIN3B | | AB014600 | 906 | Co-activator | SIN3 homolog B, |
| | | | | | transcriptional regulator |
| | | | | | (yeast) |
| SIX1 | | NM_005982 | 907 | Homeobox | sine oculis homeobox |
| | | | | | homolog 1 (Drosophila) |
| SIX2 | | NM_016932 | 908 | Homeobox | sine oculis homeobox |
| | | | | | homolog 2 (Drosophila) |
| SIX3 | | NM_005413 | 909 | Homeobox | sine oculis homeobox |
| | | | | | homolog 3 (Drosophila) |
| SIX4 | | NM_017420 | 910 | Homeobox | sine oculis homeobox |
| | | | | | homolog 4 (Drosophila) |
| SIX5 | | X84813 | 911 | Homeobox | sine oculis homeobox |
| | | | | | homolog 5 (Drosophila) |
| SIX6 | | NM_007374 | 912 | Homeobox | sine oculis homeobox |
| | | | | | homolog 6 (Drosophila) |
| SLB | | AL110218 | 913 | Co-repressor | selective LIM binding |
| | | | | | factor |
| SLC2A4RG | NT_011333:173 | NM_020062 | 914 | ZnF—C2H2 | SLC2A4 regulator |
| SMARCA1 | | NM_003069 | 915 | Structural | SWI/SNF related, matrix |
| | | | | | associated, actin |
| | | | | | dependent regulator of |
| | | | | | chromatin, subfamily a, |
| | | | | | member 1 |
| SMARCA2 | | NM_003070 | 916 | Structural | SWI/SNF related, matrix |
| | | | | | associated, actin |
| | | | | | dependent regulator of |
| | | | | | chromatin, subfamily a, |
| | | | | | member 2 |
| SMARCA3 | | NM_003071 | 917 | Structural | SWI/SNF related, matrix |
| | | | | | associated, actin |
| | | | | | dependent regulator of |
| | | | | | chromatin, subfamily a, |
| | | | | | member 3 |
| SMARCA4 | | NM_003072 | 918 | Structural | SWI/SNF related, matrix |
| | | | | | associated, actin |
| | | | | | dependent regulator of |
| | | | | | chromatin, subfamily a, |
| | | | | | member 4 |
| | | | | | subfamily a-like 1 |
| SMARCB1 | | NM_003073 | 919 | Other | SWI/SNF related, matrix |
| | | | | | associated, actin |
| | | | | | dependent regulator of |
| | | | | | chromatin, subfamily b, |
| | | | | | member 1 |
| SMARCC1 | | NM_003074 | 920 | Structural | SWI/SNF related, matrix |
| | | | | | associated, actin |
| | | | | | dependent regulator of |
| | | | | | chromatin, subfamily c, |
| | | | | | member 1 |
| SMARCC2 | | NM_003075 | 921 | Structural | SWI/SNF related, matrix |
| | | | | | associated, actin |
| | | | | | dependent regulator of |
| | | | | | chromatin, subfamily c, |
| | | | | | member 2 |
| SMARCE1 | | NM_003079 | 922 | Structural | SWI/SNF related, matrix |
| | | | | | associated, actin |
| | | | | | dependent regulator of |
| | | | | | chromatin, subfamily e, |
| | | | | | member 1 |
| KDM5C | | NM_004187.3 | 923 | Structural | lysine (K)-specific |
| | | NM_001146702.1 | 924 | | demethylase 5C |
| SNAI1 | | NM_005985 | 925 | ZnF—C2H2 | snail homolog 1 |
| | | | | | (Drosophila) |
| SNAI2 | | NM_003068 | 926 | ZnF—C2H2 | snail homolog 2 |
| | | | | | (Drosophila) |
| SNAI3 | | BC041461 | 927 | ZnF—C2H2 | snail homolog 3 |
| | | | | | (Drosophila) |
| SNAPC1 | | NM_003082 | 928 | Other | small nuclear RNA |
| | | | | | activating complex, |
| | | | | | polypeptide 1, 43 kDa |
| SNAPC2 | | NM_003083 | 929 | Other | small nuclear RNA |
| | | | | | activating complex, |
| | | | | | polypeptide 2, 45 kDa |
| SNAPC3 | | NM_003084 | 930 | Other | small nuclear RNA |
| | | | | | activating complex, |
| | | | | | polypeptide 3, 50 kDa |
| SNAPC4 | | NM_003086 | 931 | Other | small nuclear RNA |
| | | | | | activating complex, |
| | | | | | polypeptide 4, 190 kDa |
| SNAPC5 | | NM_006049 | 932 | Other | small nuclear RNA |
| | | | | | activating complex, |
| | | | | | polypeptide 5, 19 kDa |
| SNFT | | NM_018664 | 933 | bZIP | Jun dimerization protein |
| | | | | | p21SNFT |
| SNW1 | | NM_012245 | 934 | Co-activator | SKI-interacting protein |
| SOLH | NT_010552:127 | NM_005632 | 935 | ZnF-PHD | small optic lobes homolog |
| | | | | | (Drosophila) |
| SOM | NT_004391:39 | NM_021180 | 936 | Beta-scaffold- | sister of mammalian |
| | | | | grainyhead | grainyhead |
| SOX1 | | NM_005986 | 937 | Beta-scaffold- | SRY (sex determining |
| | | | | HMG | region Y)-box 1 |
| SOX10 | | NM_006941 | 938 | Beta-scaffold- | SRY (sex determining |
| | | | | HMG | region Y)-box 10 |
| SOX11 | | NM_003108 | 939 | Beta-scaffold- | SRY (sex determining |
| | | | | HMG | region Y)-box 11 |
| SOX18 | | NM_018419.2 | 940 | Beta-scaffold- | SRY (sex determining |
| | | | | HMG | region Y)-box 18 |
| SOX2 | | L07335 | 941 | Beta-scaffold- | (sex determining region |
| | | | | HMG Seed | Y)-box 2 |
| | | | | SRY | |
| SOX21 | | NM_007084 | 942 | Beta-Scaffold- | SRY (Sex determining |
| | | | | HMG | region Y)-box 21 |
| SOX3 | | NM_005634 | 943 | Beta- | SRY (sex determining |
| | | | | Scaffold- | region Y)-box 3 |
| | | | | HMG | |
| SOX30 | | NM_007017 | 944 | Beta-scaffold- | SRY (sex determining |
| | | | | HMG | region Y)-box 30 |
| SOX4 | | NM_003107 6659 | 945 | Beta-scaffold- | SRY (sex determining |
| | | | | HMG | region Y)-box 4 |
| SOX5 | | NM_006940 6660 | 946 | Beta-scaffold- | SRY (sex determining |
| | | | | HMG | region Y)-box 5 |
| SOX6 | | NM_033326 | 947 | Beta-scaffold- | SRY (sex determining |
| | | 55553 | | HMG | region Y)-box 6 |
| SOX7 | NT_008010:24 | NM_031439 | 948 | Beta-scaffold- | SRY (sex determining |
| | | | | HMG | region Y)-box 7 |
| SOX8 | | NM_014587 | 949 | Beta-scaffold- | SRY (sex determining |
| | | 30812 | | HMG | region Y)-box 8 |
| SOX9 | | NM_000346 6662 | 950 | Beta-scaffold- | SRY (sex determining |
| | | | | HMG | region Y)-box 9 |
| SP1 | | J03133 | 951 | ZnF—C2H2 | Sp1 transcription factor |
| SP100 | NT_005403:864 | NM_003113 | 952 | Beta-scaffold- | nuclear antigen Sp100 |
| | | | | HMG | |
| SP2 | | NM_003110 | 953 | ZnF—C2H2 | Sp2 transcription factor |
| SP3 | | X68560 | 954 | ZnF—C2H2 | Sp3 transcription factor |
| SP4 | | NM_003112 | 955 | ZnF—C2H2 | Sp4 transcription factor |
| SP7 | NT_009563:27 | NM_152860 | 956 | ZnF—C2H2 | Sp7 transcription factor |
| SPI1 | | NM_003120 | 957 | Trp cluster- | spleen focus forming virus |
| | | | | Ets | (SFFV) proviral |
| | | | | | integration oncogene spi1 |
| SPIB | | NM_003121 | 958 | Trp cluster- | Spi-B transcription factor |
| | | | | Ets | (Spi-1/PU.1 related) |
| SPIC | NT_009743:37 | NM_152323 | 959 | Trp Cluster- | likely ortholog of mouse |
| | | | | Ets | Spi-C transcription factor |
| | | | | | (Spi-1/PU.1 related) |
| SRA1 | | AF293024 | 960 | Co-activator | steroid receptor RNA |
| | | | | | activator 1 |
| SRCAP | | NM_006662 | 961 | Structural | Snf2-related CBP activator |
| | | | | | protein |
| SREBF1 | | NM_004176 | 962 | bHLH | sterol regulatory element |
| | | | | | binding transcription |
| | | | | | factor 1 |
| SREBF2 | | NM_004599 | 963 | bHLH | sterol regulatory element |
| | | | | | binding transcription |
| | | | | | factor 2 |
| SRF | | NM_003131 | 964 | Beta-scaffold- | serum response factor (c- |
| | | | | MADS | fos serum response |
| | | | | | element-binding |
| | | | | | transcription factor) |
| SRY | | NM_003140 | 965 | Beta-scaffold- | sex determining region Y |
| | | | | HMG | |
| SSA1 | NT_028310:75 | NM_003141 | 966 | Structural | Sjogren syndrome antigen |
| | | | | | A1 (52 kDa, |
| | | | | | ribonucleoprotein |
| | | | | | autoantigen SS-A/Ro) |
| SSRP1 | | NM_003146 | 967 | Co-activator | structure specific |
| | | | | | recognition protein 1 |
| SSX1 | | NM_005635 | 968 | Other | synovial sarcoma, X |
| | | | | | breakpoint 1 |
| SSX2 | | NM_003147 | 969 | Other | synovial sarcoma, X |
| | | | | | breakpoint 2 |
| SSX3 | | NM_021014 | 970 | Other | synovial sarcoma, X |
| | | | | | breakpoint 3 |
| SSX4 | | NM_005636 | 971 | Other | synovial sarcoma, X |
| | | | | | breakpoint 4 |
| SSX5 | | NM_021015 | 972 | Other | synovial sarcoma, X |
| | | | | | breakpoint 5 |
| SSX6 | | NM_173357 | 973 | Other | synovial sarcoma, X |
| | | | | | breakpoint 6 |
| SSX7 | | NM_173358 | 974 | Other | synovial sarcoma, X |
| | | | | | breakpoint 7 |
| SSX8 | | NM_174961 | 975 | Other | synovial sarcoma, X |
| | | | | | breakpoint 8 |
| SSX9 | | NM_174962 | 976 | Other | synovial sarcoma, X |
| | | | | | breakpoint 9 |
| ST18 | | NM_014682 | 977 | ZnF—C3H | suppression of |
| | | | | | tumorigenicity 18 (breast |
| | | | | | carcinoma) (zinc finger |
| | | | | | protein) |
| STAT1 | | NM_007315 | 978 | Beta-scaffold- | signal transducer and |
| | | | | STAT | activator of transcription |
| | | | | | 1, 91 kDa |
| STAT2 | | NM_005419 | 979 | Beta-scaffold- | signal transducer and |
| | | | | STAT | activator of transcription |
| | | | | | 2, 113 kDa |
| STAT3 | | NM_003150 | 980 | Beta-scaffold- | signal transducer and |
| | | | | STAT | activator of transcription 3 |
| | | | | | (acute-phase response |
| | | | | | factor) |
| STAT4 | | NM_003151 | 981 | Beta-scaffold- | signal transducer and |
| | | | | STAT | activator of transcription 4 |
| STAT5A | | NM_003152 | 982 | Beta-scaffold- | signal transducer and |
| | | | | STAT | activator of transcription |
| | | | | | 5A |
| STAT5B | | NM_012448 | 983 | Beta-scaffold- | signal transducer and |
| | | | | STAT | activator of transcription |
| | | | | | 5B |
| STAT6 | | NM_003153 | 984 | Beta-scaffold- | signal transducer and |
| | | | | STAT | activator of transcription |
| | | | | | 6, interleukin-4 induced |
| SUPT16H | | NM_007192 | 985 | Other | suppressor of Ty 16 |
| | | | | | homolog (S. cerevisiae) |
| SUPT3H | | NM_003599 | 986 | Other | suppressor of Ty 3 |
| | | | | | homolog (S. cerevisiae) |
| SUPT4H1 | | NM_003168 | 987 | Other | suppressor of Ty 4 |
| | | | | | homolog (S. cerevisiae) |
| SUPT5H | | NM_003169 | 988 | Dwarfin | suppressor of Ty 5 |
| | | | | | homolog (S. cerevisiae) |
| SUPT6H | | NM_003170 | 989 | Other | suppressor of Ty 6 |
| | | | | | homolog (S. cerevisiae) |
| SURB7 | | NM_004264 | 990 | Other | SRB7 suppressor of RNA |
| | | | | | polymerase B homolog |
| | | | | | (yeast) |
| SUV39H1 | NT_011568:277 | NM_003173 | 991 | Structural | suppressor of variegation |
| | | | | | 3-9 homolog 1 |
| | | | | | (Drosophila) |
| SZF1: | NT_022567:166 | NM_016089 | 992 | ZnF—C2H2 | KRAB-zinc finger protein |
| | | | | | SZF1-1 |
| SZFP41 | NT_011192:184 | NM_152279 | 993 | ZnF—C2H2 | zinc finger protein 41-like |
| T | | NM_003181 | 994 | T-box | T, brachyury homolog |
| | | | | | (mouse) |
| TADA2L | | NM_001488 | 995 | Other | transcriptional adaptor 2 |
| | | | | | (ADA2 homolog, yeast)- |
| | | | | | like |
| TADA3L | | NM_006354 | 996 | Other | transcriptional adaptor 3 |
| | | | | | (ADA3 homolog, yeast)- |
| | | | | | like |
| TAF1 | | NM_004606 | 997 | Other | TAF1 RNA polymerase II, |
| | | | | | TATA box binding protein |
| | | | | | (TBP)-associated factor, |
| | | | | | 250 kDa |
| TAF10 | | NM_006284 | 998 | Other | TAF10 RNA polymerase |
| | | | | | II, TATA box binding |
| | | | | | protein (TBP)-associated |
| | | | | | factor, 30 kDa |
| TAF11 | | NM_005643 | 999 | Other | TAF11 RNA polymerase |
| | | | | | II, TATA box binding |
| | | | | | protein (TBP)-associated |
| | | | | | factor, 28 kDa |
| TAF12 | | NM_005644 | 1000 | Other | TAF12 RNA polymerase |
| | | | | | II, TATA box binding |
| | | | | | protein (TBP)-associated |
| | | | | | factor, 20 kDa |
| TAF13 | | NM_005645 | 1001 | Other | TAF13 RNA polymerase |
| | | | | | II, TATA box binding |
| | | | | | protein (TBP)-associated |
| | | | | | factor, 18 kDa |
| TAF15 | | NM_003487 | 1002 | Other | TAF15 RNA polymerase |
| | | | | | II, TATA box binding |
| | | | | | protein (TBP)-associated |
| | | | | | factor, 68 kDa |
| TAF1A | | NM_005681 | 1003 | Other | TATA box binding protein |
| | | | | | (TBP)-associated factor, |
| | | | | | RNA polymerase I, A, |
| | | | | | 48 kDa |
| TAF1B | | L39061 | 1004 | Other | TATA box binding protein |
| | | | | | (TBP)-associated factor, |
| | | | | | RNA polymerase 1, B, |
| | | | | | 63 kDa |
| TAF1C | | NM_005679 | 1005 | Other | TATA box binding protein |
| | | | | | (TBP)-associated factor, |
| | | | | | RNA polymerase I, C, |
| | | | | | 110 kDa |
| TAF2 | | NM_003184 | 1006 | Other | TAF2 RNA polymerase II, |
| | | | | | TATA box binding protein |
| | | | | | (TBP)-associated factor, |
| | | | | | 150 kDa |
| TAF3 | | AJ292190 | 1007 | Other | TAF3 RNA polymerase II, |
| | | | | | TATA box binding protein |
| | | | | | (TBP)-associated factor, |
| | | | | | 140 kDa |
| TAF4 | | NM_003185 | 1008 | Other | TAF4 RNA polymerase II, |
| | | | | | TATA box binding protein |
| | | | | | (TBP)-associated factor, |
| | | | | | 135 kDa |
| TAF4B | | Y09321 | 1009 | Other | TAF4b RNA polymerase |
| | | | | | II, TATA box binding |
| | | | | | protein (TBP)-associated |
| | | | | | factor, 80 kDa |
| TAF6L | | NM_006473 | 1010 | Co-activator | TAF6-like RNA |
| | | | | | polymerase II, p300/CBP- |
| | | | | | associated factor (PCAF)- |
| | | | | | associated factor, 65 kDa |
| TAF7 | | NM_005642 | 1011 | Other | TAF7 RNA polymerase II, |
| | | | | | TATA box binding protein |
| | | | | | (TBP)-associated factor, |
| | | | | | 55 kDa |
| TAF9 | | NM_003187 | 1012 | Other | TAF9 RNA polymerase II, |
| | | | | | TATA box binding protein |
| | | | | | (TBP)-associated factor, |
| | | | | | 32 kDa |
| TAL1 | | NM_003189 | 1013 | bHLH | T-cell acute lymphocytic |
| | | | | | leukemia 1 |
| TAL2 | | NM_005421 | 1014 | bHLH | T-cell acute lymphocytic |
| | | | | | leukemia 2 |
| TBP | | NM_003194 | 1015 | Other | TATA box binding protein |
| TBPL1 | | NM_004865 | 1016 | Other | TBP-like 1 |
| TBR1 | | NM_006593 | 1017 | T-box | T-box, brain, 1 |
| TBX1 | | NM_005992 | 1018 | T-box | T-box 1 |
| TBX10 | | AF033579 | 1019 | T-box | T-box 10 |
| TBX15 | | NM_152380 | 1020 | T-box | T-box 15 |
| TBX18 | | AJ010278 | 1021 | T-box | T-box 18 |
| TBX19 | | NM_005149 | 1022 | T-box | T-box 19 |
| TBX2 | | NM_005994 | 1023 | T-box | T-box 2 |
| TBX20 | | AJ237589 | 1024 | T-box | T-box 20 |
| TBX21 | | NM_013351 | 1025 | T-box | T-box 21 |
| TBX22 | | NM_016954 | 1026 | T-box | T-box 22 |
| TBX3 | | NM_005996 | 1027 | T-box | T-box 3 (ulnar mammary |
| | | | | | syndrome) |
| TBX4 | | NM_018488 | 1028 | T-box | T-box 4 |
| TBX5 | | NM_000192 | 1029 | T-box | T-box 5 |
| TBX6 | | NM_004608 | 1030 | T-box | T-box 6 |
| TCEAL1 | | NM_004780 | 1031 | ZnF-Other | transcription elongation |
| | | | | | factor A (SII)-like 1 |
| TCERG1 | | NM_006706 | 1032 | Other | transcription elongation |
| | | | | | regulator 1 (CA150) |
| TCF1 | | NM_000545 | 1033 | Homeobox | transcription factor 1, |
| | | | | | hepatic; LF-B1, hepatic |
| | | | | | nuclear factor (HNF1), |
| | | | | | albumin proximal factor |
| TCF12 | | NM_003205 | 1034 | bHLH | transcription factor 12 |
| | | | | | (HTF4, helix-loop-helix |
| | | | | | transcription factors 4) |
| TCF15 | | NM_004609 | 1035 | bHLH | transcription factor 15 |
| | | | | | (basic helix-loop-helix) |
| TCF19 | | NM_007109 | 1036 | Other | transcription factor 19 |
| | | | | | (SC1) |
| TCF7 | | NM_003202 | 1037 | scaffold- | transcription factor 2, (T- |
| | | | | HMG | cell specific, HMG-box) |
| TCF7L1 | | X62870 | 1038 | Beta-scaffold- | transcription factor 7-like |
| | | | | HMG | 1 (T-cell specific, HMG- |
| | | | | | box) |
| TCF7L2 | | NM_030756 | 1039 | Beta-scaffold- | transcription factor 7-like |
| | | | | HMG | 2 (T-cell specific, HMG- |
| | | | | | box) |
| TCF8 | | NM_030751 | 1040 | ZnF—C2H2 | transcription factor 8 |
| | | | | | (represses interleukin 2 |
| | | | | | expression) |
| TCFL1 | | NM_005997 | 1041 | Other | transcription factor-like 1 |
| TCFL4 | | NM_013383 | 1042 | bHLH | transcription factor-like 4 |
| TCFL5 | | NM_006602 | 1043 | bHLH | transcription factor-like 5 |
| | | | | | (basic helix-loop-helix) |
| TEAD1 | | NM_021961 | 1044 | TEA | TEA domain family |
| | | | | | member 1 (SV40 |
| | | | | | transcriptional enhancer |
| | | | | | factor) |
| TEAD2 | | NM_003598 | 1045 | TEA | TEA domain family |
| | | | | | member 2 |
| TEAD3 | | NM_003214 | 1046 | TEA | TEA domain family |
| | | | | | member 3 |
| TEAD4 | | NM_003213 | 1047 | TEA | TEA domain family |
| | | | | | member 4 |
| TEF | | NM_003216 | 1048 | bZIP | thyrotrophic embryonic |
| | | | | | factor |
| TEL2 | | NM_016135 | 1049 | Trp cluster- | ets transcription factor |
| | | | | Ets | TEL2 |
| TEX27 | | NM_021943 | 1050 | ZnF-AN1 | testis expressed sequence |
| | | | | | 27 |
| TFAM | | NM_012251 | 1051 | Beta-scaffold- | transcription factor A, |
| | | | | HMG | mitochondrial |
| TFAP2A | | NM_003220 | 1052 | AP-2 | transcription factor AP-2 |
| | | | | | alpha (activating enhancer |
| | | | | | binding protein 2 alpha) |
| TFAP2B | | NM_003221 | 1053 | AP-2 | transcription factor AP-2 |
| | | | | | beta (activating enhancer |
| | | | | | binding protein 2 beta) |
| TFAP2BL1 | | NM_172238 | 1054 | AP-2 | transcription factor AP-2 |
| | | | | | beta (activating enhancer |
| | | | | | binding protein 2 beta)- |
| | | | | | like 1 |
| TFAP2C | | NM_003222 | 1055 | AP-2 | transcription factor AP-2 |
| | | | | | gamma (activating |
| | | | | | enhancer binding protein 2 |
| | | | | | gamma) |
| TFAP4 | | NM_003223 | 1056 | bHLH | transcription factor AP-4 |
| | | | | | (activating enhancer |
| | | | | | binding protein 4) |
| TFB1M | | NM_016020 | 1057 | Other | transcription factor B1, |
| | | | | | mitochondrial |
| TFB2M | | NM_022366 | 1058 | Other | transcription factor B2, |
| | | | | | mitochondrial |
| TFCP2 | | NM_005653 | 1059 | Beta-scaffold- | transcription factor CP2 |
| | | | | grainyhead | |
| TFE3 | | NM_006521 | 1060 | bHLH | transcription factor |
| | | | | | binding to IGHM |
| | | | | | enhancer 3 |
| TFEB | | BC006225 | 1061 | bHLH | transcription factor EB |
| TFEC | | NM_012252 | 1062 | bHLH | transcription factor EC |
| TGFB1I1 | | NM_015927 | 1063 | Co-activator | transforming growth factor |
| | | | | | beta 1 induced transcript 1 |
| TGIF | | NM_003244 | 1064 | Homeobox | TGFB-induced factor |
| | | | | | (TALE family homeobox) |
| THG-1 | | AJ133115 | 1065 | bZIP | TSC-22-like |
| THRA | | NM_003250 | 1066 | NHR | thyroid hormone receptor, |
| | | | | | alpha (erythroblastic |
| | | | | | leukemia viral (v-erb-a) |
| | | | | | oncogene homolog, avian) |
| THRAP4 | | NM_014815 | 1067 | Co-activator | thyroid hormone receptor |
| | | | | | associated protein 4 |
| THRB | | NM_000461 | 1068 | NHR | thyroid hormone receptor, |
| | | | | | beta (erythroblastic |
| | | | | | leukemia viral (v-erb-a) |
| | | | | | oncogene homolog 2, |
| | | | | | avian) |
| TIEG | | NM_005655 | 1069 | ZnF—C2H2 | TGFB inducible early |
| | | | | | growth response |
| TIEG2 | | NM_003597 | 1070 | ZnF—C2H2 | TGFB inducible early |
| | | | | | growth response 2 |
| TIF1 | | NM_003852 | 1071 | Structural | transcriptional |
| | | | | | intermediary factor 1 |
| TIMELESS | | NM_003920 | 1072 | Other | timeless homolog |
| | | | | | (Drosophila) |
| TIP120A | | NM_018448 | 1073 | Co-activator | TBP-interacting protein |
| TITF1 | | NM_003317 | 1074 | Homeobox | thyroid transcription factor 1 |
| TIX1 | | AB007855 | 1075 | Homeobox | triple homeobox 1 |
| TIZ | NT_033317:106 | NM_138330 | 1076 | ZnF—C2H2 | TRAF6-inhibitory zinc |
| | | | | | finger protein |
| TLX1 | | NM_005521 | 1077 | Homeobox | T-cell leukemia, |
| | | | | | homeobox 1 |
| TLX2 | | NM_001534 | 1078 | Homeobox | T-cell leukemia, |
| | | | | | homeobox 2 |
| TLX3 | | NM_021025 | 1079 | Homeobox | T-cell leukemia, |
| | | | | | homeobox 3 |
| TMF1 | | NM_007114 | 1080 | Other | TATA element |
| | | | | | modulatory factor 1 |
| TNRC11 | | NM_005120 | 1081 | Co-activator | trinucleotide repeat |
| | | | | | containing 11 (THR- |
| | | | | | associated protein, 230 kDa |
| | | | | | subunit) |
| TNRC17 | | U80752.1 | 1082 | Other | trinucleotide repeat |
| | | | | | containing 17 |
| TNRC18 | | U80753 | 1083 | Other | trinucleotide repeat |
| | | | | | containing 18 |
| TNRC21 | | U80756 | 1084 | Other | trinucleotide repeat |
| | | | | | containing 21 |
| TNRC3 | | NM_005878 | 1085 | Other | trinucleotide repeat |
| | | | | | containing 3 |
| TP53 | | NM_000546 | 1086 | Beta-scaffold- | tumor protein P53 (Li- |
| | | | | p53 | Fraumeni syndrome) |
| TP53BP2 | NT_004525:42 | NM_005426 | 1087 | Co-repressor | tumor protein p53 binding |
| | | | | | protein, 2 |
| TP63 | | NM_003722 | 1088 | Beta-scaffold- | tumor protein p63 |
| | | | | p53 | |
| TP73 | | NM_005427 | 1089 | Beta-scaffold- | tumor protein p73 |
| | | | | p53 | |
| TRAP150 | | NM_005119 | 1090 | Co-activator | thyroid hormone receptor- |
| | | | | | associated protein, 150 kDa |
| | | | | | subunit |
| TRAP95 | | NM_005481 | 1091 | Co-activator | thyroid hormone receptor- |
| | | | | | associated protein, 95-kD |
| | | | | | subunit |
| TRERF1 | NT_007592:3400 | NM_018415 | 1092 | ZnF—C2H2 | transcriptional regulating |
| | | | | | factor 1 |
| TRIM10 | | NM_006778 | 1093 | Structural | tripartite motif-containing |
| | | | | | 10 |
| TRIM14 | NT_033216:170 | NM_014788 | 1094 | Structural | tripartite motif-containing |
| | | | | | 14 |
| TRIM15 | | NM_033229 | 1095 | Structural | tripartite motif-containing |
| | | | | | 15 |
| TRIM16 | NT_010718:517 | NM_006470 | 1096 | Structural | tripartite motif-containing |
| | | | | | 16 |
| TRIM17 | NT_004908:93 | NM_016102 | 1097 | Structural | tripartite motif-containing |
| | | | | | 17 |
| TRIM22 | | NM_006074 | 1098 | Structural | tripartite motif-containing |
| | | | | | 22 |
| TRIM26 | | NM_003449 | 1099 | Structural | tripartite motif-containing |
| | | | | | 26 |
| TRIM28 | | NM_005762 | 1100 | Structural | tripartite motif-containing |
| | | | | | 28 |
| TRIM29 | NT_033899:65 | NM_012101 | 1101 | Structural | tripartite motif-containing |
| | | | | | 29 |
| TRIM3 | | NM_006458 | 1102 | ZnF-Other | tripartite motif-containing 3 |
| TRIM31 | NT_034873:26 | NM_007028 | 1103 | Structural | tripartite motif-containing |
| | | | | | 31 |
| TRIM33 | | NM_015906 | 1104 | Structural | tripartite motif-containing |
| | | | | | 33 |
| TRIM34 | NT_03508:27a | NM_021616 | 1105 | Structural | tripartite motif-containing |
| | | | | | 34 |
| TRIM35 | NT_007988:5 | NM_015066 | 1106 | Structural | tripartite motif-containing |
| | | | | | 35 |
| TRIM38 | | NM_006355 | 1107 | ZnF-Other | tripartite motif-containing |
| | | | | | 38 |
| TRIM39 | NT_033951:12 | NM_021253 | 1108 | Structural | tripartite motif-containing |
| | | | | | 39 |
| TRIM4 | NT_007933:2024 | NM_033017 | 1109 | Structural | tripartite motif-containing 4 |
| TRIM40 | NT_007592:1918 | NM_138700 | 1110 | Structural | tripartite motif-containing |
| | | | | | 40 |
| TRIM41 | NT_006519:206 | NM_201627 | 1111 | Structural | tripartite motif-containing |
| | | | | | 41 |
| TRIM47 | NT_033292:11 | NM_033452 | 1112 | Structural | tripartite motif-containing |
| | | | | | 47 |
| TRIM48 | NT_033903:1 | NM_024114 | 1113 | Structural | tripartite motif-containing |
| | | | | | 48 |
| TRIM5 | NT_035080:27b | NM_033034 | 1114 | Structural | tripartite motif-containing 5 |
| TRIP11 | | NM_004239 | 1115 | Co-activator | thyroid hormone receptor |
| | | | | | interactor 11 |
| TRIP11 | | NM_004237 | 1116 | Co-activator | thyroid hormone receptor |
| | | | | | interactor 13 |
| TRIP15 | | NM_004236 | 1117 | Co-activator | thyroid receptor |
| | | | | | interacting protein 15 |
| TRIP4 | | NM_016213 | 1118 | Co-activator | thyroid hormone receptor |
| | | | | | interactor 4 |
| TRIP6 | | L40374 | 1119 | Co-activator | thyroid hormone receptor |
| | | | | | interactor 6 |
| TRIP8 | NT_008583:38 | NM_004241 | 1120 | Jumonji | thyroid hormone receptor |
| | | | | | interactor 8 |
| TRIP-Br2 | | NM_014755 | 1121 | Co-activator | transcriptional regulator |
| | | | | | interacting with the PHS- |
| | | | | | bromodomain 2 |
| TRPS1 | | NM_014112 | 1122 | ZnF-Other | trichorhinophalangeal |
| | | | | | syndrome I |
| TSC22 | | NM_006022 | 1123 | bZIP | transforming growth factor |
| | | | | | beta-stimulated protein |
| | | | | | TSC-22 |
| TUB | | NM_003320 | 1124 | Tubby | tubby homolog (mouse) |
| TULP1 | | NM_003322 | 1125 | Tubby | tubby like protein 1 |
| TULP2 | | NM_003323 | 1126 | Tubby | tubby like protein 2 |
| TULP3 | | NM_003324 | 1127 | Tubby | tubby like protein 3 |
| TULP4 | | NM_020245 | 1128 | Tubby | tubby like protein 4 |
| TWIST | | NM_000474 | 1129 | bHLH | Twist |
| TZFP | | NM_014383 | 1130 | ZnF- | testis zinc finger protein |
| | | | | BTB/POZ | |
| UBP1 | | NM_014517 | 1131 | Beta-scaffold- | upstream binding protein 1 |
| | | | | grainyhead | (LBP-1a) |
| UBTF | | NM_014233 | 1132 | Beta-scaffold- | upstream binding |
| | | | | HMG | transcription factor, RNA |
| | | | | | polymerase 1 |
| UHRF1 | | NM_013282 | 1133 | ZnF-PHD | ubiquitin-like, containing |
| | | | | | PHD and RING finger |
| URF2 | NT_008413:704 | NM_152306 | 1134 | ZnF-PHD | ubiquitin-like, containing |
| | | | | | PHD and RING finger |
| | | | | | domains 2 |
| USF1 | | NM_007122 | 1135 | bHLH | upstream transcription |
| | | | | | factor 1 |
| USF2 | | NM_003367 | 1136 | bHLH | upstream transcription |
| | | | | | factor 2, c-fos interacting |
| UTF1 | | NM_003577 | 1137 | bZIP | undifferentiated |
| | | | | | embryonic cell |
| | | | | | transcription factor 1 |
| VAX1 | | NM_199131 | 1138 | Homeobox | ventral anterior homeobox 1 |
| VAX2 | | NM_012476 | 1139 | Homeobox | ventral anterior homeobox 2 |
| VDR | | NM_000376 | 1140 | NHR | vitamin D (1,25- |
| | | | | | dihydroxyvitamin D3) |
| | | | | | receptor |
| VENTX2 | | NM_014468 | 1141 | Homeobox | VENT-like homeobox 2 |
| VIK | NT_007933:1990 | NM_024061 | 1142 | ZnF—C2H2 | vav-1 interacting Kruppel- |
| | | | | | like protein |
| cutoff | | | | | |
| YAF2 | | NM_005748 | 1143 | Co-repressor | YY1 associated factor 2 |
| YBX2 | | NM_015982 | 1144 | Beta-scaffold- | germ cell specific Y-box |
| | | | | cold-shock | binding protein |
| YY1 | | NM_003403 | 1145 | ZnF—C2H2 | YY1 transcription factor |
| ZAR1 | | NM_175619 | 1146 | Other | zygote arrest 1 |
| ZBTB1 | NT_025892:3338 | BC050719 | 1147 | ZnF- | zinc finger and BTB |
| | | | | BTB/POZ | domain containing 1 |
| ZBTB2 | NT_023451:235 | NM_020861 | 1148 | ZnF- | zinc finger and BTB |
| | | | | BTB/POZ | domain containing 2 |
| ZBTB4 | NT_035416:6 | NM_020899 | 1149 | ZnF—C2H2 | zinc finger and BTB |
| | | | | | domain containing 4 |
| ZDHHC1 | | U90653 | 1150 | ZnF-Other | zinc finger, DHHC |
| | | | | | domain containing 1 |
| ZF | | NM_021212 | 1151 | bZIP | HCF-binding transcription |
| | | | | | factor Zhangfei |
| ZF5128 | | NM_014347 | 1152 | ZnF—C2H2 | zinc finger protein |
| ZFD25 | | NM_016220 | 1153 | ZnF—C2H2 | zinc finger protein |
| | | | | | (ZFD25) |
| ZFH4 | NT_008055:104 | NM_024721 | 1154 | ZnF—C2H2 | zinc finger homeodomain 4 |
| ZFHX1B | | NM_014795 | 1155 | ZnF—C2H2 | zinc finger homeobox 1B |
| ZFHX2 | | AB051549 | 1156 | Homeobox | zinc finger homeobox 2 |
| ZFP | | NM_018651 | 1157 | ZnF—C2H2 | zinc finger protein |
| ZFP1 | NT_035368:196 | NM_153688 | 1158 | ZnF—C2H2 | zinc finger protein |
| | | | | | homolog |
| ZFP100 | | AL080143 | 1159 | ZnF—C2H2 | zinc finger protein |
| ZFP103 | | NM_005677 | 1160 | ZnF-Other | zinc finger protein 103 |
| | | | | | homolog (mouse) |
| ZFP106 | | NM_022473 | 1161 | ZnF—C2H2 | zinc finger protein 106 |
| ZFP161 | | NM_003409 | 1162 | ZnF- | zinc finger protein 161 |
| | | | | BTB/POZ | homolog (mouse) |
| ZFP26 | | NM_016422 | 1163 | ZnF-Other | C3HC4-like zinc finger |
| | | | | | protein |
| ZFP276 | NT_010542:164 | NM_152287 | 1164 | ZnF—C2H2 | zinc finger protein 276 |
| | | | | | homolog |
| ZFP28 | | AB037852 | 1165 | ZnF—C2H2 | zinc finger protein 28 |
| | | | | | homolog (mouse) |
| ZFP289 | | NM_032389 | 1166 | ZnF-Other | Seed zinc finger protein |
| | | | | | 289, ID1 regulated |
| ZFP29 | | NM_017894 | 1167 | ZnF—C2H2 | likely ortholog of mouse |
| | | | | | zinc finger protein 29 |
| ZFP318 | | NM_014345 | 1168 | ZnF-Other | Seed endocrine regulator |
| ZFP36 | | NM_003407 | 1169 | ZnF—C3H | zinc finger protein 36, |
| | | | | | C3H type, homolog |
| | | | | | (mouse) |
| ZFP37 | | NM_003408 | 1170 | ZnF—C2H2 | zinc finger protein 37 |
| | | | | | homolog (mouse) |
| ZFP42 | NT_022841:73 | NM_174900 | 1171 | ZnF—C2H2 | Found zinc finger protein |
| | | | | | 42 |
| ZFP64 | | NM_018197 | 1172 | ZnF—C2H2 | Seed zinc finger protein 64 |
| | | | | | homolog (mouse) |
| ZFP67 | | NM_015872 | 1173 | ZnF- | Seed zinc finger protein 67 |
| | | | | BTB/POZ | homolog (mouse) |
| ZFP91 | | AB056107 | 1174 | ZnF—C2H2 | zinc finger protein 91 |
| | | | | | homolog (mouse) |
| ZFP92 | | U82695 | 1175 | ZnF-Other | zinc finger protein 92 |
| | | | | | homolog (mouse) |
| ZFP95 | | NM_014569 | 1176 | ZnF—C2H2 | zinc finger protein 95 |
| | | | | | homolog (mouse) |
| ZFPL1 | | NM_006782 | 1177 | ZnF-PHD | zinc finger protein-like 1 |
| ZFPM1 | | NM_153813 | 1178 | ZnF—C2H2 | zinc finger protein, |
| | | | | | multitype 1 (FOG1) |
| ZFPM2 | | NM_012082 | 1179 | ZnF—C2H2 | zinc finger protein, |
| | | | | | multitype 2 (FOG2) |
| ZFR | | NM_016107 | 1180 | ZnF—C2H2 | zinc finger RNA binding |
| | | | | | protein |
| ZFX | | NM_003410 | 1181 | ZnF—C2H2 | zinc finger protein, X- |
| | | | | | linked |
| ZFY | | NM_003411 | 1182 | ZnF—C2H2 | zinc finger protein, Y- |
| | | | | | linked |
| ZHX1 | | NM_007222 | 1183 | Homeobox | zinc-fingers and |
| | | | | | homeoboxes 1 |
| ZHX2 | NT_023663:37 | NM_014943 | 1184 | Homeobox | zinc fingers and |
| | | | | | homeoboxes 2 |
| ZIC1 | | NM_003412 | 1185 | ZnF—C2H2 | Zic family member 1 |
| | | | | | (odd-paired homolog, |
| | | | | | Drosophila) |
| ZIC2 | | NM_007129 | 1186 | ZnF—C2H2 | Zic family member 2 |
| | | | | | (odd-paired homolog, |
| | | | | | Drosophila) |
| ZIC3 | | NM_003413 | 1187 | ZnF—C2H2 | Zic family member 3 |
| | | | | | heterotaxy 1 (odd-paired |
| | | | | | homolog, Drosophila) |
| ZIC4 | | NM_032153 | 1188 | ZnF—C2H2 | zinc finger protein of the |
| | | | | | cerebellum 4 |
| ZIC5 | | NM_033132 | 1189 | ZnF—C2H2 | zinc finger protein of the |
| | | | | | cerebellum 5 |
| ZID | | NM_006626 | 1190 | ZnF- | zinc finger protein with |
| | | | | BTB/POZ | interaction domain |
| ZIM2 | | NM_015363 | 1191 | ZnF—C2H2 | zinc finger, imprinted 2 |
| ZIM3 | NT_011104:125 | NM_052882 | 1192 | ZnF—C2H2 | zinc finger, imprinted 3 |
| ZNF10 | | NM_003419 | 1193 | ZnF—C2H2 | zinc finger protein 10 |
| | | | | | (KOX 1) |
| ZNF100 | NT_035560:167 | NM_173531 | 1194 | ZnF—C2H2 | zinc finger protein 100 |
| ZNF117 | | NM_024498 | 1195 | ZnF—C2H2 | zinc finger protein 117 |
| | | | | | (HPF9) |
| ZNF11A | | X68686 | 1196 | ZnF—C2H2 | zinc finger protein 11a |
| | | | | | (KOX 2) |
| ZNF11B | | X68684 | 1197 | ZnF—C2H2 | zinc finger protein 11b |
| | | | | | (KOX 2) |
| ZNF123 | | S52506 | 1198 | ZnF—C2H2 | zinc finger protein 123 |
| | | | | | (HZF-1) |
| ZNF124 | | NM_003431 | 1199 | ZnF—C2H2 | zinc finger protein 124 |
| | | | | | (HZF-16) |
| ZNF125 | | S52508 | 1200 | ZnF—C2H2 | zinc finger protein 125 |
| | | | | | (HZF-3) |
| ZNF126 | | S52507 | 1201 | ZnF—C2H2 | zinc finger protein 126 |
| | | | | | (HZF-2) |
| ZNF131 | | U09410 | 1202 | ZnF—C2H2 | zinc finger protein 131 |
| | | | | | (clone pHZ-10) |
| ZNF132 | | NM_003433 | 1203 | ZnF—C2H2 | zinc finger protein 132 |
| | | | | | (clone pHZ-12) |
| ZNF133 | | NM_003434 | 1204 | ZnF—C2H2 | zinc finger protein 133 |
| | | | | | (clone pHZ-13) |
| ZNF134 | | NM_003435 | 1205 | ZnF—C2H2 | zinc finger protein 134 |
| | | | | | (clone pHZ-15) |
| ZNF135 | | NM_003436 | 1206 | ZnF—C2H2 | zinc finger protein 135 |
| | | | | | (clone pHZ-17) |
| ZNF136 | | NM_003437 | 1207 | ZnF—C2H2 | zinc finger protein 136 |
| | | | | | (clone pHZ-20) |
| ZNF137 | | NM_003438 | 1208 | ZnF—C2H2 | zinc finger protein 137 |
| | | | | | (clone pHZ-30) |
| ZNF138 | | U09847 | 1209 | ZnF—C2H2 | zinc finger protein 138 |
| | | | | | (clone pHZ-32) |
| ZNF14 | | NM_021030 | 1210 | ZnF—C2H2 | zinc finger protein 14 |
| | | | | | (KOX 6) |
| ZNF140 | | NM_003440 | 1211 | ZnF—C2H2 | zinc finger protein 140 |
| | | | | | (clone pHZ-39) |
| ZNF141 | | NM_003441 | 1212 | ZnF—C2H2 | zinc finger protein 141 |
| | | | | | (clone pHZ-44) |
| ZNF142 | | NM_005081 | 1213 | ZnF—C2H2 | zinc finger protein 142 |
| | | | | | (clone pHZ-49) |
| ZNF143 | | NM_003442 | 1214 | ZnF—C2H2 | zinc finger protein 143 |
| | | | | | (clone pHZ-1) |
| ZNF144 | | NM_007144 | 1215 | ZnF-Other | zinc finger protein 144 |
| | | | | | (Mel-18) |
| ZNF145 | | NM_006006 | 1216 | ZnF- | zinc finger protein 145 |
| | | | | BTB/POZ | (Kruppel-like, expressed |
| | | | | | in promyelocytic |
| | | | | | leukemia) |
| ZNF146 | | NM_007145 | 1217 | ZnF—C2H2 | zinc finger protein 146 |
| ZNF147 | | NM_005082 | 1218 | Structural | zinc finger protein 147 |
| | | | | | (estrogen-responsive |
| | | | | | finger protein) |
| ZNF148 | | NM_021964 | 1219 | ZnF—C2H2 | zinc finger protein 148 |
| | | | | | (pHZ-52) |
| ZNF151 | | NM_003443 | 1220 | ZnF- | zinc finger protein 151 |
| | | | | BTB/POZ | (pHZ-67) |
| ZNF154 | | U20648 | 1221 | ZnF—C2H2 | zinc finger protein 154 |
| | | | | | (pHZ-92) |
| ZNF155 | | NM_003445 | 1222 | ZnF—C2H2 | zinc finger protein 155 |
| | | | | | (pHZ-96) |
| ZNF157 | | NM_003446 | 1223 | ZnF—C2H2 | zinc finger protein 157 |
| | | | | | (HZF22) |
| ZNF15L1 | | X52339 | 1224 | ZnF—C2H2 | zinc finger protein 15-like |
| | | | | | 1 (KOX 8) |
| ZNF16 | | NM_006958 | 1225 | ZnF—C2H2 | zinc finger protein 16 |
| | | | | | (KOX 9) |
| ZNF160 | | X78928 | 1226 | ZnF—C2H2 | zinc finger protein 160 |
| ZNF161 | | NM_007146 | 1227 | ZnF—C2H2 | zinc finger protein 161 |
| ZNF165 | | NM_003447 | 1228 | ZnF—C2H2 | zinc finger protein 165 |
| ZNF169 | | U28251 | 1229 | ZnF—C2H2 | zinc finger protein 169 |
| ZNF17 | | AB075827 | 1230 | ZnF—C2H2 | zinc finger protein 17 |
| | | | | | (HPF3, KOX 10) |
| ZNF174 | | NM_003450 | 1231 | ZnF—C2H2 | zinc finger protein 174 |
| ZNF175 | | NM_007147 | 1232 | ZnF—C2H2 | zinc finger protein 175 |
| ZNF177 | | NM_003451 | 1233 | ZnF—C2H2 | zinc finger protein 177 |
| ZNF179 | | NM_007148 | 1234 | ZnF-Other | zinc finger protein 179 |
| ZNF18 | | X52342 | 1235 | ZnF—C2H2 | zinc finger protein 18 |
| | | | | | (KOX 11) |
| ZNF180 | | NM_013256 | 1236 | ZnF—C2H2 | zinc finger protein 180 |
| | | | | | (HHZ168) |
| ZNF183 | | NM_006978 | 1237 | ZnF-Other | zinc finger protein 183 |
| | | | | | (RING finger, C3HC4 |
| | | | | | type) |
| ZNF183L1 | NT_009952:601 | NM_178861 | 1238 | ZnF—C3H | zinc finger protein 183- |
| | | | | | like 1 |
| ZNF184 | | U66561 | 1239 | ZnF—C2H2 | zinc finger protein 184 |
| | | | | | (Kruppel-like) |
| ZNF185 | | NM_007150 | 1240 | Co-activator | zinc finger protein 185 |
| | | | | | (LIM domain) |
| ZNF187 | | Z11773 | 1241 | ZnF—C2H2 | zinc finger protein 187 |
| ZNF189 | | NM_003452 | 1242 | ZnF—C2H2 | zinc finger protein 189 |
| ZNF19 | | NM_006961 | 1243 | ZnF—C2H2 | zinc finger protein 19 |
| | | | | | (KOX 12) |
| ZNF192 | | NM_006298 | 1244 | ZnF—C2H2 | zinc finger protein 192 |
| ZNF193 | | NM_006299 | 1245 | ZnF—C2H2 | zinc finger protein 193 |
| ZNF195 | | NM_007152 | 1246 | ZnF—C2H2 | zinc finger protein 195 |
| ZNF197 | | NM_006991 | 1247 | ZnF—C2H2 | zinc finger protein 197 |
| ZNF2 | | Z60152 | 1248 | ZnF—C2H2 | zinc finger protein 2 (A1-5) |
| ZNF20 | | AL080125 | 1249 | ZnF—C2H2 | zinc finger protein 20 |
| | | | | | (KOX 13) |
| ZNF200 | | NM_003454 | 1250 | ZnF—C2H2 | zinc finger protein 200 |
| ZNF202 | | NM_003455 | 1251 | ZnF—C2H2 | zinc finger protein 202 |
| ZNF205 | | NM_003456 | 1252 | ZnF—C2H2 | zinc finger protein 205 |
| ZNF207 | | NM_003457 | 1253 | ZnF—C2H2 | zinc finger protein 207 |
| ZNF208 | | NM_007153 | 1254 | ZnF—C2H2 | zinc finger protein 208 |
| ZNF21 | | X52345 | 1255 | ZnF—C2H2 | zinc finger protein 21 |
| | | | | | (KOX 14) |
| ZNF211 | | NM_006385 | 1256 | ZnF—C2H2 | zinc finger protein 211 |
| ZNF212 | | NM_012256 | 1257 | ZnF—C2H2 | zinc finger protein 212 |
| ZNF213 | | AF017433 | 1258 | ZnF—C2H2 | zinc finger protein 213 |
| ZNF214 | | NM_013249 | 1259 | ZnF—C2H2 | zinc finger protein 214 |
| ZNF215 | | NM_013250 | 1260 | ZnF—C2H2 | zinc finger protein 215 |
| ZNF216 | | NM_006007 | 1261 | ZnF-AN1 | zinc finger protein 216 |
| ZNF217 | | NM_006526 | 1262 | ZnF—C2H2 | zinc finger protein 217 |
| ZNF219 | | NM_016423 | 1263 | ZnF—C2H2 | zinc finger protein 219 |
| ZNF22 | | NM_006963 | 1264 | ZnF—C2H2 | zinc finger protein 22 |
| | | | | | (KOX 15) |
| ZNF220 | | NM_006766 | 1265 | ZnF-PHD | zinc finger protein 220 |
| ZNF221 | | NM_013359 | 1266 | ZnF—C2H2 | zinc finger protein 221 |
| ZNF222 | | NM_013360 | 1267 | ZnF—C2H2 | zinc finger protein 222 |
| ZNF223 | | NM_013361 | 1268 | ZnF—C2H2 | zinc finger protein 223 |
| ZNF224 | | NM_013398 | 1269 | ZnF—C2H2 | zinc finger protein 224 |
| ZNF225 | | NM_013362 | 1270 | ZnF—C2H2 | zinc finger protein 225 |
| ZNF226 | | NM_016444 | 1271 | ZnF—C2H2 | zinc finger protein 226 |
| ZNF228 | | NM_013380 | 1272 | ZnF—C2H2 | zinc finger protein 228 |
| ZNF229 | | AF192979 | 1273 | ZnF—C2H2 | zinc finger protein 229 |
| ZNF23 | | AL080123 | 1274 | ZnF—C2H2 | zinc finger protein 23 |
| | | | | | (KOX 16) |
| ZNF230 | | NM_006300 | 1275 | ZnF—C2H2 | zinc finger protein 230 |
| ZNF232 | | NM_014519 | 1276 | ZnF—C2H2 | zinc finger protein 232 |
| ZNF233 | NT_011109:135 | NM_181756 | 1277 | ZnF—C2H2 | zinc finger protein 233 |
| ZNF234 | | X78927 | 1278 | ZnF—C2H2 | zinc finger protein 234 |
| ZNF235 | | NM_004234 | 1279 | ZnF—C2H2 | zinc finger protein 235 |
| ZNF236 | | NM_007345 | 1280 | ZnF—C2H2 | zinc finger protein 236 |
| ZNF237 | | NM_014242 | 1281 | ZnF-Other | zinc finger protein 237 |
| ZNF238 | | NM_006352 | 1282 | ZnF—C2H2 | zinc finger protein 238 |
| ZNF239 | | NM_005674 | 1283 | ZnF—C2H2 | zinc finger protein 239 |
| ZNF24 | | NM_006965 | 1284 | ZnF—C2H2 | zinc finger protein 24 |
| | | | | | (KOX 17) |
| ZNF25 | | X52350 | 1285 | ZnF—C2H2 | zinc finger protein 25 |
| | | | | | (KOX 19) |
| ZNF253 | NT_011295:613 | NM_021047 | 1286 | ZnF—C2H2 | zinc finger protein 253 |
| ZNF254 | | NM_004876 | 1287 | ZnF—C2H2 | zinc finger protein 254 |
| ZNF255 | | NM_005774 | 1288 | ZnF—C2H2 | zinc finger protein 255 |
| ZNF256 | | NM_005773 | 1289 | ZnF—C2H2 | zinc finger protein 256 |
| ZNF257 | NT_033317:9 | NM_033468 | 1290 | ZnF—C2H2 | zinc finger protein 257 |
| ZNF258 | | NM_007167 | 1291 | ZnF-Other | zinc finger protein 258 |
| ZNF259 | | NM_003904 | 1292 | ZnF-Other | zinc finger protein 259 |
| ZNF26 | | NM_019591 | 1293 | ZnF—C2H2 | zinc finger protein 26 |
| | | | | | (KOX 20) |
| ZNF261 | | NM_005096 | 1294 | ZnF-Other | zinc finger protein 261 |
| ZNF262 | | NM_005095 | 1295 | ZnF-Other | zinc finger protein 262 |
| ZNF263 | | NM_005741 | 1296 | ZnF—C2H2 | zinc finger protein 263 |
| ZNF264 | | NM_003417 | 1297 | ZnF—C2H2 | zinc finger protein 264 |
| ZNF265 | | NM_005455 | 1298 | ZnF-Other | zinc finger protein 265 |
| ZNF266 | | X78924 | 1299 | ZnF—C2H2 | zinc finger protein 266 |
| ZNF267 | | NM_003414 | 1300 | ZnF—C2H2 | zinc finger protein 267 |
| ZNF268 | | AF317549 | 1301 | ZnF—C2H2 | zinc finger protein 268 |
| ZNF271 | | NM_006629 | 1302 | ZnF—C2H2 | zinc finger protein 271 |
| ZNF272 | | X78931 | 1303 | ZnF—C2H2 | zinc finger protein 272 |
| ZNF273 | | X78932 | 1304 | ZnF—C2H2 | zinc finger protein 273 |
| ZNF274 | | NM_016324 | 1305 | ZnF—C2H2 | zinc finger protein 274 |
| ZNF275 | | NM_020636 | 1306 | ZnF—C2H2 | zinc finger protein 275 |
| ZNF277 | | NM_021994 | 1307 | ZnF—C2H2 | zinc finger protein (C2H2 |
| | | | | | type) 277 |
| ZNF278 | | NM_014323 | 1308 | ZnF- | zinc finger protein 278 |
| | | | | BTB/POZ | |
| ZNF281 | | NM_012482 | 1309 | ZnF—C2H2 | zinc finger protein 281 |
| ZNF282 | | D30612 | 1310 | ZnF—C2H2 | zinc finger protein 282 |
| ZNF286 | | NM_020652 | 1311 | ZnF—C2H2 | zinc finger protein 286 |
| ZNF287 | | NM_020653 | 1312 | ZnF—C2H2 | zinc finger protein 287 |
| ZNF288 | | NM_015642 | 1313 | ZnF- | zinc finger protein 288 |
| | | | | BTB/POZ | |
| ZNF29 | | X52357 | 1314 | ZnF—C2H2 | zinc finger protein 29 |
| | | | | | (KOX 26) |
| ZNF294 | | AB018257 | 1315 | ZnF-Other | zinc finger protein 294 |
| ZNF295 | | NM_020727 | 1316 | ZnF- | zinc finger protein 295 |
| | | | | BTB/POZ | |
| ZNF297 | | NM_005453 | 1317 | ZnF- | zinc finger protein 297 |
| | | | | BTB/POZ | |
| ZNF297B | | NM_014007 | 1318 | ZnF- | zinc finger protein 297B |
| | | | | BTB/POZ | |
| ZNF3 | | NM_017715 | 1319 | ZnF—C2H2 | zinc finger protein 3 (A8-51) |
| ZNF30 | | X52359 | 1320 | ZnF—C2H2 | zinc finger protein 30 |
| | | | | | (KOX 28) |
| ZNF300 | NT_006859:367 | NM_052860 | 1321 | ZnF—C2H2 | zinc finger protein 300 |
| ZNF302 | NT_011196:498 | NM_018443 | 1322 | ZnF—C2H2 | zinc finger protein 302 |
| ZNF304 | | NM_020657 | 1323 | ZnF—C2H2 | zinc finger protein 304 |
| ZNF305 | | NM_014724 | 1324 | ZnF—C2H2 | zinc finger protein 305 |
| ZNF306 | | NM_024493 | 1325 | ZnF—C2H2 | zinc finger protein 306 |
| ZNF31 | | NM_145238 | 1326 | ZnF—C2H2 | zinc finger protein 31 |
| | | | | | (KOX 29) |
| ZNF313 | | NM_018683 | 1327 | ZnF-Other | zinc finger protein 313 |
| ZNF317 | NT_011176:75 | NM_020933 | 1328 | ZnF—C2H2 | zinc finger protein 317 |
| ZNF319 | | AB037809 | 1329 | ZnF—C2H2 | zinc finger protein 319 |
| ZNF32 | | NM_006973 | 1330 | ZnF—C2H2 | zinc finger protein 32 |
| | | | | | (KOX 30) |
| ZNF322A | NT_007592:1565 | NM_024639 | 1331 | ZnF-PHD | zinc finger protein 322A |
| ZNF323 | NT_007592:1771 | NM_030899 | 1332 | ZnF—C2H2 | zinc finger protein 323 |
| ZNF325 | | NM_016265 | 1333 | ZnF—C2H2 | zinc finger protein 325 |
| ZNF333 | NT_025155:3 | NM_032433 | 1334 | ZnF—C2H2 | zinc finger protein 333 |
| ZNF334 | | NM_018102 | 1335 | ZnF—C2H2 | zinc finger protein 334 |
| ZNF335 | NT_011362:859 | NM_022095 | 1336 | ZnF—C2H2 | zinc finger protein 335 |
| ZNF336 | NT_011387:1856 | NM_022482 | 1337 | ZnF—C2H2 | zinc finger protein 336 |
| ZNF337 | | AL049942 | 1338 | ZnF—C2H2 | zinc finger protein 337 |
| ZNF339 | NT_011387:1400 | NM_021220 | 1339 | ZnF—C2H2 | zinc finger protein 339 |
| ZNF33A | | X68687 | 1340 | ZnF—C2H2 | zinc finger protein 33a |
| | | | | | (KOX 31) |
| ZNF341 | NT_028392:330 | NM_032819 | 1341 | ZnF—C2H2 | zinc finger protein 341 |
| ZNF342 | NT_011109:256 | NM_145288 | 1342 | ZnF—C2H2 | zinc finger protein 342 |
| ZNF347 | NT_011109:1491 | NM_032584 | 1343 | ZnF—C2H2 | zinc finger protein 347 |
| ZNF35 | | NM_003420 | 1344 | ZnF—C2H2 | zinc finger protein 35 |
| | | | | | (clone HF.10) |
| ZNF350 | NT_011109:1276 | NM_021632 | 1345 | ZnF—C2H2 | zinc finger protein 350 |
| ZNF354A | | NM_005649 | 1346 | ZnF—C2H2 | zinc finger protein 354A |
| ZNF358 | | NM_018083 | 1347 | ZnF—C2H2 | zinc finger protein 358 |
| ZNF36 | | U09848 | 1348 | ZnF—C2H2 | zinc finger protein 36 |
| | | | | | (KOX 18) |
| ZNF361 | | NM_018555 | 1349 | ZnF—C2H2 | zinc finger protein 361 |
| ZNF364 | | AL079314 | 1350 | ZnF-Other | zinc finger protein 364 |
| ZNF366 | NT_006713:99 | NM_152625 | 1351 | ZnF—C2H2 | zinc finger protein 366 |
| ZNF37A | | X69115 | 1352 | ZnF—C2H2 | zinc finger protein 37a |
| | | | | | (KOX 21) |
| ZNF37A | NT_033896:447 | AJ492195 | 1353 | ZnF—C2H2 | zinc finger protein 37a |
| | | | | | (KOX21) |
| ZNF38 | | NM_032924 | 1354 | ZnF—C2H2 | zinc finger protein 38 |
| ZNF382 | NT_011192:90 | NM_032825 | 1355 | ZnF—C2H2 | zinc finger protein |
| | | | | | ZNF382 |
| ZNF384 | NT_009731:144 | NM_133476 | 1356 | ZnF—C2H2 | zinc finger protein 384 |
| ZNF394 | NT_007933:1972 | NM_032164 | 1357 | ZnF—C2H2 | zinc finger protein 394 |
| ZNF396 | NT_010934:143 | NM_145756 | 1358 | ZnF—C2H2 | zinc finger protein 396 |
| ZNF397 | NT_010934:119 | NM_032347 | 1359 | ZnF—C2H2 | zinc finger protein 397 |
| ZNF398 | NT_007914:756 | NM_020781 | 1360 | ZnF—C2H2 | zinc finger protein 398 |
| ZNF406 | NT_007994:1 | AB040918 | 1361 | ZnF—C2H2 | zinc finger protein 406 |
| ZNF407 | NT_025004:1 | NM_017757 | 1362 | ZnF—C2H2 | zinc finger protein 407 |
| ZNF408 | | NM_024741 | 1363 | ZnF—C2H2 | zinc finger protein 408 |
| ZNF409 | NT_025892:468 | AB028979 | 1364 | ZnF—C2H2 | zinc finger protein 409 |
| ZNF41 | | M92443 | 1365 | ZnF—C2H2 | zinc finger protein 41 |
| ZNF42 | | NM_003422 | 1366 | ZnF—C2H2 | zinc finger protein 42 |
| | | | | | (myeloid-specific retinoic |
| | | | | | acid-responsive) |
| ZNF426 | NT_011176:123 | NM_024106 | 1367 | ZnF—C2H2 | zinc finger protein 426 |
| ZNF43 | | NM_003423 | 1368 | ZnF—C2H2 | zinc finger protein 43 |
| | | | | | (HTF6) |
| ZNF431 | NT_035560:82 | NM_133473 | 1369 | ZnF—C2H2 | zinc finger protein 431 |
| ZNF433 | NT_011176:487 | NM_152602 | 1370 | ZnF—C2H2 | zinc finger protein 433 |
| ZNF434 | NT_010552:596 | NM_017810 | 1371 | ZnF—C2H2 | zinc finger protein 434 |
| ZNF435 | NT_007592:1726 | NM_025231 | 1372 | ZnF—C2H2 | zinc finger protein 435 |
| ZNF436 | NT_032979:37 | NM_030634 | 1373 | ZnF—C2H2 | zinc finger protein 436 |
| ZNF44 | | X16281 | 1374 | ZnF—C2H2 | zinc finger protein 44 |
| | | | | | (KOX 7) |
| ZNF440 | NT_011176:446 | NM_152357 | 1375 | ZnF-AN1 | zinc finger protein 440 |
| ZNF443 | | NM_005815 | 1376 | ZnF—C2H2 | zinc finger protein 443 |
| ZNF445 | NT_034534:46 | NM_181489 | 1377 | ZnF—C2H2 | zinc finger protein 445 |
| ZNF45 | | NM_003425 | 1378 | ZnF—C2H2 | zinc finger protein 45 (a |
| | | | | | Kruppel-associated box |
| | | | | | (KRAB) domain |
| | | | | | polypeptide) |
| ZNF454 | NT_006802:20 | NM_182594 | 1379 | ZnF—C2H2 | zinc finger protein 454 |
| ZNF46 | | NM_006977 | 1380 | ZnF- | zinc finger protein 46 |
| | | | | BTB/POZ | (KUP) |
| ZNF481 | NT_017568:1387 | NM_020924 | 1381 | ZnF- | zinc finger protein 481 |
| | | | | BTB/POZ | |
| ZNF486 | NT_035560:14 | BC008936 | 1382 | ZnF—C2H2 | zinc finger protein 486 |
| ZNF490 | NT_011176:576 | NM_020714 | 1383 | ZnF—C2H2 | zinc finger protein 490 |
| ZNF491 | NT_011176:438 | NM_152356 | 1384 | ZnF—C2H2 | zinc finger protein 491 |
| ZNF493 | NT_035560:126b | NM_175910 | 1385 | ZnF—C2H2 | zinc finger protein 493 |
| ZNF494 | NT_011104:214 | NM_152677 | 1386 | ZnF—C2H2 | zinc finger protein 494 |
| ZNF495 | NT_011104:32a | NM_024303 | 1387 | ZnF—C2H2 | zinc finger protein 495 |
| ZNF496 | NT_031730:64 | NM_032752 | 1388 | ZnF—C2H2 | zinc finger protein 496 |
| ZNF497 | NT_011104:359 | NM_198458 | 1389 | ZnF—C2H2 | zinc finger protein 497 |
| ZNF498 | NT_007933:1998 | NM_145115 | 1390 | ZnF—C2H2 | zinc finger protein 498 |
| ZNF502 | NT_034534:1 | NM_033210 | 1391 | ZnF—C2H2 | zinc finger protein 502 |
| ZNF503 | NT_033890:224 | NM_032772 | 1392 | ZnF—C2H2 | zinc finger protein 503 |
| ZNF509 | NT_006051:22 | NM_145291 | 1393 | ZnF- | zinc finger protein 509 |
| | | | | BTB/POZ | |
| ZNF513 | NT_005204:559 | NM_144631 | 1394 | ZnF—C2H2 | zinc finger protein 513 |
| ZNF514 | NT_022300:33 | NM_032788 | 1395 | ZnF—C2H2 | zinc finger protein 514 |
| ZNF519 | NT_010859:601 | NM_145287 | 1396 | ZnF—C2H2 | zinc finger protein 519 |
| ZNF528 | NT_011109:1343 | NM_032423 | 1397 | ZnF—C2H2 | zinc finger protein 528 |
| ZNF6 | | NM_021998 | 1398 | ZnF—C2H2 | zinc finger protein 6 |
| | | | | | (CMPX1) |
| ZNF7 | | NM_003416 | 1399 | ZnF—C2H2 | zinc finger protein 7 |
| | | | | | (KOX 4, clone HF.16) |
| ZNF71 | NT_011104:94 | NM_021216 | 1400 | ZnF—C2H2 | zinc finger protein 71 |
| | | | | | (Cos26) |
| ZNF73 | | NM_012480 | 1401 | ZnF—C2H2 | zinc finger protein 73 |
| | | | | | (Cos12) |
| ZNF74 | | NM_003426 | 1402 | ZnF—C2H2 | zinc finger protein 74 |
| | | | | | (Cos52) |
| ZNF75 | NT_011786:383 | NM_007131 | 1403 | ZnF—C2H2 | zinc finger protein 75 |
| | | | | | (D8C6) |
| ZNF75A | | NM_153028 | 1404 | ZnF—C2H2 | zinc finger protein 75a |
| ZNF76 | | NM_003427 | 1405 | ZnF—C2H2 | zinc finger protein 76 |
| | | | | | (expressed in testis) |
| ZNF77 | NT_011255:4 | NM_021217 | 1406 | ZnF—C2H2 | zinc finger protein 77 |
| | | | | | (pT1) |
| ZNF79 | | NM_007135 | 1407 | ZnF—C2H2 | zinc finger protein 79 |
| | | | | | (pT7) |
| ZNF8 | | M29581 | 1408 | ZnF—C2H2 | zinc-finger protein 8 |
| | | | | | (clone HF.18) |
| ZNF80 | | NM_007136 | 1409 | ZnF—C2H2 | zinc finger protein 80 |
| | | | | | (pT17) |
| ZNF81 | | X68011 | 1410 | ZnF—C2H2 | zinc finger protein 81 |
| | | | | | (HFZ20) |
| ZNF83 | | NM_018300 | 1411 | ZnF—C2H2 | zinc finger protein 83 |
| | | | | | (HPF1) |
| ZNF84 | | NM_003428 | 1412 | ZnF—C2H2 | zinc finger protein 84 |
| | | | | | (HPF2) |
| ZNF85 | | NM_003429 | 1413 | ZnF—C2H2 | zinc finger protein 85 |
| | | | | | (HPF4, HTF1) |
| ZNF9 | | NM_003418 | 1414 | ZnF-Other | zinc finger protein 9 (a |
| | | | | | cellular retroviral nucleic |
| | | | | | acid binding protein) |
| ZNF90 | | M61870 | 1415 | ZnF—C2H2 | zinc finger protein 90 |
| | | | | | (HTF9) |
| ZNF91 | | NM_003430 | 1416 | ZnF—C2H2 | zinc finger protein 91 |
| | | | | | (HPF7, HTF10) |
| ZNF92 | | M61872 | 1417 | ZnF—C2H2 | zinc finger protein 92 |
| | | | | | (HTF12) |
| ZNF93 | | M61873 | 1418 | ZnF—C2H2 | zinc finger protein 93 |
| | | | | | (HTF34) |
| ZNF-kaiso | | NM_006777 | 1419 | ZnF- | Kaiso |
| | | | | BTB/POZ | |
| ZNFN1A1 | | NM_006060 | 1420 | ZnF—C2H2 | zinc finger protein, |
| | | | | | subfamily 1A, 1 (Ikaros) |
| ZNFN1A2 | | NM_016260 | 1421 | ZnF—C2H2 | zinc finger protein, |
| | | | | | subfamily 1A, 2 (Helios) |
| ZNFN1A3 | | NM_012481 | 1422 | ZnF—C2H2 | zinc finger protein, |
| | | | | | subfamily 1A, 3 (Aiolos) |
| ZNFN1A4 | NT_009458:35 | NM_022465 | 1423 | ZnF-MYND | zinc finger protein, |
| | | | | | subfamily 1A, 4 (Eos) |
| ZNF- | | NM_014415 | 1424 | ZnF- | zinc finger protein |
| U69274 | | | | BTB/POZ | |
| ZNRF1 | NT_035368:168 | NM_032268 | 1425 | ZnF-Other | zinc and ring finger |
| | | | | | Protein 1 |
| ZXDA | | L14787 | 1426 | ZnF—C2H2 | zinc finger, X-linked, |
| | | | | | duplicated A |
| ZXDB | | L14788 | 1427 | ZnF—C2H2 | zinc finger, X-linked, |
| | | | | | duplicated B |
| ZYX | NT_007914:428 | NM_003461 | 1428 | Co-activator | zyxin |

| SOX2 | |
|---|---|
| (SEQ ID NO: 1501; NM_003106) | |
| 1 | ggatggttgt ctattaactt gttcaaaaaa gtatcaggag ttgtcaaggc agagaagaga |
| 61 | gtgtttgcaa aagggggaaa gtagtttgct gcctctttaa gactaggact gagagaaaga |
| 121 | agaggagaga gaaagaaagg gagagaagtt tgagccccag gcttaagcct ttccaaaaaa |
| 181 | taataataac aatcatcggc ggcggcagga tcggccagag gaggagggaa gcgctttttt |
| 241 | tgatcctgat tccagtttgc ctctctcttt ttttccccca aattattctt cgcctgattt |
| 301 | tcctcgcgga gccctgcgct cccgacaccc ccgcccgcct cccctcctcc tctccccccg |
| 361 | cccgcgggcc ccccaaagtc ccggccgggc cgagggtcgg cggccgccgg cgggccgggc |
| 421 | ccgcgcacag cgcccgcatg tacaacatga tggagacgga gctgaagccg ccgggcccgc |
| 481 | agcaaacttc ggggggcggc ggcggcaact ccaccgcggc ggcggccggc ggcaaccaga |
| 541 | aaaacagccc ggaccgcgtc aagcggccca tgaatgcctt catggtgtgg tcccgcgggc |
| 601 | agcggcgcaa gatggcccag gagaacccca agatgcacaa ctcggagatc agcaagcgcc |
| 661 | tgggcgccga gtggaaactt ttgtcggaga cggagaagcg gccgttcatc gacgaggcta |
| 721 | agcggctgcg agcgctgcac atgaaggagc acccggatta taaataccgg ccccggcgga |
| 781 | aaaccaagac gctcatgaag aaggataagt acacgctgcc cggcgggctg ctggcccccg |
| 841 | gcggcaatag catggcgagc ggggtcgggg tgggcgccgg cctgggcgcg ggcgtgaacc |
| 901 | agcgcatgga cagttacgcg cacatgaacg gctggagcaa cggcagctac agcatgatgc |
| 961 | aggaccagct gggctacccg cagcacccgg gcctcaatgc gcacggcgca gcgcagatgc |
| 1021 | agcccatgca ccgctacgac gtgagcgccc tgcagtacaa ctccatgacc agctcgcaga |
| 1081 | cctacatgaa cggctcgccc acctacagca tgtcctactc gcagcagggc acccctggca |
| 1141 | tggctcttgg ctccatgggt tcggtggtca agtccgaggc cagctccagc ccccctgtgg |
| 1201 | ttacctcttc ctcccactcc agggcgccct gccaggccgg ggacctccgg gacatgatca |
| 1261 | gcatgtatct ccccggcgcc gaggtgccgg aacccgccgc ccccagcaga cttcacatgt |
| 1321 | cccagcacta ccagagcggc ccggtgcccg gcacggccat taacggcaca ctgcccctct |
| 1381 | cacacatgtg agggccggac agcgaactgg aggggggaga aattttcaaa gaaaaacgag |
| 1441 | ggaaatggga ggggtgcaaa agaggagagt aagaaacagc atggagaaaa cccggtacgc |
| 1501 | tcaaaaagaa aaaggaaaaa aaaaaatccc atcacccaca gcaaatgaca gctgcaaaag |
| 1561 | agaacaccaa tcccatccac actcacgcaa aaaccgcgat gccgacaaga aaacttttat |
| 1621 | gagagagatc ctggacttct ttttggggga ctatttttgt acagagaaaa cctggggagg |
| 1681 | gtggggaggg cgggggaatg gaccttgtat agatctggag gaaagaaagc tacgaaaaac |
| 1741 | tttttaaaag ttctagtggt acggtaggag ctttgcagga agtttgcaaa agtctttacc |
| 1801 | aataatattt agagctagtc tccaagcgac gaaaaaaatg ttttaatatt tgcaagcaac |
| 1861 | ttttgtacag tatttatcga gataaacatg gcaatcaaaa tgtccattgt ttataagctg |
| 1921 | agaatttgcc aatatttttc aaggagaggc ttcttgctga attttgattc tgcagctgaa |
| 1981 | atttaggaca gttgcaaacg tgaaaagaag aaaattattc aaatttggac attttaattg |
| 2041 | tttaaaaatt gtacaaaagg aaaaaattag aataagtact ggcgaaccat ctctgtggtc |
| 2101 | ttgtttaaaa agggcaaaag ttttagactg tactaaattt tataacttac tgttaaaagc |
| 2161 | aaaaatggcc atgcaggttg acaccgttgg taatttataa tagcttttgt tcgatcccaa |
| 2221 | ctttccattt tgttcagata aaaaaaacca tgaaattact gtgtttgaaa tattttctta |
| 2281 | tggtttgtaa tatttctgta aatttattgt gatattttaa ggttttcccc cctttatttt |
| 2341 | ccgtagttgt attttaaaag attcggctct gtattatttg aatcagtctg ccgagaatcc |
| 2401 | atgtatatat ttgaactaat atcatcctta taacaggtac attttcaact taagttttta |
| 2461 | ctccattatg cacagtttga gataaataaa tttttgaaat atggacactg aaaaaaaaaa |

### FoxP3

[0441] The FOXP3 (forkhead box P3) gene encodes for a protein involved in immune system responses. A member of the FOX protein family, FOXP3 is a transcription factor that plays a role in the development and function of regulatory T cells. The induction or administration of Foxp3 positive T cells in animal studies indicate marked reductions in (autoimmune) disease severity in models of diabetes, multiple sclerosis, asthma, inflammatory bowel disease, thyroiditis and renal disease.

[0442] The FoxP3 protein can be expressed in a cell using the synthetic, modified RNAs described herein.

### Targeting Moiety

[0443] As used herein, the term “targeting moiety” refers to an agent that directs a composition to a particular tissue, cell type, receptor, or other area of interest. As per this definition, a targeting moiety can be attached directly to a synthetic, modified RNA or indirectly to a composition used for delivering a synthetic, modified RNA (e.g., a liposome, polymer etc) to direct expression in a particular cell etc. A targeting moiety can also be encoded or expressed by a synthetic, modified-NA as described herein, such that a cell expresses a targeting moiety on it surface, permitting a cell to be targeted to a desired tissue, organ etc. For the avoidance of confusion, targeting moieties expressed on a cell surface are referred to herein as “homing moieties.”

[0444] Non-limiting examples of a targeting moiety or homing moiety include, but are not limited to, an oligonucleotide, an antigen, an antibody or functional fragment thereof, a ligand, a cell-surface receptor, a membrane-bound molecule, one member of a specific binding pair, a polyamide including a peptide having affinity for a biological receptor, an oligosaccharide, a polysaccharide, a steroid or steroid derivative, a hormone, e.g., estradiol or histamine, a hormone-mimic, e.g., morphine, or hormone-receptor, or other compound having binding specificity for a target. In the methods of the present invention, a targeting moiety promotes transport or preferential localization of a synthetic, modified RNA to a target cell, while a homing moiety permits the targeting of a cell modified using the synthetic, modified RNAs described herein to a particular tissue in vivo. It is contemplated herein that the homing moiety can be also encoded in a cell by a synthetic, modified RNA as described herein.

[0445] A synthetic, modified RNA or composition thereof can be targeted by means of a targeting moiety, including, e.g., an antibody or targeted liposome technology. In some embodiments, a synthetic, modified RNA or composition thereof is targeted to a specific tissue by using bispecific antibodies, for example produced by chemical linkage of an anti-ligand antibody (Ab) and an Ab directed toward a specific target. To avoid the limitations of chemical conjugates, molecular conjugates of antibodies can be used for production of recombinant, bispecific single-chain Abs directing ligands and/or chimeric inhibitors at cell surface molecules. The addition of an antibody to a synthetic, modified RNA composition permits the agent attached to accumulate additively at the desired target site. Antibody-based or non-antibody-based targeting moieties can be employed to deliver a ligand or the inhibitor to a target site. Preferably, a natural binding agent for an unregulated or disease associated antigen is used for this purpose.

[0446] Table 2 and Table 3 provide non-limiting examples of CD (“cluster of differentiation”) molecules and other cell-surface/membrane bound molecules and receptors, such as transmembrane tyrosine kinase receptors, ABC transporters, and integrins, that can be expressed using the synthetic, modified RNA compositions and methods described herein for targeting and homing to cells of interest, or for changing the phenotype of a cell.

TABLE 2
List of CD Molecules

| Molecule | | |
|---|---|---|
| (CD | | |
| Number) | NCBI Name | NCBI Other Names |
| CD10 | MME | CALLA; CD10; NEP |
| CD100 | SEMA4D | CD100; M-sema G; M-sema-G; SEMAJ; coll-4 |
| CD101 | IGSF2 | CD101; V7 |
| CD102 | ICAM2 | CD102 |
| CD103 | ITGAE | CD103; HUMINAE |
| CD104 | ITGB4 | |
| CD105 | ENG | CD105; END; HHT1; ORW; ORW1 |
| CD106 | VCAM1 | INCAM-100 |
| CD107a | LAMP1 | CD107a; LAMPA; LGP120 |
| CD107b | LAMP2 | CD107b; LAMPB |
| CD107b | LAMP2 | CD107b; LAMPB |
| CD108 | SEMA7A | CD108; CDw108; H-SEMA-K1; H-Sema K1; H-Sema-L; SEMAK1; SEMAL |
| CD109 | CD109 | DKFZp762L1111; FLJ38569 |
| CD110 | MPL | C-MPL; CD110; MPLV; TPOR |
| CD111 | PVRL1 | CD111; CLPED1; ED4; HIgR; HVEC; PRR; PRR1; PVRR; PVRR1; SK-12 |
| CD112 | PVRL2 | CD112; HVEB; PRR2; PVRR2 |
| CD113 | PVRL3 | PVTL3; PPR3; PRR3; PVRR3; nectin-3; DKFZP566B0846 |
| CD114 | CSF3R | CD114; GCSFR |
| CD115 | CSF1R | C-FMS; CD115; CSFR; FIM2; FMS |
| CD116 | CSF2RA | CD116; CDw116; CSF2R; CSF2RAX; CSF2RAY; CSF2RX; CSF2RY; GM-CSF-R- |
| | | alpha; GMCSFR; GMR; MGC3848; MGC4838 |
| CD117 | KIT | CD117; PBT; SCFR |
| CD118 | LIFR | LIFR; SWS; SJS2; STWS |
| CD119 | IFNGR1 | CD119; IFNGR |
| CD11a | ITGAL | CD11A; LFA-1; LFA1A |
| CD11a | ITGAL | CD11A; LFA-1; LFA1A |
| CD11a | ITGAL | CD11A; LFA-1; LFA1A |
| CD11b | ITGAM | CD11B; CR3A; MAC-1; MAC1A; MO1A |
| CD11c | ITGAX | CD11C |
| CD11d | ITGAD | ADB2; CD11D |
| CD120a | TNFRSF1A | CD120a; FPF; MGC19588; TBP1; TNF-R; TNF-R-I; TNF-R55; TNFAR; TNFR1; |
| | | TNFR55; TNFR60; p55; p55-R; p60 |
| CD120b | TNFRSF1B | CD120b; TBPII; TNF-R-II; TNF-R75; TNFBR; TNFR2; TNFR80; p75; p75TNFR |
| CD121a | IL1R1 | CD121A; D2S1473; IL-1R-alpha; IL1R; IL1RA; P80 |
| CD121b | IL1R2 | IL1RB; MGC47725 |
| CD122 | IL2RB | P70-75 |
| CD123 | IL3RA | CD123; IL3R; IL3RAY; IL3RX; IL3RY; MGC34174; hIL-3Ra |
| CD124 | IL4R | CD124; IL4RA |
| CD125 | IL5RA | CDw125; HSIL5R3; IL5R; MGC26560 |
| CD126 | IL6R | CD126; IL-6R-1; IL-6R-alpha; IL6RA |
| CD127 | IL7R | CD127; CDW127; IL-7R-alpha |
| CD128a | see CD181 | see CD181 |
| CD128b | see CD182 | see CD182 |
| CD129 | IL9R | |
| CD13 | ANPEP | CD13; LAP1; PEPN; gp150 |
| CD130 | IL6ST | CD130; CDw130; GP130; GP130-RAPS; IL6R-beta |
| CD131 | CSF2RB | CD131; CDw131; IL3RB; IL5RB |
| CD132 | IL2RG | CD132; IMD4; SCIDX; SCIDX1 |
| CD133 | PROM1 | AC133; CD133; PROML1 |
| CD134 | TNFRSF4 | ACT35; CD134; OX40; TXGP1L |
| CD135 | FLT3 | CD135; FLK2; STK1 |
| CD136 | MST1R | CDw136; RON |
| CD137 | TNFRSF9 | 4-1BB; CD137; CDw137; ILA; MGC2172 |
| CD138 | SDC1 | CD138; SDC; SYND1 |
| CD139 | CD139 | |
| CD14 | CD14 | |
| CD14 | CD14 | |
| CD140a | PDGFRA | CD140A; PDGFR2 |
| CD140b | PDGFRB | CD140B; JTK12; PDGF-R-beta; PDGFR; PDGFR1 |
| CD141 | THBD | CD141; THRM; TM |
| CD142 | F3 | CD142; TF; TFA |
| CD143 | ACE | ACE1; CD143; DCP; DCP1; MGC26566 |
| CD144 | CDH5 | 7B4 |
| CD146 | MCAM | CD146; MUC18 |
| CD147 | BSG | 5F7; CD147; EMMPRIN; M6; OK; TCSF |
| CD148 | PTPRJ | CD148; DEP1; HPTPeta; R-PTP-ETA; SCC1 |
| CD149 | see CD47R | see CD47R |
| CD15 | FUT4 | CD15; ELFT; FCT3A; FUC-TIV |
| CD15 | FUT4 | CD15; ELFT; FCT3A; FUC-TIV |
| CD15 | FUT4 | CD15; ELFT; FCT3A; FUC-TIV |
| CD150 | SLAMF1 | CD150; CDw150; SLAM |
| CD151 | CD151 | GP27; PETA-3; SFA1 |
| CD152 | CTLA4 | CD152 |
| CD153 | TNFSF8 | CD153; CD30L; CD30LG |
| CD154 | CD40LG | CD154; CD40L; CD40LG; HIGM1; IGM; IMD3; T-BAM; TRAP; gp39; hCD40L |
| CD155 | PVR | CD155; HVED; NECL5; PVS; TAGE4 |
| CD156a | ADAM8 | CD156; MS2 |
| CD156b | ADAM17 | CD156b; TACE; cSVP |
| CD156C | ADAM10 | kuz; MADM; CD156c; HsT18717 |
| CD157 | BST1 | CD157 |
| CD158A | KIR2DL1 | 47.11; CD158A; CL-42; NKAT1; p58.1 |
| CD158B1 | KIR2DL2 | CD158B1; CL-43; NKAT6; p58.2 |
| CD158B2 | KIR2DL3 | CD158B2; CD158b; CL-6; KIR-023GB; NKAT2; NKAT2A; NKAT2B; p58 |
| CD158C | KIR3DP1; | LOC392419 |
| | KIR2DS6; | |
| | KIRX | |
| CD158D | KIR2DL4 | 103AS; 15.212; CD158D; KIR103; KIR103AS |
| CD158E1 | KIR3DL1 | AMB11; CD158E1; CD158E1/2; CD158E2; CL-11; CL-2; KIR; KIR3DS1; NKAT10; |
| | | NKAT3; NKB1; NKB1B |
| CD158E2 | KIR3DS1 | AMB11; CD158E1; CD158E1/2; CD158E2; CL-11; CL-2; KIR; KIR3DS1; NKAT10; |
| | | NKAT3; NKB1; NKB1B |
| CD158F | KIR2DL5 | CD158F; KIR2DL5; KIR2DL5.1; KIR2DL5.3 |
| CD158G | KIR2DS5 | CD158G; NKAT9 |
| CD158H | KIR2DS1 | CD158H; EB6ActI; EB6ActII; p50.1 |
| CD158I | KIR2DS4 | CD158I; KIR1D; KKA3; NKAT8; PAX; cl-39 |
| CD158J | KIR2DS2 | 183ACTI; CD158J; CL-49; NKAT5; p50.2 |
| CD158K | KIR3DL2 | CD158K; CL-5; NKAT4; NKAT4A; NKAT4B |
| CD159a | KLRC1 | CD159A; MGC13374; MGC59791; NKG2; NKG2A |
| CD159c | KLRC2 | |
| CD160 | CD160 | BY55; NK1; NK28 |
| CD161 | KLRB1 | CD161; NKR; NKR-P1; NKR-P1A; NKRP1A; hNKR-P1A |
| CD162 | SELPLG | CD162; PSGL-1; PSGL1 |
| CD163 | CD163 | M130; MM130 |
| CD164 | CD164 | MGC-24; MUC-24; endolyn |
| CD165 | CD165 | |
| CD166 | ALCAM | CD166; MEMD |
| CD167a | DDR1 | CAK; CD167; DDR; EDDR1; MCK10; NEP; NTRK4; PTK3; PTK3A; RTK6; TRKE |
| CD167b | DDR2 | TKT; MIG20a; NTRKR3; TYRO10 |
| CD168 | HMMR | RHAMM |
| CD169 | SN | CD169; FLJ00051; FLJ00055; FLJ00073; FLJ32150; SIGLEC-1; dJ1009E24.1 |
| CD16a | FCGR3A | CD16; FCG3; FCGR3; IGFR3 |
| CD16b | FCGR3B | CD16; FCG3; FCGR3 |
| CD17 | carbohydrate | carbohydrate |
| CD170 | SIGLEC5 | CD33L2; OB-BP2; OBBP2; SIGLEC-5 |
| CD171 | L1CAM | CAML1; CD171; HSAS; HSAS1; MASA; MIC5; N-CAML1; S10; SPG1 |
| CD172a | PTPNS1 | BIT; MFR; MYD-1; P84; SHPS-1; SHPS1; SIRP; SIRP-ALPHA-1; SIRPalpha; |
| | | SIRPalpha2 |
| CD172b | SIRPB1 | SIRP-BETA-1 |
| CD172g | SIRPB2 | SIRP-B2; bA77C3.1 |
| CD173 | carbohydrate | carbohydrate |
| CD174 | FUT3 | LE; Les |
| CD175 | carbohydrate | carbohydrate |
| CD175s | carbohydrate | carbohydrate |
| CD176 | carbohydrate | carbohydrate |
| CD177 | CD177 | CD177; HNA2A; NB1 |
| CD178 | FASLG | FASL; CD178; CD95L; TNFSF6; APT1LG1 |
| CD179a | VPREB1 | IGI; IGVPB; VPREB |
| CD179b | IGLL1 | 14.1; CD179b; IGL1; IGL5; IGLL; IGO; IGVPB; VPREB2 |
| CD18 | ITGB2 | CD18; LAD; LCAMB; LFA-1; MF17; MFI7 |
| CD180 | CD180 | LY64; Ly78; RP105; MGC126233; MGC126234 |
| CD181 | IL8RA | C-C CKR-1; C-C-CKR-1; CD128; CDw128a; CMKAR1; CXCR1; IL8R1; IL8RBA |
| CD182 | IL8RB | CDw128b; CMKAR2; CXCR2; IL8R2; IL8RA |
| CD183 | CXCR3 | CD183; CKR-L2; CMKAR3; GPR9; IP10; IP10-R; Mig-R; MigR |
| CD184 | CXCR4 | D2S201E; HM89; HSY3RR; LAP3; LESTR; NPY3R; NPYR; NPYY3R; WHIM |
| CD185 | BLR1 | BLR1; CXCR5; MDR15 |
| CD186 | CXCR6 | CXCR6; BONZO; STRL33; TYMSTR |
| CD187 | | |
| CD188 | | |
| CD189 | | |
| CD19 | CD19 | B4; MGC12802 |
| CD190 | | |
| CD191 | CCR1 | CKR-1; CMKBR1; HM145; MIP1aR; SCYAR1 |
| CD192 | CCR2 | CC-CKR-2; CCR2A; CCR2B; CKR2; CKR2A; CKR2B; CMKBR2; MCP-1-R |
| CD193 | CCR3 | CC-CKR-3; CKR3; CMKBR3 |
| CD194 | CCR4 | CC-CKR-4; CKR4; CMKBR4; ChemR13; HGCN |
| CD195 | CCR5 | CC-CKR-5; CCCKR5; CD195; CKR-5; CKR5; CMKBR5 |
| CD196 | CCR6 | CCR6; BN-1; CKR6; DCR2; CKRL3; DRY-6; GPR29; CKR-L3; CMKBR6; GPRCY4; |
| | | STRL22; GPR-CY4 |
| CD197 | CCR7 | BLR2; CDw197; CMKBR7; EBI1 |
| CD1a | CD1A | CD1 |
| CD1b | CD1B | CD1 |
| CD1c | CD1C | CD1 |
| CD1d | CD1D | |
| CD1d | CD1D | |
| CD1e | CD1E | HSCDIEL |
| CD2 | CD2 | SRBC; T11 |
| CD2 | CD2 | SRBC; T11 |
| CD20 | MS4A1 | B1; Bp35; CD20; LEU-16; MGC3969; MS4A2; S7 |
| CD200 | CD200 | MOX1; MOX2; MRC; OX-2 |
| CD201 | PROCR | CCCA; CCD41; EPCR; MGC23024; bA42O4.2 |
| CD202b | TEK | CD202B; TIE-2; TIE2; VMCM; VMCM1 |
| CD203c | ENPP3 | B10; CD203c; NPP3; PD-IBETA; PDNP3 |
| CD204 | MSR1 | SCARA1; SR-A; phSR1; phSR2 |
| CD205 | LY75 | CLEC13B; DEC-205; GP200-MR6 |
| CD206 | MRC1 | CLEC13D |
| CD207 | CD207 | LANGERIN |
| CD208 | LAMP3 | DC-LAMP; DCLAMP; LAMP; TSC403 |
| CD209 | CD209 | CDSIGN; DC-SIGN; DC-SIGN1 |
| CD21 | CR2 | C3DR; CD21 |
| CD211 | | |
| CD212 | IL12RB1 | IL-12R-BETA1; IL12RB; MGC34454 |
| CD213a1 | IL13RA1 | IL-13Ra; NR4 |
| CD213a2 | IL13RA2 | IL-13R; IL13BP |
| CD214 | | |
| CD215 | | |
| CD216 | | |
| CD217 | IL17R | IL-17RA; IL17RA; MGC10262; hIL-17R |
| CD218a | IL18R1 | IL18R1; IL1RRP; IL-1Rrp |
| CD218b | IL18RAP | IL18RAP; ACPL |
| CD219 | | |
| CD22 | CD22 | SIGLEC-2 |
| CD220 | INSR | |
| CD221 | IGF1R | JTK13 |
| CD222 | IGF2R | CD222; CIMPR; M6P-R; MPRI |
| CD223 | LAG3 | CD223 |
| CD224 | GGT1 | CD224; D22S672; D22S732; GGT; GTG |
| CD225 | IFITM1 | Sep-27; CD225; IFI17; LEU13 |
| CD226 | CD226 | DNAM-1; DNAM1; PTA1; TLiSA1 |
| CD227 | MUC1 | CD227; EMA; PEM; PUM |
| CD228 | MFI2 | MAP97; MGC4856; MTF1 |
| CD229 | LY9 | CD229; SLAMF3; hly9; mLY9 |
| CD23 | FCER2 | CD23; CD23A; FCE2; IGEBF |
| CD230 | PRNP | ASCR; CJD; GSS; MGC26679; PRIP; PrP; PrP27-30; PrP33-35C; PrPc |
| CD231 | TSPAN7 | A15; CCG-B7; CD231; DXS1692E; MXS1; TALLA-1; TM4SF2b |
| CD232 | PLXNC1 | PLXN-C1; VESPR |
| CD233 | SLC4A1 | AE1; BND3; CD233; DI; EMPB3; EPB3; RTA1A; WD; WD1 |
| CD234 | DARC | CCBP1; DARC; GPD |
| CD235a | GYPA | GPA; MN; MNS |
| CD235b | GYPB | GPB; MNS; SS |
| CD236 | GYPC | GE; GPC |
| CD237 | | |
| CD238 | KEL | |
| CD239 | LU | AU; BCAM; MSK19 |
| CD24 | CD24 | CD24A |
| CD240CE | RHCE | RH; RH30A; RHC; RHE; RHIXB; RHPI; Rh4; RhVI; RhVIII |
| CD240D | RHD | CD240D; DIIIc; RH; RH30; RHCED; RHDVA(TT); RHPII; RHXIII; Rh30a; Rh4; |
| | | RhII; RhK562-II; RhPI |
| CD241 | RHAG | RH2; RH50A |
| CD242 | ICAM4 | LW |
| CD243 | ABCB1 | ABC20; CD243; CLCS; GP170; MDR1; P-gp; PGY1 |
| CD244 | CD244 | 2B4; NAIL; NKR2B4; Nmrk; SLAMF4 |
| CD245 | CD245 | |
| CD246 | ALK | |
| CD247 | CD247 | CD3-ZETA; CD3H; CD3Q; TCRZ |
| CD248 | CD248 | CD164L1 |
| CD249 | ENPEP | APA; gp160; EAP |
| CD25 | IL2RA | CD25; IL2R; TCGFR |
| CD25 | IL2RA | CD25; IL2R; TCGFR |
| CD25 | IL2RA | CD25; IL2R; TCGFR |
| CD25 | IL2RA | CD25; IL2R; TCGFR |
| CD25 | IL2RA | CD25; IL2R; TCGFR |
| CD250 | | |
| CD251 | | |
| CD252 | TNFSF4 | TNFSF4; GP34; OX4OL; TXGP1; CD134L; OX-40L; OX40L |
| CD253 | TNFSF10 | TNFSF10; TL2; APO2L; TRAIL; Apo-2L |
| CD254 | TNFSF11 | ODF; OPGL; sOdf; CD254; OPTB2; RANKL; TRANCE; hRANKL2 |
| CD255 | | |
| CD256 | TNFSF13 | APRIL; TALL2; TRDL-1; UNQ383/PRO715 |
| CD257 | TNFSF13B | BAFF; BLYS; TALL-1; TALL1; THANK; TNFSF20; ZTNF4; delta BAFF |
| CD258 | TNFSF14 | TNFSF14; LTg; TR2; HVEML; LIGHT |
| CD259 | | |
| CD26 | DPP4 | ADABP; ADCP2; CD26; DPPIV; TP103 |
| CD260 | | |
| CD261 | TNFRSF10A | APO2; DR4; MGC9365; TRAILR-1; TRAILR1 |
| CD262 | TNFRSF10B | DR5; KILLER; KILLER/DR5; TRAIL-R2; TRAILR2; TRICK2; TRICK2A; |
| | | TRICK2B; TRICKB; ZTNFR9 |
| CD263 | TNFRSF10C | DCR1; LIT; TRAILR3; TRID |
| CD264 | TNFRSF10D | DCR2; TRAILR4; TRUNDD |
| CD265 | TNFRSF11A | EOF; FEO; ODFR; OFE; PDB2; RANK; TRANCER |
| CD266 | TNFRSF12A | TNFRSF12A; FN14; TWEAKR |
| CD267 | TNFRSF13B | CVID; TACI; CD267; FLJ39942; MGC39952; MGC133214; TNFRSF14B |
| CD268 | TNFRSF13C | BAFFR; CD268; BAFF-R; MGC138235 |
| CD269 | TNFRSF17 | BCM; BCMA |
| CD27 | TNFRSF7 | CD27; MGC20393; S152; T14; Tp55 |
| CD270 | | |
| CD271 | NGFR | NGFR; TNFRSF16; p75(NTR) |
| CD272 | BTLA | BTLA1; FLJ16065 |
| CD273 | PDCD1LG2 | PDCD1LG2; B7DC; Btdc; PDL2; PD-L2; PDCD1L2; bA574F11.2 |
| CD274 | CD274 | B7-H; B7H1; PD-L1; PDCD1L1; PDL1 |
| CD275 | ICOSLG | B7-H2; B7H2; B7RP-1; B7RP1; GL50; ICOS-L; ICOSLG; KIAA0653; LICOS |
| CD276 | CD276 | B7H3 |
| CD277 | BTN3A1 | BTF5; BT3.1 |
| CD278 | ICOS | AILIM; MGC39850 |
| CD279 | PDCD1 | PD1; SLEB2; hPD-1 |
| CD28 | CD28 | Tp44 |
| CD28 | CD28 | Tp44 |
| CD28 | CD28 | Tp44 |
| CD28 | CD28 | Tp44 |
| CD28 | CD28 | Tp44 |
| CD28 | CD28 | Tp44 |
| CD280 | MRC2 | MRC2; UPARAP; ENDO180; KIAA0709 |
| CD281 | TLR1 | TLR1; TIL; rsc786; KIAA0012; DKFZp547I0610; DKFZp564I0682 |
| CD282 | TLR2 | TIL4 |
| CD283 | TLR3 | TLR3 |
| CD284 | TLR4 | TOLL; hToll |
| CD285 | | |
| CD286 | TLR6 | CD286 |
| CD287 | | |
| CD288 | TLR8 | TLR8 |
| CD289 | TLR9 | none |
| CD29 | ITGB1 | CD29; FNRB; GPIIA; MDF2; MSK12; VLAB |
| CD290 | TLR10 | TLR10 |
| CD291 | | |
| CD292 | BMPR1A | BMPR1A; ALK3; ACVRLK3 |
| CD294 | GPR44 | CRTH2 |
| CD295 | LEPR | LEPR; OBR |
| CD296 | ART1 | ART2; RT6 |
| CD297 | ART4 | DO; DOK1; CD297; ART4 |
| CD298 | ATP1B3 | ATP1B3; ATPB-3; FLJ29027 |
| CD299 | CLEC4M | DC-SIGN2; DC-SIGNR; DCSIGNR; HP10347; LSIGN; MGC47866 |
| CD3 | see CD3D, | see CD3D, CD3E, CD3G |
| | CD3E, CD3G | |
| CD3 | see CD3D, | see CD3D, CD3E, CD3G |
| | CD3E, CD3G | |
| CD30 | TNFRSF8 | CD30; D1S166E; KI-1 |
| CD300a | CD300A | CMRF-35-H9; CMRF35H; CMRF35H9; IRC1; IRC2; IRp60 |
| CD300C | CD300C | CMRF-35A; CMRF35A; CMRF35A1; LIR |
| CD301 | CLEC10A | HML; HML2; CLECSF13; CLECSF14 |
| CD302 | CD302 | DCL-1; BIMLEC; KIAA0022 |
| CD303 | CLEC4C | BDCA2; CLECSF11; DLEC; HECL; PRO34150; CLECSF7 |
| CD304 | NRP1 | NRP; VEGF165R |
| CD305 | LAIR1 | LAIR-1 |
| CD306 | LAIR2 | LAIR2 |
| CD307 | FCRL5 | BXMAS1 |
| CD308 | | |
| CD309 | KDR | KDR; FLK1; VEGFR; VEGFR2 |
| CD31 | PECAM1 | CD31 |
| CD31 | PECAM1 | CD31 |
| CD31 | PECAM1 | CD31 |
| CD310 | | |
| CD311 | | |
| CD312 | EMR2 | |
| CD313 | | |
| CD314 | KLRK1 | KLRK1; KLR; NKG2D; NKG2-D; D12S2489E |
| CD315 | PTGFRN | PTGFRN; FPRP; EWI-F; CD9P-1; SMAP-6; FLJ11001; KIAA1436 |
| CD316 | IGSF8 | IGSF8; EWI2; PGRL; CD81P3 |
| CD317 | BST2 | none |
| CD318 | CDCP1 | CDCP1; FLJ22969; MGC31813 |
| CD319 | SLAMF7 | 19A; CRACC; CS1 |
| CD320 | CD320 | 8D6A; 8D6 |
| CD321 | F11R | JAM; KAT; JAM1; JCAM; JAM-1; PAM-1 |
| CD322 | JAM2 | C21orf43; VE-JAM; VEJAM |
| CD323 | | |
| CD324 | CDH1 | Arc-1; CDHE; ECAD; LCAM; UVO |
| CD325 | CDH2 | CDHN; NCAD |
| CD326 | TACSTD1 | CO17-1A; EGP; EGP40; Ep-CAM; GA733-2; KSA; M4S1; MIC18; MK-1; TROP1; |
| | | hEGP-2 |
| CD327 | SIGLEC6 | CD33L; CD33L1; OBBP1; SIGLEC-6 |
| CD328 | SIGLEC7 | p75; QA79; AIRM1; CDw328; SIGLEC-7; p75/AIRM1 |
| CD329 | SIGLEC9 | CDw329; OBBP-LIKE |
| CD32a | FCGR2A | CD32; CDw32; FCG2; FCGR2; FCGR2A1; FcGR; IGFR2; MGC23887; MGC30032 |
| CD32b | FCGR2B | CD32; FCG2; FCGR2; IGFR2 |
| CD32c | FCGR2C | CD32; FcgammaRIIC |
| CD33 | CD33 | SIGLEC-3; p67 |
| CD33 | CD33 | SIGLEC-3; p67 |
| CD330 | | |
| CD331 | FGFR1 | FGFR1; H2; H3; H4; H5; CEK; FLG; FLT2; KAL2; BFGFR; C-FGR; N-SAM |
| CD332 | FGFR2 | FGFR2; BEK; JWS; CEK3; CFD1; ECT1; KGFR; TK14; TK25; BFR-1; K-SAM |
| CD333 | FGFR3 | FGFR3; ACH; CEK2; JTK4; HSFGFR3EX |
| CD334 | FGFR4 | FGFR4; TKF; JTK2; MGC20292 |
| CD335 | NCR1 | LY94; NK-p46; NKP46 |
| CD336 | NCR2 | LY95; NK-p44; NKP44 |
| CD337 | NCR3 | 1C7; LY117; NKp30 |
| CD338 | ABCG2 | MRX; MXR; ABCP; BCRP; BMDP; MXR1; ABC15; BCRP1; CDw338; EST157481; |
| | | MGC102821 |
| CD339 | JAG1 | JAG1; AGS; AHD; AWS; HJ1; JAGL1 |
| CD34 | CD34 | |
| CD34 | CD34 | |
| CD340 | ERBB2 | NEU; NGL; HER2; TKR1; HER-2; c-erb B2; HER-2/neu |
| CD344 | FZD4 | EVR1; FEVR; Fz-4; FzE4; GPCR; FZD4S; MGC34390 |
| CD349 | FZD9 | FZD3 |
| CD35 | CR1 | C3BR; CD35 |
| CD350 | FZD10 | FzE7; FZ-10; hFz10 |
| CD36 | CD36 | FAT; GP3B; GP4; GPIV; PASIV; SCARB3 |
| CD37 | CD37 | GP52-40 |
| CD38 | CD38 | T10 |
| CD39 | ENTPD1 | ATPDase; CD39; NTPDase-1 |
| CD3d | CD3D | CD3-DELTA; T3D |
| CD3e | CD3E | CD3-EPSILON; T3E; TCRE |
| CD3g | CD3G | CD3-GAMMA; T3G |
| CD4 | CD4 | |
| CD4 | CD4 | |
| CD40 | CD40 | p50; Bp50; CDW40; MGC9013; TNFRSF5 |
| CD41 | ITGA2B | CD41; CD41B; GP2B; GPIIb; GTA |
| CD42a | GP9 | CD42a |
| CD42b | GP1BA | BSS; CD42B; CD42b-alpha; GP1B; MGC34595 |
| CD42c | GP1BB | CD42c |
| CD42d | GP5 | CD42d |
| CD43 | SPN | CD43; GPL115; LSN |
| CD43 | SPN | CD43; GPL115; LSN |
| CD43 | SPN | CD43; GPL115; LSN |
| CD43 | SPN | CD43; GPL115; LSN |
| CD44 | CD44 | CDW44; ECMR-III; IN; INLU; LHR; MC56; MDU2; MDU3; MGC10468; MIC4; |
| | | MUTCH-I; Pgp1 |
| CD44 | CD44 | CDW44; ECMR-III; IN; INLU; LHR; MC56; MDU2; MDU3; MGC10468; MIC4; |
| | | MUTCH-I; Pgp1 |
| CD44 | CD44 | CDW44; ECMR-III; IN; INLU; LHR; MC56; MDU2; MDU3; MGC10468; MIC4; |
| | | MUTCH-I; Pgp1 |
| CD45 | PTPRC | B220; CD45; GP180; LCA; LY5; T200 |
| CD45RA | PTPRC | |
| CD45RB | PTPRC | |
| CD45RC | PTPRC | |
| CD45RO | PTPRC | |
| CD46 | MCP | CD46; MGC26544; MIC10; TLX; TRA2.10 |
| CD47 | CD47 | IAP; MER6; OA3 |
| CD48 | CD48 | BCM1; BLAST; BLAST1; MEM-102; SLAMF2; hCD48; mCD48 |
| CD49a | ITGA1 | CD49a; VLA1 |
| CD49b | ITGA2 | BR; CD49B; VLAA2 |
| CD49c | ITGA3 | CD49C; GAP-B3; GAPB3; MSK18; VCA-2; VL3A; VLA3a |
| CD49d | ITGA4 | CD49D |
| CD49e | ITGA5 | CD49e; FNRA; VLA5A |
| CD49f | ITGA6 | CD49f |
| CD5 | CD5 | LEU1; T1 |
| CD5 | CD5 | LEU1; T1 |
| CD50 | ICAM3 | CD50; CDW50; ICAM-R |
| CD51 | ITGAV | CD51; MSK8; VNRA |
| CD52 | CD52 | CD52 |
| CD53 | CD53 | MOX44 |
| CD54 | ICAM1 | BB2; CD54 |
| CD55 | DAF | CD55; CR; TC |
| CD56 | NCAM1 | CD56; MSK39; NCAM |
| CD57 | CD57 | HNK-1; LEU7; NK-1 |
| CD58 | CD58 | LFA3 |
| CD59 | CD59 | MGC2354; MIC11; MIN1; MIN2; MIN3; MSK21; PROTECTIN |
| CD6 | CD6 | TP120 |
| CD6 | CD6 | TP120 |
| CD60a | carbohydrate | carbohydrate |
| CD60b | carbohydrate | carbohydrate |
| CD60b | carbohydrate | carbohydrate |
| CD60c | carbohydrate | carbohydrate |
| CD61 | ITGB3 | CD61; GP3A; GPIIIa |
| CD62E | SELE | CD62E; ELAM; ELAM1; ESEL; LECAM2 |
| CD62L | SELL | CD62L; LAM-1; LAM1; LECAM1; LNHR; LSEL; LYAM1; Leu-8; Lyam-1; PLNHR; |
| | | TQ1; hLHRc |
| CD62P | SELP | CD62; CD62P; GMP140; GRMP; PADGEM; PSEL |
| CD63 | CD63 | LAMP-3; ME491; MLA1; OMA81H |
| CD64a | FCGR1A | CD64; FCRI; IGFR1 |
| CD65 | carbohydrate | carbohydrate |
| CD65s | carbohydrate | carbohydrate |
| CD66a | CEACAM1 | BGP; BGP1; BGPI; CD66; CD66A |
| CD66b | CEACAM8 | CD66b; CD67; CGM6; NCA-95 |
| CD66c | CEACAM6 | CD66c; CEAL; NCA |
| CD66d | CEACAM3 | CD66D; CGM1 |
| CD66e | CEACAM5 | CD66e; CEA |
| CD66f | PSG1 | B1G1; CD66f; PBG1; PSBG1; PSGGA; SP1 |
| CD67 | see CD66f | see CD66f |
| CD68 | CD68 | SCARD1 |
| CD69 | CD69 | none |
| CD7 | CD7 | GP40; LEU-9; TP41; Tp40 |
| CD7 | CD7 | GP40; LEU-9; TP41; Tp40 |
| CD70 | TNFSF7 | CD27L; CD27LG; CD70 |
| CD71 | TFRC | CD71; TFR; TRFR |
| CD72 | CD72 | LYB2 |
| CD73 | NT5E | CD73; E5NT; NT5; NTE; eN; eNT |
| CD74 | CD74 | DHLAG; HLADG; Ia-GAMMA |
| CD75 | carbohydrate | carbohydrate |
| CD75s | carbohydrate | carbohydrate |
| CD76 | see CD75 and | see CD75 and CD75s |
| | CD75s | |
| CD77 | carbohydrate | carbohydrate |
| CD78 | deleted | deleted |
| CD79a | CD79A | IGA; MB-1 |
| CD79b | CD79B | B29; IGB |
| CD80 | CD80 | CD28LG; CD28LG1; LAB7 |
| CD81 | CD81 | S5.7; TAPA1 |
| CD82 | CD82 | 4F9; C33; CD82; GR15; IA4; R2; SAR2; ST6 |
| CD83 | CD83 | BL11; HB15 |
| CD84 | CD84 | LY9B; SLAMF5; hCD84; mCD84 |
| CD85A | LILRB3 | CD85A; HL9; ILT5; LIR-3; LIR3 |
| CD85B | LILRB6 | LILRB6 |
| CD85C | LILRB5 | CD85C; LIR-8; LIR8 |
| CD85D | LILRB2 | CD85D; ILT4; LIR-2; LIR2; MIR-10; MIR10 |
| CD85E | LILRA3 | CD85E; HM31; HM43; ILT6; LIR-4; LIR4 |
| CD85F | LILRB7 | CD85F; ILT11; LILRB7 |
| CD85G | LILRA4 | ILT7; CD85g; MGC129597 |
| CD85H | LILRA2 | CD85H; ILT1; LIR-7; LIR7 |
| CD85I | LILRA1 | CD85I; LIR-6; LIR6 |
| CD85J | LILRB1 | CD85; CD85J; ILT2; LIR-1; LIR1; MIR-7; MIR7 |
| CD85K | LILRB4 | CD85K; HM18; ILT3; LIR-5; LIR5 |
| CD85L | LILRP1 | ILT9; CD851; LILRA6P |
| CD85M | LILRP2 | CD85m; ILT10; LILRA5 |
| CD86 | CD86 | B7-2; B70; CD28LG2; LAB72; MGC34413 |
| CD87 | PLAUR | CD87; UPAR; URKR |
| CD88 | C5R1 | C5A; C5AR; CD88 |
| CD89 | FCAR | CD89 |
| CD8a | CD8A | CD8; Leu2; MAL; p32 |
| CD8a | CD8A | CD8; Leu2; MAL; p32 |
| CD8b | CD8B1 | CD8B; LYT3; Leu2; Ly3 |
| CD9 | CD9 | BA2; DRAP-27; MIC3; MRP-1; P24 |
| CD90 | THY1 | CD90 |
| CD91 | LRP1 | A2MR; APOER; APR; CD91; LRP |
| CD92 | SLC44A1 | CTL1; CDW92; CHTL1; RP11-287A8.1 |
| CD93 | CD93 | C1QR1; C1qRP; CDw93; MXRA4; C1qR(P); dJ737E23.1 |
| CD94 | KLRD1 | CD94 |
| CD95 | FAS | APT1; CD95; FAS1; APO-1; FASTM; ALPS1A; TNFRSF6 |
| CD96 | CD96 | MGC22596; TACTILE |
| CD97 | CD97 | TM7LN1 |
| CD98 | SLC3A2 | 4F2; 4F2HC; 4T2HC; CD98; MDU1; NACAE |
| CD99 | CD99 | MIC2; MIC2X; MIC2Y |
| CD99R | CD99 | |
| CDW12 | CDw12 | CDw12; p90-120 |
| CDw145 | CDw145 | not listed |
| CDw198 | CCR8 | CKR-L1; CKRL1; CMKBR8; CMKBRL2; CY6; GPR-CY6; TER1 |
| CDw199 | CCR9 | GPR-9-6; GPR28 |
| CDw210a | IL10RA | CDW210A; HIL-10R; IL-10R1; IL10R |
| CDw210b | IL10RB | CDW210B; CRF2-4; CRFB4; D21S58; D21S66; IL-10R2 |
| CDw293 | BMPR1B | BMPR1B; ALK6; ALK-6 |

TABLE 3
List of Membrane-Bound Receptors

| Membrane-bound Receptor Name | mRNA ID |
|---|---|
| 5-HT3 receptor subunit E splice variant HTR3Ea | DQ644022.1 |
| 5-HT3 serotonin receptor (long isoform) | AJ003078.1 |
| 5-HT3c1 serotonin receptor-like protein | AY349352.1 |
| | AY349353.1 |
| 5-hydroxytryptamine (serotonin) receptor 3 family member D | BC101091.2 BC101090.2 |
| | NM_001145143.1 |
| | NM_182537.2 |
| | AJ437318.1 |
| | AY159812.2 GI: 110431739 |
| 5-hydroxytryptamine (serotonin) receptor 3, family member C (HTR3C) | NM_130770.2 |
| | BC131799.1 |
| | AF459285.1 |
| 5-hydroxytryptamine (serotonin) receptor 3, family member E (HTR3E) | NM_182589.2 |
| | BC101183.2 |
| | BC101185.2 |
| | BC101182.1 |
| | AY159813.2 |
| | EU165354.1 |
| 5-hydroxytryptamine (serotonin) receptor 3A (HTR3A) | BC004453.1 |
| | BC002354.2 |
| | BT007204.1 GI: 30583246 |
| | NM_001161772.2 |
| | NM_213621.3 |
| | NM_000869.5 |
| | AF498984.1 |
| 5-hydroxytryptamine (serotonin) receptor 3B (HTR3B) | NM_006028.3 |
| | AK314268.1 |
| | AF169255.1 |
| | AF080582.1 |
| | AM293589.1 |
| ABA-A receptor, alpha 1 subunit | X14766.1 |
| ABC protein | AF146074.1 |
| ABC transporter 7 protein | AB005289.1 |
| ABC transporter MOAT-B (MOAT-B) | AF071202.1 |
| ABC transporter MOAT-C (MOAT-C) | AF104942.1 |
| ABC transporter MOAT-D (MOAT-D) | AF104943.1 |
| ABC transporter umat (ABCB6 gene) | AJ289233.2 |
| ABCB5 mRNA for ATP-binding cassette, sub-family B (MDR/TAP), | AB353947.1 |
| member 5 | |
| ABCC4 protein | AB208973.1 |
| acetylcholine receptor (epsilon subunit) | X66403.1 |
| acetylcholine receptor delta subunit | X55019.1 GI: 297401 |
| adrenoleukodystrophy related protein (ALDR) | AJ000327.1 |
| ALD gene | Z21876.1 |
| alpha 7 neuronal nicotinic acetylcholine receptor | U40583.1 |
| alpha-1 strychnine binding subunit of inhibitory glycine receptor mRNA | X52009.1 |
| alpha-2 strychnine binding subunit of inhibitory glycine receptor mRNA | X52008.1 |
| alpha-3 neuronal nicotinic acetylcholine receptor subunit | M37981.1 |
| amino butyric acid (GABA rho2) gene | M86868.1 |
| amino butyric acid (GABAA) receptor beta-3 subunit | M82919.1 |
| amma-aminobutyric acid (GABA) receptor, rho 1 | BC130344.1 |
| Anaplastic lymphoma receptor tyrosine kinase (ALK) | NM_004304.4 |
| anthracycline resistance associated protein | X95715.1 |
| ATP binding cassette transporter | AF038950.1 |
| ATP-binding cassette (sub-family C, member 6) (ABCC6 gene) | AM774324.1 |
| | AM711638.1 |
| ATP-binding cassette 7 iron transporter (ABC7) | AF133659.1 |
| ATP-binding cassette C5 | AB209103.1 |
| ATP-binding cassette half-transporter (PRP) | AF308472.1 |
| ATP-binding cassette protein (ABCB5) | AY230001.1 |
| | AY196484.1 |
| ATP-binding cassette protein ABCB9 (ABCB9) | AF216494.1 |
| ATP-binding cassette protein C11 (ABCC11) | AF367202.1 |
| | AF411579.1 |
| | AY040219.1 |
| | NM_003742.2 |
| ATP-binding cassette protein C12 (ABCC12) | AF395909.1 |
| | AF411578.1 |
| | AF411577.1 |
| | AF395908.1 |
| | AY040220.1 |
| ATP-binding cassette protein C13 | AY063514.1 |
| | AF518320.1 |
| ATP-binding cassette protein M-ABC1 | AF047690.1 |
| ATP-binding cassette subfamily B member 5 (ABCB5) | AY785909.1 AY851365.1 |
| ATP-binding cassette transporter C4 (ABCC4) | AY207008.1 AF541977.1 |
| ATP-binding cassette transporter MRP8 | AF352582.1 |
| ATP-binding cassette, sub-family B (MDR/TAP), member 1 (ABCB1) | BC130424.1 |
| | NM_000927.4 |
| ATP-binding cassette, sub-family B (MDR/TAP), member 10 (ABCB10) | BC064930.1 |
| | NM_012089.2 |
| | NM_001198934.1 |
| ATP-binding cassette, sub-family B (MDR/TAP), member 4 (ABCB4) | BC042531.1 |
| | BC020618.2 |
| | NM_018849.2 NM_000443.3 |
| | NM_018850.2 |
| ATP-binding cassette, sub-family B (MDR/TAP), member 5 (ABCB5) | BC104894.1 |
| | BC104920.1 |
| | NM_001163941.1 NM_178559.5 |
| ATP-binding cassette, sub-family B (MDR/TAP), member 6 (ABCB6) | BC000559.2 |
| | NM_005689.2 |
| ATP-binding cassette, sub-family B (MDR/TAP), member 7 (ABCB7) | BC006323.2 |
| | BT009918.1 |
| | NM_004299.3 |
| ATP-binding cassette, sub-family B (MDR/TAP), member 8 (ABCB8) | BC151235.1 BC141836.1 |
| | BGI: 146327013 |
| | NM_007188.3 |
| | AK222911.1 |
| ATP-binding cassette, sub-family B (MDR/TAP), member 9 (ABCB9) | BC017348.2 |
| | BC064384.1 |
| | NM_019624.3 NM_019625.3 |
| | NM_203444.2 |
| ATP-binding cassette, sub-family C (CFTR/MRP), member 1 (ABCC1) | NM_019898.2 |
| | NM_019899.2 |
| | NM_019862.2 |
| | NM_004996.3 |
| | NM_019900.2 |
| | AB209120.1 |
| ATP-binding cassette, sub-family C (CFTR/MRP), member 10 | NM_033450.2 GI: 25914748 |
| (ABCC10) | |
| ATP-binding cassette, sub-family C (CFTR/MRP), member 11 | NM_145186.2 |
| (ABCC11) | NM_032583.3 |
| | NM_033151.3 |
| ATP-binding cassette, sub-family C (CFTR/MRP), member 12 | NM_033226.2 |
| (ABCC12) | |
| ATP-binding cassette, sub-family C (CFTR/MRP), member 2 (ABCC2) | BC136419.1 GI: 187953242 |
| | NM_000392.3 |
| ATP-binding cassette, sub-family C (CFTR/MRP), member 3 (ABCC3) | BC046126.1 |
| | BC137347.1 BC137348.1 |
| | BC104952.1 |
| | BC050370.1 |
| | NM_001144070.1 NM_003786.3 |
| | AB208954.1 |
| ATP-binding cassette, sub-family C (CFTR/MRP), member 4 (ABCC4) | BC041560.1 |
| | NM_001105515.1 NM_005845.3 |
| ATP-binding cassette, sub-family C (CFTR/MRP), member 5 (ABCC5) | BC140771.1 |
| | NM_005688.2 |
| ATP-binding cassette, sub-family C (CFTR/MRP), member 6 (ABCC6) | BC131732.1 |
| | NM_001171.5 |
| ATP-binding cassette, sub-family C (CFTR/MRP), member 8 (ABCC8) | NM_000352.3 |
| ATP-binding cassette, sub-family C (CFTR/MRP), member 9 (ABCC9) | NM_020298.2 NM_020297.2 |
| | NM_005691.2 |
| ATP-binding cassette, sub-family D (ALD), member 1 (ABCD1) | BC025358.1 |
| | BC015541.1 |
| | NM_000033.3 |
| ATP-binding cassette, sub-family D (ALD), member 2 (ABCD2) | BC104901.1 |
| | BC104903.1 |
| | NM_005164.3 |
| | AK314254.1 |
| ATP-binding cassette, sub-family D (ALD), member 3 (ABCD3) | BC009712.2 |
| | BC068509.1 |
| | BT006644.1 |
| | NM_001122674.1 NM_002858.3 |
| ATP-binding cassette, sub-family D (ALD), member 4 (ABCD4) | BC012815.2 |
| | BT007412.1 |
| | NM_005050.3 |
| beta 4 nicotinic acetylcholine receptor subunit | U48861.1 |
| bile salt export pump (BSEP) | AF136523.1 |
| | AF091582.1 |
| B-lymphocyte CR2-receptor (for complement factor C3d and Epstein- | Y00649.1 |
| Barr virus) | |
| Butyrophilin-like 2 (MHC class II associated) (BTNL2) | NM_019602.1 |
| Cadherin 1, type 1, E-cadherin (epithelial) (CDH1) | NM_004360.3 |
| Cadherin 13, H-cadherin (heart) (CDH13) | NM_001257.3 |
| Cadherin 15, type 1, M-cadherin (myotubule) (CDH15) | NM_004933.2 |
| Cadherin 16, KSP-cadherin (CDH16) | NM_001204746.1 |
| | NM_001204745.1 |
| | NM_001204744.1 |
| | NM_004062.3 |
| Cadherin 17, LI cadherin (liver-intestine) (CDH17) | NM_001144663.1 NM_004063.3 |
| Cadherin 19, type 2 (CDH19) | NM_021153.2 |
| Cadherin 2, type 1, N-cadherin (neuronal) (CDH2) | NM_001792.3 |
| cadherin 20, type 2 (CDH20) | NM_031891.2 |
| Cadherin 3, type 1, P-cadherin (CDH3) | NM_001793.4 |
| Cadherin 4, type 1, R-cadherin (CDH4) | NM_001794.2 |
| Cadherin 5, type 2 (CDH5) | NM_001795.3 |
| Cadherin 6, type 2, K-cadherin (CDH6) | NM_004932.2 |
| Cadherin 7, type 2 (CDH7) | NM_004361.2 NM_033646.1 |
| canalicular multidrug resistance protein | X96395.2 |
| canalicular multispecific organic anion transporter (cMOAT) | U63970.1 |
| | U49248.1 |
| Ccanalicular multispecific organic anion transporter 2 (CMOAT2) | AF083552.1 |
| CD163 molecule-like 1 (CD163L1) | NM_174941.4 |
| CD4 molecule (CD4) | NM_001195015.1 |
| | NM_001195017.1 |
| | NM_001195016.1 NM_001195014.1 |
| | NM_000616.4 |
| CD47 molecule | BC010016.2 BT006907.1 |
| | BC037306.1 |
| | BC012884.1 |
| | NM_198793.2 NM_001777.3 |
| cellular proto-oncogene (c-mer) | U08023.1 |
| ceptor for advanced glycosylation end-products intron 4&9 variant | AY755622.1 |
| (AGER) | |
| Cholinergic receptor, nicotinic, alpha 1 (CHRNA1) | NM_000079.3 |
| | NM_001039523.2 |
| | AK315312.1 |
| Cholinergic receptor, nicotinic, alpha 10 (CHRNA10) | NM_020402.2 |
| Cholinergic receptor, nicotinic, alpha 2 (CHRNA2) | BC153866.1 |
| | NM_000742.3 |
| Cholinergic receptor, nicotinic, alpha 3 (CHRNA3) | BC002996.1 |
| | BC098443.1 |
| | BC000513.2 |
| | BC001642.2 |
| | BC006114.1 |
| | NM_001166694.1 NM_000743.4 |
| | BT006897.1 BT006646.1 |
| Cholinergic receptor, nicotinic, alpha 4 (CHRNA4) | BC096293.3 GI: 109731542 |
| | BC096290.1 BC096292.1 |
| | BC096291.1 |
| | NM_000744.5 |
| | AB209359.1 |
| Cholinergic receptor, nicotinic, alpha 5 (CHRNA5) | BC033639.1 |
| | NM_000745.3 |
| Cholinergic receptor, nicotinic, alpha 6 (CHRNA6) | BC014456.1 |
| | NM_001199279.1 NM_004198.3 |
| | AK313521.1 |
| Cholinergic receptor, nicotinic, alpha 7 (CHRNA7) | BC037571.1 |
| | NM_000746.4 NM_001190455.1 |
| Cholinergic receptor, nicotinic, alpha 9 (CHRNA9) | BC113549.1 |
| | BC113575.1 |
| | NM_017581.2 |
| Cholinergic receptor, nicotinic, beta 1 (CHRNB1) | BC023553.2 |
| | BC011371.1 |
| | NM_000747.2 |
| Cholinergic receptor, nicotinic, beta 2 (CHRNB2) | BC075041.2 |
| | BC075040.2 |
| | AK313470.1 |
| | NM_000748.2 |
| Cholinergic receptor, nicotinic, beta 3 (CHRNB3) | BC069788.1 |
| | BC069703.1 |
| | BC069681.1 |
| | NM_000749.3 |
| Cholinergic receptor, nicotinic, beta 4 (CHRNB4) | BC096080.1 BC096082.1 |
| | NM_000750.3 |
| cholinergic receptor, nicotinic, delta (CHRND) | BC093925.1 BC093923.1 |
| | NM_000751.1 |
| Cholinergic receptor, nicotinic, epsilon (CHRNE) | NM_000080.3 |
| Cholinergic receptor, nicotinic, gamma (CHRNG) | BC111802.1 |
| | NM_005199.4 |
| CRB1 isoform II precursor | AY043325.1 |
| Cstic fibrosis transmembrane conductance regulator (ATP-binding | NM_000492.3 |
| cassette sub-family C, member 7) (CFTR) | |
| C-type lectin domain family 4, member A (CLEC4A) | NM_194450.2 NM_194448.2 |
| | NM_194447.2 |
| | NM_016184.3 |
| enaptin | AF535142.1 |
| Eph-related receptor transmembrane ligand Elk-L3 precursor (Elk-L3) | U62775.1 |
| Fc receptor related gene | DQ021957.1 |
| Fibroblast growth factor receptor 3 (FGFR3) | NM_022965.3 |
| Fibroblast growth factor receptor 4 (FGFR4) | NM_022963.2 |
| Fms-related tyrosine kinase 3 (FLT3) | NM_004119.2 |
| Follicle stimulating hormone receptor (FSHR) | AY429104.1 |
| | S59900.1 |
| | M95489.1 M65085.1 |
| | BC118548.1 |
| | BC096831.1 |
| | BC125270.1 |
| | NM_181446.2 NM_000145.3 |
| | X68044.1 |
| G protein-coupled receptor 155 (GPR155) | BC035037.1 |
| | BC028730.1 |
| | NM_001033045.2 NM_152529.5 |
| GABA-A receptor delta subunit (GABRD) | AF016917.1 |
| GABA-A receptor epsilon subunit | U66661.1 |
| GABAA receptor gamma 3 subunit | S82769.1 |
| GABA-A receptor pi subunit | U95367.1 |
| GABAA receptor subunit alpha4 | U30461.1 |
| GABA-A receptor theta subunit (THETA) | AF189259.1 |
| | AF144648.1 |
| GABA-A receptor, beta 1 subunit | X14767.1 |
| GABA-A receptor, gamma 2 subunit | X15376.1 |
| GABA-benzodiazepine receptor alpha-5-subunit (GABRA5) | L08485.1 |
| Gamma-aminobutyric acid (GABA) A receptor, alpha 1 (GABRA1) | BC030696.1 |
| | NM_001127648.1 NM_001127647.1 |
| | NM_001127646.1 |
| | NM_001127645.1 |
| | NM_001127644.1 |
| | NM_001127643.1 |
| | NM_000806.5 |
| Gamma-aminobutyric acid (GABA) A receptor, alpha 2 (GABRA2) | BC022488.1 |
| | NM_001114175.1 |
| | NM_000807.2 |
| Gamma-aminobutyric acid (GABA) A receptor, alpha 3 (GABRA3) | BC028629.1 |
| | NM_000808.3 |
| Gamma-aminobutyric acid (GABA) A receptor, alpha 4 (GABRA4) | BC035055.1 |
| | NM_001204267.1 NM_001204266.1 |
| | NM_000809.3 |
| Gamma-aminobutyric acid (GABA) A receptor, alpha 5 (GABRA5) | BC113422.1 |
| | BC111979.1 |
| | BT009830.1 |
| | NM_001165037.1 NM_000810.3 |
| Gamma-aminobutyric acid (GABA) A receptor, alpha 6 (GABRA6) | BC099641.3 |
| | BC096241.3 |
| | BC099640.3 |
| | BC096242.3 |
| | NM_000811.2 |
| Gamma-aminobutyric acid (GABA) A receptor, beta 1 (GABRB1) | BC022449.1 |
| | NM_000812.3 |
| Gamma-aminobutyric acid (GABA) A receptor, beta 2 (GABRB2) | BC105639.1 |
| | BC099719.1 BC099705.1 |
| | NM_021911.2 NM_000813.2 |
| gamma-aminobutyric acid (GABA) A receptor, beta 3 (GABRB3) | BC010641.1 |
| | NM_001191320.1 NM_021912.4 |
| | NM_001191321.1 |
| | NM_000814.5 |
| Gamma-aminobutyric acid (GABA) A receptor, delta (GABRD) | BC033801.1 |
| | NM_000815.4 |
| Gamma-aminobutyric acid (GABA) A receptor, epsilon (GABRE) | BC059376.1 |
| | BC047108.1 |
| | BC026337.1 |
| | NM_004961.3 |
| Gamma-aminobutyric acid (GABA) A receptor, gamma 1 (GABRG1) | BC031087.1 |
| | NM_173536.3 |
| Gamma-aminobutyric acid (GABA) A receptor, gamma 2 (GABRG2) | BC074795.2 GI: 50959646 |
| | BC059389.1 |
| | NM_198903.2 |
| | NM_000816.3 |
| | NM_198904.2 |
| Gamma-aminobutyric acid (GABA) A receptor, gamma 3 (GABRG3) | NM_033223.4 |
| Gamma-aminobutyric acid (GABA) A receptor, pi (GABRP) | BC074810.2 |
| | BC069348.1 |
| | BC074865.2 |
| | BC109105.1 BC109106.1 |
| | NM_014211.2 |
| Gamma-aminobutyric acid (GABA) receptor, rho 1 (GABRR1) | NM_002042.3 |
| Gamma-aminobutyric acid (GABA) receptor, rho 2 (GABRR2) | BC130352.1 |
| | BC130354.1 |
| | NM_002043.2 |
| gamma-aminobutyric acid (GABA) receptor, rho 3 (GABRR3) | NM_001105580.1 |
| gamma-aminobutyric acid (GABA) receptor, theta (GABRQ) | BC109210.1 |
| | BC109211.1 |
| | NM_018558.2 |
| gamma-aminobutyric acid A receptor beta 2 isoform 3 (GABRB2) | GU086164.1 |
| | GU086163.1 |
| gamma-aminobutyric acid A receptor beta 2 subunit (GABR2) | S67368.1 |
| gamma-aminobutyric acid A receptor, alpha 2 precursor | AB209295.1 |
| gamma-aminobutyric acid receptor type A rho-1 subunit (GABA-A rho- | M62400.1 |
| 1) | |
| gamma-aminobutyric acid type A receptor alpha 6 subunit | S81944.1 |
| gamma-aminobutyric acidA receptor alpha 2 subunit | S62907.1 |
| gamma-aminobutyric acidA receptor alpha 3 subunit | S62908.1 |
| gamma-aminobutyric-acid receptor alpha-subunit | X13584.1 |
| glycine receptor alpha 3 subunit | U93917.1 |
| glycine receptor alpha2 subunit B (GLRA2) | AY437084.1 AY437083.1 |
| glycine receptor beta subunit precursor (GLRB) | AF094755.1 AF094754.1 |
| Glycine receptor, alpha 1 (GLRA1) | BC114967.1 BC114947.1 |
| | BC074980.2 |
| | NM_001146040.1 NM_000171.3 |
| Glycine receptor, alpha 2 (GLRA2) | BC032864.2 |
| | NM_001171942.1 |
| | NM_001118886.1 |
| | NM_001118885.1 |
| | NM_002063.3 |
| Glycine receptor, alpha 3 (GLRA3) | BC036086.1 |
| | NM_006529.2 NM_001042543.1 |
| Glycine receptor, alpha 4 (GLRA4) | NM_001172285.1 |
| | NM_001024452.2 |
| glycine receptor, beta (GLRB) | BC032635.1 |
| | NM_001166061.1 NM_000824.4 |
| | NM_001166060.1 |
| GP2 | D38225.1 |
| gpVI mRNA for platelet glycoprotein VI | AB035073.1 |
| H1 histamine receptor | Z34897.1 |
| HEK2 protein tyrosine kinase receptor | X75208.1 |
| high affinity IgE receptor alpha-subunit (FcERI) | X06948.1 |
| HLA | D32131.1 D32129.1 |
| HLA class I locus C heavy chain | X58536.1 |
| HLA class II DR-beta (HLA-DR B) | X12544.1 |
| HLA classII histocompatibility antigen alpha-chain | X00452.1 |
| HLA-A26 (HLA class-I heavy chain) | D32130.1 |
| HLA-DR antigens associated invariant chain (p33) | X00497.1 |
| holinergic receptor, nicotinic, delta polypeptide(CHRND) | AK315297.1 |
| HPTP (protein tyrosine phosphatase delta) | X54133.1 |
| HPTP (protein tyrosine phosphatase epsilon) | X54134.1 |
| HPTP (protein tyrosine phosphatase zeta) | X54135.1 |
| HPTP alpha mRNA for protein tyrosine phosphatase alpha | X54130.1 |
| HPTP beta (protein tyrosine phosphatase beta) | X54131.1 |
| -hydroxytryptamine (serotonin) receptor 3 family member D (HTR3D) | NM_001163646.1 |
| ICAM-3 | X69819.1 |
| IL12 receptor component | U03187.1 |
| IL-4-R | X52425.1 |
| immunoglobulin receptor precursor | AY046418.1 |
| insulin-like growth factor I receptor | X04434.1 |
| integrin associated protein | Z25521.1 |
| Killer cell lectin-like receptor subfamily D, member 1 (KLRD1) | NM_001114396.1 |
| KIR (cl-11) NK receptor precursor protein | U30274.1 |
| | U30273.1 |
| | U30272.1 |
| large conductance calcium- and voltage-dependent potassium channel | U11058.2 |
| alpha subunit (MaxiK) | |
| large-conductance calcium-activated potassium channel beta subunit | AF160967.1 |
| (KCNMB4) | |
| leucine-rich glioma-inactivated protein precursor (LGI1) | AF055636.1 |
| Leukocyte immunoglobulin-like receptor, subfamily A (with TM | NM_001130917.1 |
| domain), member 2 (LILRA2) | NM_006866.2 |
| Leukocyte immunoglobulin-like receptor, subfamily A (without TM | NM_006865.3 |
| domain), member 3 (LILRA3) | NM_001172654.1 |
| lycine receptor beta subunit (GLRB) | U33267.1 |
| lymphocte activation marker Blast-1 | X06341.1 |
| M-ABC2 protein (M-ABC2), nuclear gene for mitochondrial product | AF216833.1 |
| Major histocompatibility complex, class I, A (HLA-A) | NM_002116.6 |
| Major histocompatibility complex, class I, B (HLA-B) | NM_005514.6 |
| Major histocompatibility complex, class I, C (HLA-C) | NM_002117.4 |
| Major histocompatibility complex, class I, E (HLA-E) | NM_005516.5 |
| Major histocompatibility complex, class I, G (HLA-G), | NM_002127.5 |
| MAT8 protein | X93036.1 |
| MCTP1L mRNA | AY656715.1 |
| MCTP1S | AY656716.1 |
| MCTP2 | AY656717.1 |
| membrane glycoprotein P (mdr3) | M23234.1 |
| Mint1 | AF029106.1 |
| mono ATP-binding cassette protein | AB013380.1 GI: 12248754 |
| MRP5 | AB019002.1 |
| MRP6 (MRP6) | AF076622.1 |
| MT-ABC transporter (MTABC) | AF076775.1 |
| multidrug resistance protein 1 | EU854148.1 |
| | EU852583.1 |
| | AB208970.1 |
| multidrug resistance protein 3 (ABCC3) | Y17151.2 |
| multidrug resistance protein 5 (MRP5) | U83661.2 |
| multidrug resistance-associated protein (ABCC4) | AY081219.1 |
| multidrug resistance-associated protein (MRP) | L05628.1 |
| multidrug resistance-associated protein 3 (MRP3) | AF085690.1 |
| | AF085691.1 |
| Multidrug resistance-associated protein 5 variant protein | AB209454.1 |
| multidrug resistance-associated protein 7 (SIMRP7) | AY032599.1 |
| multidrug resistance-associated protein homolog MRP3 (MRP3) | AF009670.1 |
| multidrug resistance-associated protein(MRP)-like protein-2 (MLP-2) | AB010887.1 |
| multiple C2 domains, transmembrane 1 (MCTP1) | BC030005.2 |
| | NM_001002796.2 |
| | NM_024717.4 |
| multiple C2 domains, transmembrane 2 (MCTP2) | BC111024.1 |
| | BC041387.1 |
| | BC025708.1 |
| | BC131527.1 |
| | NM_001159644.1 |
| | NM_018349.3 |
| | NM_001159643.1 |
| myeloid cell leukemia ES variant (MCL1) | FJ917536.1 |
| neuregulin 4 (NRG4) | AM392365.1 |
| | AM392366.1 |
| neuronal nAChR beta-3 subunit | X67513.1 |
| neuronal nicotinic acetylcholine alpha10 subunit (NACHRA10 gene) | AJ278118.1 |
| | AJ295237.1 |
| neuronal nicotinic acetylcholine receptor alpha-3 subunit | X53559.1 |
| nicotinic acetylcholine alpha-7 subunit (CHRNA7 gene) | X70297.1 AJ586911.1 |
| neuronal nicotinic acetylcholine receptor beta-2 subunit | X53179.1 |
| nicotinic acetylcholine receptor alpha 3 subunit precursor | M86383.1 |
| nicotinic acetylcholine receptor alpha 4 subunit (nAChR) | L35901.1 |
| nicotinic acetylcholine receptor alpha 9 subunit (NACHRA9 gene) | AJ243342.1 |
| nicotinic acetylcholine receptor alpha2 subunit precursor | U62431.1 |
| | Y16281.1 |
| nicotinic acetylcholine receptor alpha3 subunit precursor | U62432.1 |
| | Y08418.1 |
| nicotinic acetylcholine receptor alpha4 subunit precursor | U62433.1 |
| | Y08421.1 |
| | X87629.1 |
| nicotinic acetylcholine receptor alpha5 subunit precursor | U62434.1 |
| | Y08419.1 |
| nicotinic acetylcholine receptor alpha6 subunit precursor | U62435.1 |
| | Y16282.1 |
| nicotinic acetylcholine receptor alpha7 subunit precursor | U62436.1 |
| nicotinic acetylcholine receptor alpha7 subunit precursor | Y08420.1 |
| nicotinic acetylcholine receptor beta2 subunit precursor | U62437.1 |
| nicotinic acetylcholine receptor beta2 subunit precursor | Y08415.1 |
| nicotinic acetylcholine receptor beta3 subunit precursor | U62438.1 |
| nicotinic acetylcholine receptor beta3 subunit precursor | Y08417.1 |
| nicotinic acetylcholine receptor beta4 subunit precursor | U62439.1 |
| nicotinic acetylcholine receptor beta4 subunit precursor | Y08416.1 |
| nicotinic acetylcholine receptor subunit alpha 10 | AF199235.2 |
| nicotinic cholinergic receptor alpha 7 (CHRNA7) | AF385585.1 |
| nicotinic receptor alpha 5 subunit | M83712.1 |
| nicotinic receptor beta 4 subunit | X68275.1 |
| on-erythroid band 3-like protein (HKB3) | X03918.1 |
| p58 natural killer cell receptor precursor | U24079.1 |
| | U24078.1 |
| | U24077.1 |
| | U24076.1 |
| | U24075.1 |
| | U24074.1 |
| peptide transporter (TAP1) | L21207.1 L21206.1 |
| | L21205.1 |
| | L21204.1 |
| peroxisomal 70 kD membrane protein | M81182.1 |
| peroxisomal membrane protein 69 (PMP69) | AF009746.1 |
| P-glycoprotein | AY090613.1 |
| P-glycoprotein (ABCB1) | AF399931.1 AF319622.1 |
| P-glycoprotein (mdr1) | AF016535.1 |
| P-glycoprotein (PGY1) | M14758.1 |
| P-glycoprotein ABCB5 | AY234788.1 |
| Phospholipase A2 receptor 1, 180 kDa (PLA2R1) | NM_001007267.2 |
| PMP70 | X58528.1 |
| Potassium voltage-gated channel, shaker-related subfamily, member 5 | NM_002234.2 |
| (KCNA5) | |
| potassium voltage-gated channel, shaker-related subfamily, member 7 | NM_031886.2 |
| (KCNA7) | |
| precursor of epidermal growth factor receptor | X00588.1 |
| pre-T cell receptor alpha-type chain precursor | U36759.1 |
| protein tyrosine phosphatase hPTP-J precursor | U73727.1 |
| Protein tyrosine phosphatase, receptor type, F (PTPRF) 2 | NM_006504.4 NM_130435.3 |
| | NM_002840.3 |
| | NM_130440.2 |
| Protein tyrosine phosphatase, receptor type, G (PTPRG) | NM_002841.3 |
| Protein tyrosine phosphatase, receptor type, H (PTPRH) | NM_001161440.1 NM_002842.3 |
| Protein tyrosine phosphatase, receptor type, J (PTPRJ) | NM_002843.3 NM_001098503.1 |
| Protein tyrosine phosphatase, receptor type, K (PTPRK) | NM_001135648.1 NM_002844.3 |
| Protein tyrosine phosphatase, receptor type, M (PTPRM) | NM_001105244.1 NM_002845.3 |
| Protein tyrosine phosphatase, receptor type, N polypeptide 2 (PTPRN2) | NM_001199764.1 NM_002846.3 |
| | NM_001199763.1 |
| | NM_130843.2 NM_002847.3 |
| | NM_130842.2 |
| Protein tyrosine phosphatase, receptor type, R (PTPRR) | NM_130846.1 NM_002849.2 |
| Protein tyrosine phosphatase, receptor type, T (PTPRT) | NM_007050.5 NM_133170.3 |
| Protein tyrosine phosphatase, receptor type, U (PTPRU) | NM_001195001.1 NM_133178.3 |
| protein tyrosine phosphatase, receptor type, U (PTPRU) | NM_005704.4 |
| | NM_133177.3 |
| protocadherin 1 (PCDH1) | NM_002587.3 |
| | NM_032420.2 |
| Protocadherin 8 (PCDH8), transcript variant 2 | NM_032949.2 |
| | NM_002590.3 |
| Protocadherin 9 (PCDH9) | NM_203487.2 NM_020403.4 |
| protocadherin alpha 1 (PCDHA1) | NM_031411.1 |
| Protocadherin alpha 10 (PCDHA10) | NM_031860.1 |
| protocadherin alpha 6 (PCDHA6) | NM_031849.1 |
| protocadherin gamma subfamily A, 1 (PCDHGA1) | NM_018912.2 |
| | NM_031993.1 |
| protocadherin gamma subfamily A, 10 (PCDHGA10) | NM_018913.2 |
| | NM_032090.1 |
| Protocadherin gamma subfamily A, 11 (PCDHGA11) | NM_032092.1 NM_032091.1 |
| | NM_018914.2 |
| Protocadherin gamma subfamily A, 12 (PCDHGA12) | NM_032094.1 NM_003735.2 |
| Protocadherin gamma subfamily A, 2 (PCDHGA2) | NM_032009.1 |
| | NM_018915.2 |
| protocadherin gamma subfamily A, 3 (PCDHGA3) | NM_018916.3 |
| protocadherin gamma subfamily A, 3 (PCDHGA3) | NM_032011.1 |
| protocadherin gamma subfamily A, 4 (PCDHGA4) | NM_032053.1 NM_018917.2 |
| protocadherin gamma subfamily A, 5 (PCDHGA5) | NM_032054.1 NM_018918.2 |
| protocadherin gamma subfamily A, 6 (PCDHGA6), transcript variant 2 | NM_032086.1 NM_018919.2 |
| protocadherin gamma subfamily A, 7 (PCDHGA7) | NM_018920.2 |
| | NM_032087.1 |
| Protocadherin gamma subfamily A, 8 (PCDHGA8) | NM_032088.1 NM_014004.2 |
| protocadherin gamma subfamily A, 9 (PCDHGA9) | NM_018921.2 |
| | NM_032089.1 |
| protocadherin gamma subfamily B, 1 (PCDHGB1) | NM_018922.2 |
| | NM_032095.1 |
| protocadherin gamma subfamily B, 2 (PCDHGB2) | NM_018923.2 |
| | NM_032096.1 |
| protocadherin gamma subfamily B, 3 (PCDHGB3) | NM_018924.2 |
| | NM_032097.1 |
| Protocadherin gamma subfamily B, 4 (PCDHGB4) | NM_032098.1 |
| | NM_003736.2 |
| protocadherin gamma subfamily B, 5 (PCDHGB5) | NM_032099.1 NM_018925.2 |
| protocadherin gamma subfamily B, 6 (PCDHGB6) | NM_032100.1 NM_018926.2 |
| Protocadherin gamma subfamily B, 7 (PCDHGB7) | NM_032101.1 NM_018927.2 |
| Protocadherin gamma subfamily C, 3 (PCDHGC3) | NM_032403.1 NM_032402.1 |
| | NM_002588.2 |
| protocadherin gamma subfamily C, 4 (PCDHGC4) | NM_018928.2 |
| | NM_032406.1 |
| protocadherin gamma subfamily C, 5 (PCDHGC5) | NM_032407.1 NM_018929.2 |
| PSF-2 | M74447.1 |
| transmembrane receptor IL-1Rrp | U43672.1 |
| RING4 | X57522.1 |
| Sarcoglycan, zeta (SGCZ) | NM_139167.2 |
| SB classII histocompatibility antigen alpha-chain | X00457.1 |
| SH2 domain-containing phosphatase anchor protein 1c (SPAP1) | AF319440.1 |
| SMRP | AB005659.1 |
| Solute carrier family 4, sodium bicarbonate cotransporter, member 4 | NM_001134742.1 NM_003759.3 |
| (SLC4A4) | NM_001098484.2 |
| Solute carrier family 6 (neurotransmitter transporter, noradrenalin), | NM_001172504.1 NM_001172502.1 |
| member 2 (SLC6A2) | NM_001172501.1 |
| | NM_001043.3 |
| sulfonylurea receptor (SUR1) | U63421.1 |
| | AB209084.1 |
| | AF087138.1 |
| sushi-repeat-containing protein precursor (SRPX) | U78093.1 |
| Synaptotagmin XIII (SYT13) | NM_020826.2 |
| Synaptotagmin XV (SYT15) | NM_031912.4 NM_181519.2 |
| T200 leukocyte common antigen (CD45, LC-A) | Y00062.1 |
| TAP2B | Z22935.1 |
| TAP2E | Z22936.1 |
| TAPL (TAP-Like), | AB112583.1 AB112582.1 |
| | AB045381.2 |
| thyroperoxidase | Y00406.1 |
| tissue-type tonsil IFGP6 | AY212514.1 |
| trans-golgi network glycoprotein 48 (TGN) | AF027515.1 |
| trans-golgi network glycoprotein 51 (TGN) | AF027516.1 |
| Transporter 1, ATP-binding cassette, sub-family B (MDR/TAP) (TAP1) | BC014081.2 |
| | NM_000593.5 |
| | AY523971.2 AY523970.1 |
| Transporter 2, ATP-binding cassette, sub-family B (MDR/TAP) (TAP2), | AF078671.1 AF105151.1 |
| | NM_018833.2 NM_000544.3 |
| | AK223300.1 |
| | AK222823.1 |
| | AB073779.1 |
| | AB208953.1 |
| ATP-binding cassette transporter sub-family C member 13 (ABCC13) | AY344117.1 |
| tyrosine kinase (FER) | J03358.1 |
| Ubiquinol-cytochrome c reductase, Rieske iron-sulfur polypeptide 1 | NM_006003.2 |
| (UQCRFS1) | BC067832.1 |
| | BC010035.2 |
| | BC000649.1 |
| ulfonylurea receptor (SUR1) | L78207.1 |

### Cell-Type Specific Polypeptides

[0447] As used herein, the term “cell-type specific polypeptide” refers to a polypeptide that is expressed in a cell having a particular phenotype (e.g., a muscle cell) but is not generally expressed in other cell types with different phenotypes. For example, MyoD is expressed specifically in muscle cells but not in non-muscle cells, thus MyoD is a cell-type specific polypeptide. As another example, albumin is expressed in hepatocytes and is thus an hepatocyte-specific polypeptide.

[0448] Such cell-specific polypeptides are well known in the art or can be found using a gene array analysis and comparison of at least two different cell types. Methods for gene expressional array analysis is well known in the art.

[0449] Differentiation factors, reprogramming factors and transdifferentiation factors are further discussed herein in their appropriate sub-sections.

### Death Receptors and Death Receptor Ligands

[0450] By “death receptor” is meant a receptor that induces cellular apoptosis once bound by a ligand. Death receptors include, for example, tumor necrosis factor (TNF) receptor superfamily members having death domains (e.g., TNFR1, Fas, DR3, 4, 5, 6) and TNF receptor superfamily members without death domains LTbetaR, CD40, CD27, HVEM. Death receptors and death receptor ligands are well known in the art or are discussed herein.

[0451] The synthetic, modified RNAs described herein can encode for death receptors to be expressed on the surface of a cell to enhance the vulnerability of a cell to apoptosis. The death ligand can also be encoded or can be provided e.g., at a tumor site. This is particularly useful in the treatment of cancer, where cells evade apoptosis and continue to divide. Alternatively, the synthetic, modified RNAs or compositions thereof can encode for a death receptor ligand, which will induce apoptosis in cells that express a cell surface death receptor and can increase the efficiency of programmed cell death in targeted cells of a subject.

[0452] Some non-limiting examples of death receptors include FAS (CD95, Apo1), TNFR1 (p55, CD120a), DR3 (Apo3, WSL-1, TRAMP, LARD), DR4, DR5 (Apo2, TRAIL-R2, TRICK2, KILLER), CAR1, and the adaptor molecules FADD, TRADD, and DAXX. Some non-limiting examples of death receptor ligands include FASL (CD95L), TNF, lymphotoxin alpha, Apo3L (TWEAK), and TRAIL (Apo2L).

### Mitogen Receptors

[0453] The synthetic, modified RNAs described herein can be used to express a mitogen receptor on a cell surface. Activation of a mitogen receptor with the mitogen induces cell growth and/or differentiation of the cell.

[0454] Mitogen receptors include those that bind ligands including, but not limited to: insulin, insulin-like growth factor (e.g., IGF1, IGF2), platelet derived growth factor (PDGF), epidermal growth factor (EGF), vascular endothelial growth factor (VEGF), nerve growth factor (NGF), fibroblast growth factor (FGF), bone morphogenic proteins (BMPs), granulocyte colony-stimulating factor (G-CSF), granulocyte-macrophage colony-stimulating factor (GM-CSF), hepatocyte growth factor (HGF), transforming growth factor (TGF)-alpha and -beta, among others.

[0455] In addition, cytokines that promote cell growth can also be encoded by synthetic, modified RNAs herein. For example, cytokines such as erythropoietin, thrombopoietin and other cytokines from the IL-2 sub-family tend to induce cell proliferation and growth.

### Protein Therapeutics

[0456] Synthetic, modified RNAs as described herein can also be used to express protein therapeutically in cells by either administration of a synthetic, modified RNA composition to an individual or by administering a synthetic, modified RNA to cells that are then introduced to an individual. In one aspect, cells can be transfected with a modified RNA to express a therapeutic protein using an ex vivo approach in which cells are removed from a patient, transfected by e.g., electroporation or lipofection, and re-introduced to the patient. Continuous or prolonged administration in this manner can be achieved by electroporation of blood cells that are re-infused to the patient.

[0457] Some exemplary protein therapeutics include, but are not limited to: insulin, growth hormone, erythropoietin, granulocyte colony-stimulating factor (G-CSF), thrombopoietin, clotting factor VII, Factor IX, interferon, glucocerebrosidase, anti-HER2 monoclonal antibody, and Etanercept, among others.

[0458] As used in this specification and the appended claims, the singular forms “a,” “an,” and the include plural references unless the context clearly dictates otherwise. Thus for example, references to “the method” includes one or more methods, and/or steps of the type described herein and/or which will become apparent to those persons skilled in the art upon reading this disclosure and so forth. In addition, the term ‘cell’ can be construed as a cell population, which can be either heterogeneous or homogeneous in nature, and can also refer to an aggregate of cells.

[0459] It is understood that the foregoing detailed description and the following examples are illustrative only and are not to be taken as limitations upon the scope of the invention. Various changes and modifications to the disclosed embodiments, which will be apparent to those of skill in the art, may be made without departing from the spirit and scope of the present invention. Further, all patents, patent applications, and publications identified are expressly incorporated herein by reference for the purpose of describing and disclosing, for example, the methodologies described in such publications that might be used in connection with the present invention. These publications are provided solely for their disclosure prior to the filing date of the present application. Nothing in this regard should be construed as an admission that the inventors are not entitled to antedate such disclosure by virtue of prior invention or for any other reason. All statements as to the date or representation as to the contents of these documents are based on the information available to the applicants and do not constitute any admission as to the correctness of the dates or contents of these documents.

[0460] All references cited herein in the specification are incorporated by reference in their entirety.

### EXAMPLES

[0461] Currently, clinical applications using induced pluripotent stem (iPS) cells are impeded by low efficiency of iPS derivation, and the use of protocols that permanently modify the genome to effect cellular reprogramming. Moreover, safe, reliable, and effective means of directing the fate of patient-specific iPS cells towards clinically useful cell types are lacking. Described herein are novel, non-mutagenic strategies for altering cellular phenotypes, such as reprogramming cell fate, based on the administration of synthetic, modified mRNAs that are modified to overcome innate cellular anti-viral responses. The compositions and approaches described herein can be used to reprogram multiple human cell types to pluripotency with surprising and unexpected efficiencies that greatly surpass established protocols. Also described herein are novel compositions and methods for directing the fate of cells towards clinically useful cell types, and a non-limiting example that demonstrates that this technology can be used to efficiently direct the differentiation of RNA-induced pluripotent stem (RiPS) cells into terminally differentiated myogenic cells. Thus, the compositions and methods described herein represent safe, highly efficient strategies for altering cellular developmental potentials, such as somatic cell reprogramming and directing differentiated cell fates, that have broad applicability for basic research, disease modeling and regenerative and personalized medicine.

### Experimental Procedures

[0462] Construction of IVT templates

[0463] The pipeline for production of IVT template constructs and subsequent RNA synthesis is schematized in FIG. 1. The oligonucleotide sequences used in the construction of IVT templates are shown in Table 4. All oligos were synthesized by Integrated DNA Technologies (Coralville, Iowa). ORF PCRs were templated from plasmids bearing human KLF4, c-MYC, OCT4, SOX2, human ES cDNA (LIN28), Clontech pIRES-eGFP (eGFP), pRVGP (d2eGFP) and CMV-MyoD from Addgene. The ORF of the low-stability nuclear GFP was constructed by combining the d2eGFP ORF with a 3′ nuclear localization sequence. PCR reactions were performed using HiFi Hotstart (KAPA Biosystems, Woburn, Mass.) per the manufacturer's instructions. Splint-mediated ligations were carried out using Ampligase Thermostable DNA Ligase (Epicenter Biotechnologies, Madison, Wis.). UTR ligations were conducted in the presence of 200 nM UTR oligos and 100 nM splint oligos, using 5 cycles of the following annealing profile: 95° C. for 10 seconds; 45° C. for 1 minute; 50° C. for 1 minute; 55° C. for 1 minute; 60° C. for 1 minute. A phosphorylated forward primer was employed in the ORF PCRs to facilitate ligation of the top strand to the 5′ UTR fragment. The 3′ UTR fragment was also 5′-phosphorylated using polynucleotide kinase (New England Biolabs, Ipswich, Mass.). All intermediate PCR and ligation products were purified using QIAquick spin columns (Qiagen, Valencia, Calif.) before further processing. Template PCR amplicons were sub-cloned using the pcDNA 3,3-TOPO TA cloning kit (Invitrogen, Carlsbad, Calif.). Plasmid inserts were excised by restriction digest and recovered with SizeSelect gels (Invitrogen) before being used to template tail PCRs.

[0464] 5′ and 3′ UTR oligos are ligated to the top strand of gene-specific ORF amplicons to produce a basic template construct for cloning. Underlined bases in the 5′ UTR oligo sequence indicate the upstream T7 promoter, and in the 3′ UTR oligo sequence show downstream restriction sites, introduced to facilitate linearization of template plasmids. Template PCR primers are used to amplify ligation products for sub-cloning. Tail PCR primers are used to append an oligo(dT) sequence immediately after the 3′ UTR to drive templated addition of a poly(A) tail during IVT reactions. Gene-specific ORF primers are used to capture the coding region (minus the start codon) from cDNA templates. Splint oligos mediate ligation of UTR oligos to the top strand of ORF amplicons.

TABLE 4
Oligonucleotides for IVT template construction (SEQ ID NOs: 1429-1466, respectively, in
order of appearance)

| | ORF Forward Primer | ORF Reverse Primer |
|---|---|---|
| eGFP | GTGAGCAAGGGCGAGGAGCTGTT | TTACTTGTACAGCTCGTCCATGCCGAGA |
| d2eGFP | GTGAGCAAGGGCGAGGAGCTGTT | CTACACATTGATCCTAGCAGAAGCACAGGCT |
| KLF4 | GCTGTCAGCGACGCGCTGCTC | TTAAAAATGCCTCTTCATGTGTAAGGCGAGGT |
| c-MYC | CCCCTCAACGTTAGCTTCACCAACAGG | TTACGCACAAGAGTTCCGTAGCTGTTCA |
| OCT4 | GCGGGACACCTGGCTTCGGATTTC | TCAGTTTGAATGCATGGGAGAGCCCAGA |
| SOX2 | TACAACATGATGGAGACGGAGCTGAAGC | TCACATGTGTGAGAGGGGCAGTGTG |
| LIN28 | GGCTCCGTGTCCAACCAG | TCAATTCTGTGCCTCCGG |
| MYQD | GAGCTTCTATCGCCGCCACTCC | TCAAAGCACCTGATAAATCGCATTGG |
| | 5′ Splint Oligo | 3′ Splint Oligo |
| eGFP | TCCTCGCCCTTGCTCACCATGGTGGCTCTTATATTTCTTCTT | CCCGCAGAAGGCAGCTTACTTGTACAGCTCGTCCATGC |
| d2eGFP | TCCTCGCCCTTGCTCACCATGGTGGCTCTTATATTTCTTCTT | CCCGCAGAAGGCAGCCTACACATTGATCCTAGCAGA |
| KLF4 | GCGCGTCGCTGACAGCCATGGTGGCTCTTATATTTCTTCTT | CCCGCAGAAGGCAGCTTAAAAATGCCTCTTCATGTGTAA |
| c-MYC | GTGAAGCTAACGTTGAGGGGCATGGTGGCTCTTATATTTCTTCTT | CCCGCAGAAGGCAGCTTACGCACAAGAGTTCCGTAG |
| OCT4 | AAGCCAGGTGTCCCGCCATGGTGGCTCTTATATTTCTTCTT | CCCGCAGAAGGCAGCTCAGTTTGAATGCATGGGAG |
| SOX2 | CTCCGTCTCCATCATGTTGTACATGGTGGCTCTTATATTTCTTCTT | CCCGCAGAAGGCAGCTCACATGTGTGAGAGGGGC |
| LIN28 | CTGGTTGGACACGGAGCCCATGGTGGCTCTTATATTTCTTCTT | CCCGCAGAAGGCAGCTCAATTCTGTGCCTCCGG |
| MYQD | TGGCGGCGATAGAAGCTCCATGGTGGCTCTTATATTTCTTCTT | CCCGCAGAAGGCAGCTCAAAGCACCTGATAAATCGCATTGG |
| | UTR Oligos | |
| 5′UTR | TTGGACCCTCGTACAGAAGCTAATACGACTCACTATAGGGAAATAAGAGAGAAAAGAAGAGTAAGAAGAAATATAAGAGCCACCATG | |
| 3′UTR | GCTGCCTTCTGCGGGGCTTGCCTTCTGGCCATGCCCTTCTTCTCTCCCTTGCACCTGTACCTCTTGGTCTTTGAATAAAGCCTGAGT | |
| | AGGAAGTGAGGGTCTAGAACTAGTGTCGACGC | |
| | Forward Primer | Reverse Primer |
| Template PCR | TTGGACCCTCGTACAGAAGCTAATACG | GCGTCGACACTAGTTCTAGACCCTCA |
| Tail PCR | TTGGACCCTCGTACAGAAGCTAATACG | T₁₂₀CTTCCTACTCAGGCTTTATTCAAAGACCA |

### Synthesis of Synthetic, Modified RNA

[0465] RNA was synthesized with the MEGAscript T7 kit (Ambion, Austin, Tex.), using 1.6 ug of purified tail PCR product to template each 40 uL reaction. A custom ribonucleoside blend was used comprising 3′-0-Me-m7G(5)ppp(5′)G ARCA cap analog (New England Biolabs), adenosine triphosphate and guanosine triphosphate (USB, Cleveland, Ohio), 5-methylcytidine triphosphate and pseudouridine triphosphate (TriLink Biotechnologies, San Diego, Calif.). Final nucleotide reaction concentrations were 33.3 mM for the cap analog, 3.8 mM for guanosine triphosphate, and 18.8 mM for the other nucleotides. Reactions were incubated 3-6 hours at 37° C. and DNAse-treated as directed by the manufacturer. RNA was purified using Ambion MEGAclear spin columns, then treated with Antarctic Phosphatase (New England Biolabs) for 30 minutes at 37° C. to remove residual 5′-triphosphates. Treated RNA was re-purified, quantitated by Nanodrop (Thermo Scientific, Waltham, Mass.), and adjusted to 100 ng/uL working concentration by addition of Tris-EDTA (pH 7.0). RNA reprogramming cocktails were prepared by pooling individual 100 ng/uL RNA stocks to produce a 100 ng/uL (total) blend. The KMOS[L]+GFP cocktails were formulated to give equal molarity for each component except for OCT4, which was included at 3× molar concentration. Volumetric ratios used for pooling were as follows: 170:160:420:130:120[:90] (KLF4:c-MYC:OCT4:SOX2:GFP[:LIN28]).

### Cells

[0466] The following primary cells were obtained from ATCC (Manassas, Va.): human neonatal epidermal keratinocytes, BJ human neonatal foreskin fibroblasts, MRC-5 human fetal lung fibroblasts, and Detroit 551 human fetal skin fibroblasts. CF cells were obtained with informed consent from a skin biopsy taken from an adult cystic fibrosis patient. The Daley Lab provided dH1f fibroblasts, which were sub-cloned from fibroblasts produced by directed differentiation of the H1-OGN human ES cell line as previously described (Park et al., 2008). BGO1 hES cells were obtained from BresaGen (Athens, Ga.). H1 and H9 hES cells were obtained from WiCell (Madison, Wi).

### RNA Transfection

[0467] RNA transfections were carried out using RNAiMAX (Invitrogen) or TransIT-mRNA (Mirus Bio, Madison, Wis.) cationic lipid delivery vehicles. RNAiMAX was used for RiPS derivations, the RiPS-to-myogenic conversion, and for the multiple cell-type transfection experiment documented in FIGS. 3A-3F. All other transfections were performed with TransIT-mRNA. For RNAiMAX transfections, RNA and reagent were first diluted in Opti-MEM basal media (Invitrogen). 100 ng/uL RNA was diluted 5× and 5 uL of RNAiMAX per microgram of RNA was diluted 10×, then these components were pooled and incubated 15 minutes at room temperature before being dispensed to culture media. For TransIT-mRNA transfections, 100 ng/uL RNA was diluted 10× in Opti-MEM and BOOST reagent was added (2 uL per microgram of RNA), then TransIT-mRNA was added (2 uL per microgram of RNA), and the RNA-lipid complexes were delivered to culture media after a 2-minute incubation at room temperature. RNA transfections were performed in Nutristem xeno-free hES media (Stemgent, Cambridge, Mass.) for RiPS derivations, Dermal Cell Basal Medium plus Keratinocyte Growth Kit (ATCC) for keratinocyte experiments, and Opti-MEM plus 2% FBS for all other experiments described. The B18R interferon inhibitor (eBioscience, San Diego, Calif.) was used as a media supplement at 200 ng/mL.

qRT-PCR of Interferon-Regulated Genes

[0468] Transfected and control 6-well cultures were washed with PBS and lysed in situ using 400 uL CellsDirect resuspension buffer/lysis enhancer (Invitrogen) per well, and 20 uL of each lysate was taken forward to a 50 uL reverse transcription reaction using the VILO cDNA synthesis kit (Invitrogen). Completed reactions were purified on QIAquick columns (Qiagen), and analyzed in 20 uL qPCRs, each templated with ˜10% of the total cDNA prep. The reactions were performed using SYBR FAST qPCR supermix (KAPA Biosystems) with 250 nM primers and a thermal profile including 35 cycles of (95° C. 3 s; 60° C. 20 s). The qPCR primer sequences used are given Table 5.

TABLE 5
Primers for qRT-PCR analysis of interferon-
regulated genes (SEQ ID NOs: 1467-1480,
respectively, in order of appearance).

| Tran- | | |
|---|---|---|
| script | Forward Primer | Reverse Primer |
| GAPDH | GAAGGCTGGGGCTCATTT | CAGGAGGCATTGCTGATGAT |
| IFNA | ACCCACAGCCTGGATAACAG | ACTGGTTGCCATCAAACTCC |
| IFNB | CATTACCTGAAGGCCAAGGA | CAGCATCTGCTGGTTGAAGA |
| IFIT1 | AAAAGCCCACATTTGAGGTG | GAAATTCCTGAAACCGACCA |
| OAS1 | CGATCCCAGGAGGTATCAGA | TCCAGTCCTCTTCTGCCTGT |
| PKR | TCGCTGGTATCACTCGTCTG | GATTCTGAAGACCGCCAGAG |
| RIG-I | GTTGTCCCCATGCTGTTCTT | GCAAGTCTTACATGGCAGCA |

### Reprogramming to Pluripotency

[0469] Gamma-irradiated human neonatal fibroblast feeders (GlobalStem, Rockville, Md.) were seeded at 33,000 cells/cm2. Nutristem media was used during the reprogramming phase of these experiments. Media was replaced daily, four hours after transfection, and supplemented with 100 ng/mL bFGF (Stemgent) and 200 ng/mL B18R before use. Where applied, VPA was added to media at 1 mM final concentration on days 8-15 of reprogramming. Low-oxygen culture experiments were carried out in a NAPCO 8000 WJ incubator (Thermo Scientific) supplied by NF300 compressed nitrogen cylinders (Airgas, Radnor, Pa.). Media were equilibrated at 5% O₂ for approximately 4 hours before use. Cultures were passaged using TrypLE Select recombinant protease (Invitrogen). Y27632 ROCK inhibitor (Watanabe et al., 2007) was purchased from Stemgent and included at 10 uM in recipient plates until the next media change, except where otherwise indicated. The daily RNA dose applied in the RiPS derivations was 1200 ng per well (6-well plate format) or 8 ug to a 10-cm dish.

[0470] For the RNA vs. retrovirus trial, both arms of the experiment were started with the same number of dH1f cells, and the passaging of the cultures was synchronized. Starting cultures were seeded with 100,000 cells in individual wells of a 6-well plate using fibroblast media (DMEM+10% FBS). The following day (day 1) KMOS RNA transfections were initiated in the RNA plate, and the viral plate was transduced with a KMOS retroviral cocktail (MOI=5 for each virus). All wells were passaged on day 6, using split ratios of 1:6 for the RNA wells and 1:3 for the virus wells. The conditions applied in the RNA arm of the trial were as in the initial RiPS derivation, including the use of Nutristem supplemented with 100 ng/mL bFGF, 5% O2 culture, and human fibroblast feeders. Ambient oxygen tension and other conventional iPS derivation conditions were used in the viral arm, the cells being grown in fibroblast media without feeders until the day 6 split, then being replated onto CF1 MEF feeders (GlobalStem) with a switch to hES media based on Knockout Serum Replacement (Invitrogen) supplemented with 10 ng/mL bFGF.

### Culture of RiPS Cell Colonies

[0471] Emerging RiPS cell colonies were picked and clonally transferred to MEF-coated 24-well plates (Nunc, Rochester, N.Y.) with standard hES medium containing 5 uM Y27632 (BioMol, Plymouth Meeting, Pa.). The hES media comprised DMEM/F12 supplemented with 20% Knockout Serum Replacement (Invitrogen), 10 ng/mL of bFGF (Gembio, West Sacramento, Calif.), 1× non-essential amino acids (Invitrogen), 0.1 mM β-ME (Sigma), 1 mM L-glutamine (Invitrogen), plus antibiotics. Clones were mechanically passaged once more to MEF-coated 6-well plates (Nunc), and then expanded using enzymatic passaging with collagenase IV (Invitrogen). For RNA and DNA preparation, cells were plated onto hES-qualified Matrigel (BD Biosciences) in mTeSR (Stem Cell Technologies, Vancouver, BC), and further expanded by enzymatic passaging using dispase (Stem Cell Technologies).

### Immunostaining of Pluripotency Markers

[0472] For fixed-cell imaging, RiPS colonies were mechanically picked and plated onto MEF feeders in black 96-well plates (Matrix Technologies, Maumee, Ohio). Two days post-plating, cells were washed with PBS and fixed in 4% paraformaldehyde for 20 minutes. After 3 PBS washes, cells were treated with 0.2% Triton X (Sigma) in PBS for 30 minutes to allow nuclear permeation. Cells were washed 3× in PBS and blocked in blocking buffer containing 3% BSA (Invitrogen) and 5% donkey serum (Sigma) for 2 hours at room temperature. After three PBS washes, cells were stained in blocking buffer with primary and conjugated antibodies at 4° C. overnight. After washing 3× with PBS, cells were stained with secondary antibodies and 1 ug/mL Hoechst 33342 (Invitrogen) in blocking buffer for 3 hours at 4° C. or for 1 hour at room temperature, protected from light. Cells were washed 3× with PBS before visualization. The following antibodies were used, at 1:100 dilution TRA-1-60-Alexa Fluor 647, TRA-1-81-Alexa Fluor 488, SSEA-4-Alexa Fluor 647, and SSEA-3-Alexa 488 (BD Biosciences). Primary OCT4 and NANOG antibodies (Abcam, Cambridge, Mass.) were used at 0.5 ug/mL, and an anti-rabbit IgG Alexa Fluor 555 (Invitrogen) was used as the secondary. Images were acquired with a Pathway 435 bioimager (BD Biosciences) using a 10× objective. Live imaging was performed as described previously (Chan et al., 2009). Briefly, wells were stained by adding 1:100-diluted TRA-1-60-Alexa 647 and SSEA-4-Alexa 555 antibodies (BD Biosciences) to culture media. After 1.5 hours, Hoechst 33342 was added at a final concentration of 0.25 ug/mL, and wells were incubated for an additional 30 minutes. Wells were washed 3× with DMEM/F12 base media lacking phenol red, and imaged in hES media lacking phenol red. Images were acquired with a Pathway 435 bioimager using 4× and 10× objectives. Post-acquisition image processing and analysis was performed using Adobe Photoshop for pseudocoloring and ImageJ (http://rsbweb.nih.gov/ij) for flat-field correction, background subtraction, and colony quantitation.

[0473] For pluripotency factor time course experiments, transfected human epidermal keratinocytes were trypsinized, washed with PBS, and fixed in 4% paraformaldehyde for 10 minutes. Fixed cells were washed with 0.1M glycine, then blocked and permeabilized in PBS/0.5% saponin/1% goat serum (Rockland Immunochemicals, Gilbertsville, Pa.) for 20 minutes. Cells were incubated for 1 hour at room temperature with 1:100 diluted primary antibodies for KLF4, OCT4, SOX2 (Stemgent), washed, then for 45 minutes at room temperature with 1:200-diluted DyLight 488-labeled secondary antibodies (goat anti-mouse IgG+IgM and goat anti-rabbit IgG). Cells suspended in PBS were analyzed by flow cytometry.

### Gene Expression Analysis

[0474] RNA was isolated using the RNeasy kit (Qiagen) according to the manufacturer's instructions. First-strand cDNA was primed with oligo(dT) primers and qPCR was performed with primer sets as described previously (Park et al., 2008), using Brilliant SYBR Green master mix (Stratagene, La Jolla, Calif.). For the microarray analysis, RNA probes were prepared and hybridized to Human Genome U133 Plus 2.0 oligonucleotide microarrays (Affymetrix, Santa Clara, Calif.) per the manufacturer's instructions. Arrays were processed by the Coriell Institute Genotyping and Microarray Center (Camden, N.J.). Microarray data will be uploaded to the GEO database. Gene expression levels were normalized with the Robust Multichip Average (RMA) algorithm. Unsupervised hierarchical clustering was performed using the Euclidean distance with average linkage method. The similarity metric for comparison between different cell lines is indicated on the height of cluster dendrogram.

### Bisulfite Sequencing

[0475] DNA was extracted using the DNeasy Blood and Tissue kit (Qiagen) according to the manufacturer's protocol. Bisulfite treatment of genomic DNA was carried out using EZ DNA Methylation™ Kit (Zymo Research, Orange, Calif.) according to the manufacturer's protocol. For pyrosequencing analysis, the bisulfite treated DNA was first amplified by HotStar Taq Polymerase (Qiagen) for 45 cycles of (95° C. 30 s; 53° C. 30 s; 72° C. 30 s). The analysis was performed by EpigenDx using the PSQ™96HS system according to standard procedures using primers that were developed by EpigenDx for the CpG sites at positions (−50) to (+96) from the start codon of the OCT4 gene.

### Tri-Lineage Differentiation

[0476] Embryoid body (EB) hematopoietic differentiation was performed as previously described (Chadwick et al., 2003). Briefly, RiPS cells and hES cell controls were passaged with collagenase IV and transferred (3:1) in differentiation medium to 6-well low-attachment plates and placed on a shaker in a 37° C. incubator overnight. Starting the next day, media was supplemented with the following hematopoietic cytokines: 10 ng/mL of interleukin-3 (R&D Systems, Minneapolis, Minn.) and interleukin-6 (R&D), 50 ng/mL of G-CSF (Amgen, Thousand Oaks, Calif.) and BMP-4 (R&D), and 300 ng/mL of SCF (Amgen) and Flt-3 (R&D). Media was changed every 3 days. On day 14 of differentiation, EBs were dissociated with collagenase B (Roche, Indianapolis, Ind.). 2×104 differentiated cells were plated into methylcellulose H4434 (Stem Cell Technologies) and transferred using a blunt needle onto 35 mm dishes (Stem Cell Technologies) in triplicate and incubated at 37° C. and 5° C. O2 for 14 days. Colony Forming Units (CFUs) were scored based on morphological characteristics.

[0477] For neuronal differentiation, cells were differentiated at 70% confluency as a monolayer in neuronal differentiation medium (DMEM/F12, Glutamax 1%, B27-Supplement 1%, N2-Supplement 2%, P/S 1% and noggin 20 ng/ml). After 7 days neuronal structures were visible. For endoderm differentiation (AFP stain), cells were differentiated as a monolayer in endoderm differentiation medium (DMEM, B27(-RA) and 100 ng/ml activin-a) for 7 days, then switched to growth medium (DMEM, 10% FBS, 1% P/S) and continued differentiation for 7 days. Primary antibodies used in immunostaining were as follows: Anti-β-Tubulin III (Tuj1) rabbit anti-human (Sigma, St. Louis, Mo.), 1:500; AFP (h-140) rabbit polyclonal IgG, (Santa Cruz Biotechnology, Santa Cruz, Calif.), 1:100 dilution. All secondary antibodies were conjugated to Alexa Fluor 488, Alexa Fluor 594 and raised in donkey.

[0478] For cardiomyocyte differentiation, colonies were digested at 70% confluency using dispase and placed in suspension culture for embryoid body (EB) formation in differentiation medium (DMEM, 15% FBS, 100 uM ascorbic acid). After 11 days, EBs were plated to adherent conditions using gelatin and the same medium. Beating cardiomyocytes were observed 3 days after replating.

[0479] For the teratoma assay, 2.5×10⁶ cells were harvested, spun down, and all excess media was removed. In a 20-week old female SCID mouse, the capsule of the right kidney was gently elevated, and one droplet of concentrated cells was inserted under the capsule. At week 6, when adequate tumor size was observed, the tumor was harvested, fixed in 4% PFA, run through an ethanol gradient, and stored in 70% ethanol. Specimens were sectioned and H&E staining. Slides were imaged with a Leica light microscope.

### Myogenic Differentiation of RiPS Cells

[0480] Validated RiPS cells were plated into wells coated with 0.1% gelatin (Millipore, Billerica, Mass.), and cultured in DMEM+10% FBS for 4 weeks with passaging every 4-6 days using trypsin. The culture media was switched to Opti-MEM+2% FBS, and the cells were transfected with modified RNA encoding either murine MYOD or GFP the following day, and for the following two days. Media was supplemented with B18R, and replaced 4 hours after each transfection. After the third and final transfection, the media was switched to DMEM+3% horse serum, and cultures were incubated for a further 3 days. Cells were then fixed in 4% PFA and immuno-stained as previously described (Shea et al., 2010). The percentage of myogenin-positive nuclei/total nuclei and nuclei/MyHC-positive myotubes was quantified, with a minimum of 500 nuclei counted per condition.

[0481] Thus far, the reprogramming of differentiated cells to pluripotency shows great utility as a tool for studying normal cellular development, while also having the potential for generating patient-specific induced pluripotent stem (iPS) cells that can be used to model disease, or to generate clinically useful cell types for autologous therapies aimed at repairing deficits arising from injury, illness, and aging. Induction of pluripotency was originally achieved by Yamanaka and colleagues by enforced expression of four transcription factors, KLF4, c-MYC, OCT4, and SOX2 (KMOS) using retroviral vectors (Takahashi et al., 2007; Takahashi and Yamanaka, 2006).

[0482] A formidable obstacle to therapeutic use of iPS cells has been presented by the requirement for viral integration into the genome. The search for ways to induce pluripotency without incurring genetic change has become the focus of intense research effort. Towards this end, attempts to derive iPS cells using excisable lentiviral and transposon vectors, or through repeated application of transient plasmid, episomal, and adenovirus vectors have been made (Chang et al., 2009; Kaji et al., 2009; Okita et al., 2008; Stadtfeld et al., 2008; Woltjen et al., 2009; Yu et al., 2009). Human iPS cells have also been derived using two DNA-free methods: serial protein transduction with recombinant proteins incorporating cell-penetrating peptide moieties (Kim et al., 2009; Zhou et al., 2009), and transgene delivery using the Sendai virus, which has a completely RNA-based reproductive cycle (Fusaki et al., 2009).

[0483] Considerable limitations accompany the non-integrative iPS derivation strategies devised thus far. For example, DNA transfection-based methodologies still entail risk of genomic recombination or insertional mutagenesis, even though they are supposedly safer than viral-based delivery methods. In the protein-based strategies thus far derived, the recombinant proteins used are difficult and challenging to generate and purify in the quantities required, and result in even lower efficiencies of pluripotent stem cell generation that conventional viral-based methods (Zhou et al., 2009). Use of Sendai virus requires stringent steps to purge reprogrammed cells of replicating virus, and the sensitivity of the viral RNA replicase to transgene sequence content can further limit the generality of this reprogramming vehicle (Fusaki et al., 2009). Importantly, the methods discussed that rely on repeat administration of transient vectors, whether DNA or protein-based, have shown very low reprogramming and iPS derivation efficiencies (Jia et al., 2010; Kim et al., 2009; Okita et al., 2008; Stadtfeld et al., 2008; Yu et al., 2009; Zhou et al., 2009), presumably due, without wishing to be bound or limited by theory, to weak or inconstant expression of reprogramming factors.

[0484] As demonstrated herein, the inventors have discovered and shown that repeated administration of synthetic, modified messenger RNAs that incorporate novel modifications designed to bypass innate cellular anti-viral responses can reprogram differentiated human cells to pluripotency with conversion efficiencies and kinetics vastly and unexpectedly superior to established protein- and viral-based protocols. Accordingly, described herein are methods and compositions demonstrating that this non-mutagenic, efficient, and highly controllable technology is applicable to a wide range of cellular engineering tasks involving altering cellular developmental potentials, such as the reprogramming of differentiated cells, and the differentiation of reprogrammed cells to a differentiated cell type, such as RNA-iPS (RiPS)-derived fibroblasts to terminally differentiated myogenic cells.

### Development of Synthetic, Modified RNAs for Directing Cell Fate

[0485] mRNA was manufactured using in vitro transcription (IVT) reactions templated by PCR amplicons (FIG. 1). To promote efficient translation and boost RNA half-life in the cytoplasm, a 5′ guanine cap was incorporated by inclusion of a synthetic cap analog in the IVT reactions (Yisraeli et al., 1989). Within the IVT templates described herein, the open reading frame (ORF) of the gene of interest is flanked by a 5′ untranslated region (UTR) containing a strong Kozak translational initiation signal, and an alpha-globin 3′ UTR terminating with an oligo(dT) sequence for templated addition of a polyA tail.

[0486] Cytosolic delivery of mRNA into mammalian cells can be achieved using electroporation or by complexing the RNA with a cationic vehicle to facilitate uptake by endocytosis (Audouy and Hoekstra, 2001; Elango et al., 2005; Holtkamp et al., 2006; Van den Bosch et al., 2006; Van Tendeloo et al., 2001). The latter approach was utilized by the inventors as it would allow for repeated transfection to sustain ectopic protein expression over the days to weeks required for cellular reprogramming. In experiments in which synthetic RNA encoding GFP was transfected into murine embryonic fibroblasts and human epidermal keratinocytes, high, dose-dependent cytotoxicity was noted, which was not attributable to the cationic vehicle, and which was exacerbated on repeated transfections. These experiments demonstrated a serious impediment to achieving sustained protein expression by repeated mRNA transfection.

[0487] It is has been reported that exogenous single-stranded RNA (ssRNA) activates antiviral defenses in mammalian cells through interferon and NF-κB dependent pathways (Diebold et al., 2004; Hornung et al., 2006; Kawai and Akira, 2007; Pichlmair et al., 2006; Uematsu and Akira, 2007). In order to increase the sustainability of RNA-mediated protein expression, approaches were sought to reduce the immunogenic profile of the synthetic RNA. The co-transcriptional capping technique yields a significant fraction of uncapped IVT product bearing 5′ triphosphates, which has been reported to trigger the ssRNA sensor RIG-I (Hornung et al., 2006; Pichlmair et al., 2006), and have also been reported to activate PKR, a global repressor of cellular protein translation (Nallagatla and Bevilacqua, 2008). However, treatment of the synthesized RNA with a phosphatase only resulted in modest reductions in the observed cytotoxicity upon repeated transfections.

[0488] Eukaryotic mRNA is extensively modified in vivo, and the presence of modified nucleobases has been shown to reduce signaling by RIG-I and PKR, as well as by the less widely expressed but inducible endosomal ssRNA sensors TLR7 and TLR8 (Kariko et al., 2005; Kariko et al., 2008; Kariko and Weissman, 2007; Nallagatla and Bevilacqua, 2008; Nallagatla et al., 2008; Uzri and Gehrke, 2009). In an attempt to further reduce innate immune responses to transfected RNA, mRNAs were synthesized incorporating modified ribonucleoside bases. Complete substitution of either 5-methylcytidine (5mC) for cytidine or pseudouridine (psi) for uridine in GFP-encoding transcripts markedly improved viability and increased ectopic protein expression.

[0489] However, the most significant improvements in viability and protein expression were observed when both 5-methylcytidine and pseudouridine were used together (FIGS. 2A-2E). It was discovered that these modifications dramatically attenuated interferon signaling as revealed by qRT-PCR for a panel of interferon response genes, although residual upregulation of some interferon targets was still detected (FIGS. 2F-2K). Innate cellular anti-viral defenses can self-prime through a positive-feedback loop involving autocrine and paracrine signaling by Type I interferons (Randall and Goodbourn, 2008). It was found that media supplementation with a recombinant version of B18R protein, a Vaccinia virus decoy receptor for Type I interferons (Symons et al., 1995), further increased cellular viability following RNA transfection, especially in some cell types. It was discovered that synthesis of RNA with a combination of both modified 5-methylcytidine and pseudouridine ribonucleotides and phosphatase treatment (herein termed “synthetic, modified RNAs”), combined with media supplementation with the interferon inhibitor B18R allowed high, dose-dependent levels of protein expression (FIG. 2L).

[0490] It was discovered that transfection of synthetic, modified RNA encoding GFP into six different human cell types resulted in highly penetrant expression (50-90% positive cells), and demonstrated the applicability of these novel methods and compositions to diverse cell types (FIG. 3A). Simultaneous delivery of synthetic, modified RNAs encoding cytosolic-localized red, and nuclear-localized green fluorescent proteins into keratinocytes revealed that generalized co-expression of multiple proteins could be achieved in mammalian cells, and that the resulting proteins were correctly localized to the cytosol and nucleus, respectively (FIG. 2N).

[0491] Ectopic protein expression after RNA transfection is transient owing to RNA and protein degradation and the diluting effect of cell division. To establish the kinetics and persistence of protein expression, synthetic, modified RNA encoding GFP variants designed for high and low protein stability (Li et al., 1998) were synthesized and transfected into keratinocytes. Time-course analysis by flow cytometry showed that protein expression persisted for several days for the high-stability variant, but peaked within 12 hours and decayed rapidly thereafter for the destabilized GFP (FIGS. 3B and 3D). These results indicated that a repetitive transfection regimen would be necessary in order to sustain high levels of ectopic expression for short-lived proteins over an extended time course.

[0492] To assess this and further address the impact of repeated RNA transfection on cell growth and viability, BJ fibroblasts were transfected daily for 10 days with either unmodified, or synthetic, modified RNAs encoding GFP. It was discovered that daily transfection with synthetic, modified RNA permitted sustained protein expression without substantially compromising the viability of the culture beyond a modest reduction in growth kinetics that was attributable to the transfection reagent vehicle (FIGS. 2O and 3C). Microarray analysis established that prolonged daily transfection with synthetic, modified RNA did not significantly alter the molecular profile of the transfected cells (FIG. 3E), although a modest upregulation of a number of interferon response genes was noted, consistent with the fact that the modifications described herein did not completely abrogate interferon signaling (FIGS. 2F-2K, FIG. 3F). In complete contrast, repeated transfections with unmodified RNA severely compromised the growth and viability of the culture through, in part, elicitation of a massive interferon response (FIGS. 2F-2K), demonstrating that the use of unmodified RNA is not a viable strategy for sustaining long-term polypeptide expression in cells (FIG. 2O).

[0493] To determine if modified RNAs could be used to directly alter cell fate, synthetic, modified RNA was synthesized encoding the myogenic transcription factor MYOD (Davis et al., 1987) and transfected into murine C3H10T1/2 cells over the course of 3 days, followed by continued culturing in a low serum media for an additional 3 days. The emergence of large, multi-nucleated myotubes that stained positive for the myogenic markers myogenin and myosin heavy chain (MyHC) provided proof that transfection with synthetic, modified RNAs could be utilized to efficiently direct cell fate (FIG. 2P).

### Generation of Induced Pluripotent Stem Cells Using Modified RNAs

[0494] The determination of whether induced pluripotent stem cells (iPS) could be derived using synthetic, modified RNAs was next attempted. To this end, synthetic, modified RNAs encoding the four canonical Yamanaka factors, KLF4 (K), c-MYC (M), OCT4 (O), and SOX2 (S), were synthesized, transfected into cells. It was discovered that the synthetic, modified RNAs encoding transcription factors yielded robust protein expression that localized to the nucleus (FIG. 4A). Time-course analysis monitored by flow cytometry yielded expression kinetics and stability similar to destabilized GFP (FIGS. 3B and 3D), demonstrating rapid turnover of these transcription factors (FIGS. 4B-4D). From this, it was concluded that daily transfections would be required to maintain sufficient expression of the Yamanaka factors during long-term, multi-factor reprogramming regimens.

[0495] A protocol to ensure sustained high-level protein expression with daily transfection was next discovered by exploring a matrix of conditions encompassing a variety of different transfection reagents, culture media, feeder cell types, and RNA doses. Long-term reprogramming experiments were initiated with human ES-derived dH1f fibroblasts, which display relatively efficient viral-mediated iPS cell conversion (Chan et al., 2009; Park et al., 2008). Low-oxygen (5% O2) culture conditions and a KMOS stoichiometry of 1:1:3:1 were also employed, as these have been reported to promote efficient iPS conversion in viral-based methods (Kawamura et al., 2009; Papapetrou et al., 2009; Utikal et al., 2009; Yoshida et al., 2009). Synthetic, modified RNA encoding a short half-life nuclear GFP was spiked into the KMOS RNA cocktail to allow visualization of continued protein expression from modified RNA during the course of the experiment (FIGS. 5A-5B). Experiments conducted in this manner revealed widespread transformation of fibroblast morphology to a compact, epithelioid morphology within the first week of synthetic, modified RNA transfection, which was followed by emergence of canonical hES-like colonies with tight morphology, well-defined borders, and prominent nucleoli (FIG. 5C). RNA transfection was terminated on day 17, and three days later colonies were mechanically picked and expanded to establish 14 prospective iPS lines, designated dH1f-RiPS(RNA-derived iPS) 1-14.

[0496] It was next attempted to reprogram somatically-derived cells to pluripotency using a similar reprogramming regimen. A five-factor cocktail including a modified RNA encoding LIN28 (KMOSL) (Yu et al., 2007) was employed and the media was supplemented with valproic acid (VPA), a histone deacetylase inhibitor, which has been reported to increase reprogramming efficiency (Huangfu et al., 2008). Four human cell types were tested: Detroit 551 (D551) and MRC-5 fetal fibroblasts, BJ post-natal fibroblasts, and fibroblast-like cells cultured from a primary skin biopsy taken from an adult cystic fibrosis patient (CF cells). Daily transfection with the modified RNA KMOSL cocktail gave rise to numerous hES-like colonies in the D551, BJ, and CF cultures that were mechanically picked at day 18, while MRC-5-derived colonies were picked at day 25. Multiple RiPS colonies were expanded for each of the somatic lines, and immunostaining confirmed the expression of hES markers TRA-1-60, TRA-1-81, SSEA3, SSEA4, OCT4, and NANOG in all the RiPS lines examined (FIG. 4F, FIG. 5C). Three RiPS cell clones from each of these four derivations were analyzed and confirmed to originate from the seeded somatic cells by DNA fingerprinting, and all presented normal karyotypes. In the experiments described above, the transfected fibroblast cultures were passaged once at an early time point (day 6 or 7) in order to promote fibroblast proliferation, which has been shown to facilitate reprogramming (Hanna et al., 2009). However, in independent experiments, RiPS cells were also derived from BJ and Detroit 551 fibroblasts in the absence of cell passaging, indicating that this was not required for modified RNA iPS-derivation (FIGS. 6A-6B).

### Molecular Characterization and Functional Potential of RiPS Cells

[0497] A number of molecular and functional assays were performed to assess whether the RiPS cells described herein had been reprogrammed to pluripotency (Table 6). Multiple RiPS lines derived from each of the five starting cell types were evaluated by quantitative RT-PCR (qRT-PCR), and all demonstrated robust expression of the pluripotency-associated transcripts OCT4, SOX2, NANOG, and hTERT (FIG. 7A). RiPS clones derived from dH1f, MRC5, BJ, and CF fibroblasts were further analyzed by bisulfite sequencing, which revealed extensive demethylation of the OCT4 locus relative to the parental fibroblasts, an epigenetic state equivalent to human ES cells (FIG. 7B).

TABLE 6
Pluripotency validation assays performed in this study.

| | | Bisulfite | | Developmental Potential | |
|---|---|---|---|---|---|
| Immunostaining^{#} | qRT-PCR | Sequencing^{Ω} | Microarray | In vitro | Teratoma |
| dH1F-RiPS-1.3 | dH1F-RiPS-1.2 | dH1F-RiPS-1.2 | dH1F-RiPS-1.2 | dH1F-RiPS-1.2\hat{ }^{†ø}* | dH1F-RiPS-1.3 |
| dH1F-RiPS-1.6 | dH1F-RiPS-1.3 | dH1F-RiPS-1.3 | dH1F-RiPS-1.3 | dH1F-RiPS-1.6\hat{ }^{ø} | dH1F-RiPS-1.5 |
| dH1F-RiPS-1.13 | dH1F-RiPS-1.6 | dH1F-RiPS-1.6 | dH1F-RiPS-1.6 | dH1F-RiPS-1.13\hat{ }^{ø} | dH1F-RiPS-1.6 |
| BJ-RiPS-1.1 | dH1F-RiPS-1.7 | BJ-RiPS-1.2 | dH1F-RiPS-1.7 | dH1F-RiPS-1.14\hat{ }^{ø} | dH1F-RiPS-1.7 |
| BJ-RiPS-1.2 | BJ-RiPS-1.1 | BJ-RiPS-1.3 | BJ-RiPS-1.1 | MCR5-RiPS-1.8\hat{ }^{†}* | dH1F-RiPS-1.11 |
| BJ-RiPS-1.3 | BJ-RiPS-1.2 | MCR5-RiPS-1.8 | BJ-RiPS-1.2 | MCR5-RiPS-1.9\hat{ }^{†}* | BJ-RiPS-1.1 |
| MCR5-RiPS-1.2 | BJ-RiPS-1.3 | MCR5-RiPS-1.9 | BJ-RiPS-1.3 | MCR5-RiPS-1.11\hat{ }* | BJ-RiPS-1.2 |
| MCR5-RiPS-1.3 | MCR5-RiPS-1.8 | MCR5-RiPS-1.11 | MCR5-RiPS-1.8 | BJ-RiPS-1.1\hat{ }^{†ø}* | CF-RiPS-1.2 |
| MCR5-RiPS-1.11 | MCR5-RiPS-1.9 | CF-RiPS-1.2 | MCR5-RiPS-1.9 | BJ-RiPS-1.2\hat{ }^{†ø}* | |
| CF-RiPS-1.2 | MCR5-RiPS-1.11 | CF-RiPS-1.3 | MCR5-RiPS-1.11 | BJ-RiPS-1.3\hat{ }^{†}* | |
| CF-RiPS-1.3 | CF-RiPS-1.2 | CF-RiPS-1.4 | CF-RiPS-1.2 | CF-RiPS-1.2\hat{ }^{†}* | |
| CF-RiPS-1.4 | CF-RiPS-1.3 | | CF-RiPS-1.3 | CF-RiPS-1.3\hat{ }^{†}* | |
| D551-RiPS-1.1 | CF-RiPS-1.4 | | CF-RiPS-1.4 | CF-RiPS-1.4\hat{ }^{ø}* | |
| D551-RiPS-1.2 | D551-RiPS-1.1 | | | D551-RiPS-1.1\hat{ }^{†}* | |
| D551-RiPS-1.3 | D551-RiPS-1.2 | | | D551-RiPS-1.2\hat{ }* | |
| | D551-RiPS-1.3 | | | D551-RiPS-1.3\hat{ }* | |

Table 6 shows the RiPS clones that were validate in each assay.
^{#}Validated for immuno-staining for all of TRA-1-60, TRA-1-80, SSEA3, SSEA4, OCT4, NANOG.
^{Ω}Demethylation of the OCT4 promoter. In vitro differentiation including
\hat{ }embryoid body formation,
^{ø}trilineage by directed differentiation,
^{†}beating cardiomyocytes, and
*blood formation by CFC assays in methylcellulose.

Table 6 shows the RiPS clones that were validate in each assay. # Validated for immuno-staining for all of TRA-1-60, TRA-1-80, SSEA3, SSEA4, OCT4, NANOG. Ω Demethylation of the OCT4 promoter. In vitro differentiation including ̂embryoid body formation, øtrilineage by directed differentiation, † beating cardiomyocytes, and *blood formation by CFC assays in methylcellulose.

[0498] To gain more global insight into the molecular properties of RiPS cells, gene expression profiles of RiPS clones from multiple independent derivations were generated and compared to fibroblasts, human embryonic stem (ES) cells, and virally-derived iPS cell lines. These analyses revealed that all synthetic, modified RNA-derived iPS clones examined had a molecular signature that very closely recapitulated that of human ES cells while being highly divergent from the profile of the parental fibroblasts (FIGS. 7C-7H). Importantly, pluripotency-associated transcripts including SOX2, REX1, NANOG, OCT4, LIN28 and DNMT3B were substantially upregulated in the RiPS cells compared to the parental fibroblast lines to levels comparable to human ES cells (FIGS. 7C-7H). Furthermore, when the transcriptional profiles were subjected to unsupervised hierarchical clustering analysis, all RiPS clones analyzed clustered more closely to human ES cells than did virally-derived iPS cells, indicating that synthetic, modified RNA-derived iPS cells more fully recapitulated the molecular signature of human ES cells (FIG. 7I).

[0499] To evaluate the developmental potential of RiPS cells, embryoid bodies (EBs) were generated from multiple clones representing five independent RiPS derivations. Beating cardiomyocytes were observed for vast majority of the EBs (Table 6). Mesodermal potential was further evaluated in methylcellulose assays which showed that all lines tested were able to differentiate into hematopoietic precursors capable of giving rise to colony numbers and a spectrum of blood colony types comparable to human ES cells (FIG. 8A, Table 6). A subset of clones was further plated onto matrigel and differentiated into Tuj1-positive neurons (ectoderm), and alpha-fetoprotein-positive endodermal cells (FIG. 8B, Table 6). Finally, tri-lineage differentiation potential was confirmed in vivo by the formation of teratomas from dH1F-, CF- and BJ-RiPS cells, that histologically revealed cell types of the three germ layers (FIG. 8C, FIG. 9, Table 6).

[0500] Taken together, these data demonstrate by the most stringent molecular and functional criteria available in regard to human pluripotent cells (Chan et al., 2009; Smith et al., 2009), that the synthetic, modified RNA-derived iPS clones from multiple independent derivations described herein were reprogrammed to pluripotency, and closely recapitulated the functional and molecular properties of human ES cells. Significantly, these synthetic, modified RNA-derived iPS clones had molecular properties more similar to human ES cells than did cells that were reprogrammed using standard, viral-based methods.

### Modified RNAs Generate iPS Cells at Very High Efficiency

[0501] During the course of the experiments, surprisingly high reprogramming efficiencies and rapid kinetics of iPS cell generation using the synthetic, modified RNAs described herein were observed. To quantify the efficiency of RiPS derivation more thoroughly, a number of reprogramming experiments were undertaken and results quantitated based on the expression of the iPS-specific markers TRA-1-60 and TRA-1-81, (Chan et al., 2009; Lowry et al., 2008). In one set of experiments, BJ fibroblasts transfected with a five-factor modified RNA cocktail (KMOSL), this time without the use of VPA, demonstrated an iPS conversion efficiency of over 2%, which is two orders of magnitude higher than typically reported for virus-based derivations (FIGS. 10A-10B, Table 7). Moreover, in contrast to virus-mediated BJ-iPS derivations, in which iPS colonies typically take around 4 weeks to emerge, by day 17 of RNA transfection the plates had already become overgrown with ES-like colonies (FIG. 10A).

TABLE 7
Quantification of reprogramming efficiency.

| | | | | Well | | Effi- |
|---|---|---|---|---|---|---|
| Exper- | Cells | | | frac- | Colonies/ | ciency |
| iment | plated | Split | Condition | tion | well | (%) |
| BJ | 300,000 | d7 | Y27632− | 1/24 | 249 ± 21 | 2.0 |
| (KMOSL) | | | Y27632+ | 1/24 | 326 ± 49 | 2.6 |
| 4-Factor | 50,000 | d6 | 4F 20% O₂ | 1/6 | 48 ± 18 | 0.6 |
| (KMOS) | | | 4F 5% O₂ | 1/6 | 228 ± 30 | 2.7 |
| vs. | | | 5F 20% O₂ | 1/6 | 243 ± 42 | 2.9 |
| 5-Factor | | | 5F 5% O₂ | 1/6 | 367 ± 38 | 4.4 |
| (KMOSL) | | | | | | |
| RNA vs. | 100,000 | d6 | Virus | 1/3 | 13 ± 3.5 | 0.04 |
| Virus | | | RNA | 1/6 | 229 ± 39 | 1.4 |
| (KMOS) | | | | | | |

For each experimental condition, efficiency was calculated by dividing the average count of TRA-1-60-positive colonies per well by the initial number of cells plated, scaled to the fraction of cells replated in each well. Cultures were passaged at day 6 or 7 as indicated. The BJ experiment was started in a 10-cm dish, dH1f trials in individual wells of a 6-well plate. Colony counts are shown±s.d., n=6, except in the RNA vs. Virus trial, where n=9 for virus, n=18 for RNA.

[0502] In another set of experiments, the contributions of low-oxygen culture and LIN28 to the efficiency of RiPS derivation were evaluated. The yield of TRA-1-60/TRA-1-81-positive colonies in the ambient (20%) oxygen condition was four-fold lower than in the cultures maintained at 5% O2 when using KMOS RNA, but this deficit was negated when LIN28 was added to the cocktail (FIGS. 10C-10D, Table 7). The highest conversion efficiency (4.4%), which is higher than any reported conversion efficiency, was observed when low-oxygen culture and the five-factor KMOSL cocktail were combined.

[0503] To directly compare the kinetics and efficiency of the RiPS derivation protocol against an established viral protocol, an experiment in which dH1f fibroblasts were transfected with KMOS synthetic, modified RNAs, or transduced with KMOS retroviruses in parallel was conducted. As had been observed in the previous experiments described herein, ES-like colonies began to emerge by day 13 from the synthetic, modified RNA-transfected cultures, and the plates became overgrown with ES-like colonies by the 16th and final day of transfection. These synthetic, modified RNA-derived cultures were therefore fixed for analysis on day 18 (FIGS. 10E-10G). Notably, at this time, no ES-like colonies had appeared in the retrovirally transduced cultures, and colonies only began to emerge on the 24th day post-transduction, which is a time point consistent with previous reports describing iPS derivations by retroviruses (Lowry et al., 2008; Takahashi et al., 2007). These retroviral-derived cultures were fixed for analysis on day 32. Both arms of the experiment were then immunostained and TRA-1-60-positive colonies were counted. These experiments revealed that the kinetics of modified RNA iPS derivation were almost twice as fast as retroviral iPS derivation. Further, and importantly, iPS derivation efficiencies were 1.4% for synthetic, modified RNA cultures, and only 0.04% for retroviral cultures, corresponding to a surprising 36-fold higher conversion efficiency with the synthetic, modified RNA compositions and protocols (FIGS. 10E-10G, Table 7). Thus, by the combined criteria of colony numbers and kinetics of reprogramming, the efficiency of synthetic, modified RNA iPS derivation greatly exceeds that of conventional retroviral approaches.

### Utilization of Synthetic, Modified RNA to Direct Differentiation of Pluripotent RiPS Cells to a Terminally-Differentiated Cell Fate.

[0504] To realize the promise of iPS cell technology for regenerative medicine or disease modeling, it is imperative that the multi-lineage differentiation potential of pluripotent cells be harnessed. Although limited progress has been made in directing the differentiation of pluripotent ES cells to various lineages by modulating the extracellular cytokine milieu, such protocols remain inefficient. Given the high efficiency of iPS derivation by the novel synthetic, modified RNAs and methods thereof described herein, whether this technology could also be utilized to redirect pluripotent or multipotent cells towards differentiated cell fates was also determined. To test this, one of the validated RIPS lines described herein was subjected to an in vitro differentiation protocol in which FGF was withdrawn, serum added, and the cells plated onto gelatin (FIGS. 11A-11C). Cells obtained under these conditions were subjected to three consecutive days of transfection with a MYOD-encoding synthetic, modified RNA to provoke myogenic differentiation. The cells were then cultured an additional three days and then immunostained for the myogenic markers myogenin and MyHC, which revealed a high percentage of large multi-nucleated myogenin and MyHC double positive myotubes (FIGS. 11A-11C).

[0505] Taken together, the experiments described herein provide clear proof that synthetic, modified RNAs can be used to both reprogram cells to a pluripotent state at high and unexpected efficiencies, and also direct the fate of such cells and other pluripotent or multipotent cells to cells having lower developmental potential, such as a terminally differentiated somatic cell type.

### DISCUSSION

[0506] Described herein are novel compositions and technologies that use a combination of synthetic RNA modifications, and in some embodiments, a soluble interferon inhibitor, to overcome innate anti-viral responses and permit repeated transfections with RNA, thus enabling highly efficient alterations in cellular phenotypes and developmental potentials, such as highly efficient reprogramming of somatic cells to pluripotency, and directing the differentiation of pluripotent cells towards a desired lineage. The novel methodologies and compositions described herein offer several key advantages over established reprogramming techniques. By obviating the need to perform experiments under stringent biological containment, synthetic, modified RNA technology makes reprogramming accessible to a wider community of researchers. More fundamentally, the approaches described herein allow protein stoichiometry to be regulated globally within cultures, while avoiding the stochastic variation of expression typical of integrating vectors, as well as the uncontrollable and undesired effects of viral silencing. Given the stepwise character of the phenotypic changes observed during pluripotency induction (Chan et al., 2009; Smith et al., 2010), individual transcription factors can play distinct, stage-specific roles during reprogramming. The unprecedented potential for temporal control over factor expression afforded by the technologies described herein can help researchers unravel these nuances, yielding further insights that can be applied to further enhance the efficiency and kinetics of reprogramming.

[0507] While the risk of mutagenesis is a major safety concern holding back clinical exploitation of induced pluripotency, other factors also play a role. It has become increasingly apparent that all iPS cells are not created equal with respect to epigenetic landscape and developmental plasticity (Hu et al., 2010; Miura et al., 2009). In this regard, the most stringent molecular and functional criteria for reprogramming human cells have been applied herein (Chan et al., 2009; Smith et al., 2009), to demonstrate that the iPS clones derived from synthetic, modified RNAs from multiple independent derivations were reprogrammed to pluripotency, and also closely recapitulated the functional and molecular properties of human ES cells. Significantly, as described herein, synthetic, modified RNA derived iPS cells more faithfully recapitulated the global transcriptional signature of human ES cells than retrovirally-derived iPS cells, indicating that the compositions and methods for RNA reprogramming described herein produce higher quality iPS cells, possibly owing, without wishing to be bound or limited by theory, to the fact that they are transgene-free.

[0508] The transient and non-mutagenic character of RNA-based protein expression can also deliver important clinical benefits, in some embodiments, outside the domain of lineage reprogramming and alteration of cellular developmental potential. The use of RNA transfection to express cancer or pathogen antigens for immunotherapy is already an active research area (Rabinovich et al., 2008; Rabinovich et al., 2006; Van den Bosch et al., 2006; Weissman et al., 2000), and the synthetic, modified RNA can be used, in some embodiments, to transiently express surface proteins, such as homing receptors, to target cellular therapies toward specific organs, tissues, or diseased cells (Ryser et al., 2008).

[0509] For tissue engineering to progress further, there is a pressing need for safe and efficient means to alter cellular fates. In terms of personalized medicine applications, iPS cells are a starting point for patient-specific therapies, and specification of clinically useful cell types is required to produce autologous tissues for transplantation or for disease modeling. Importantly, the inventors have demonstrated that the synthetic, modified RNA-based technologies described herein that enable highly efficient reprogramming, can are equally applicable to efficiently alter pluripotent cell fate to terminally differentiated fates without compromising genomic integrity. In light of these considerations, the novel compositions and approaches described herein can become central enabling technology for cell-based therapies and regenerative medicine.

1.-176. (canceled)

177. A composition comprising a plurality of synthetic modified ribonucleic acids (RNAs), wherein each of the synthetic modified RNAs encodes a reprogramming factor, and cell growth medium, wherein at least one of the reprogramming factors is selected from the group consisting of OCT4, SOX1, SOX 2, SOX 3, SOX15, SOX 18, NANOG, KLF1, KLF 2, KLF 4, KLF 5, NR5A2, c-MYC, 1-MYC, n-MYC, REM2, TERT, and LIN28.

178. The composition of claim 177, wherein the synthetic modified RNA comprises at least two modified nucleosides selected from the group consisting of 5-methylcytidine (5mC), 2-thiouridine (s2U), pseudouridine, and 2′-O-methyladenosine (m6A).

179. The composition of claim 177, wherein the synthetic modified RNA comprises pseudouridine.

180. The composition of claim 177, wherein the plurality comprises at least three synthetic modified RNAs, wherein each of the synthetic modified RNAs encodes a reprogramming factor selected from the group consisting of OCT4, SOX 2, NANOG, KLF 4, c-MYC, and LIN28.

181. The composition of claim 180, wherein the plurality comprises four or more.

182. The composition of claim 180, wherein the plurality comprises five or more.

183. The composition of claim 177, wherein the composition permits an efficiency of reprogramming of at least 1%.

184. A kit comprising:
a. a vial comprising a synthetic modified RNA encoding an OCT4 reprogramming factor and a buffer;
b. a vial comprising a synthetic modified RNA encoding a SOX2 reprogramming factor and a buffer;
c. a vial comprising a synthetic modified RNA encoding a c-MYC reprogramming factor and a buffer;
d. a vial comprising a synthetic modified RNA encoding a KLF4 reprogramming factor and a buffer; and
e. packaging and instructions therefor;
wherein each said synthetic modified RNA comprises a modified nucleoside.

185. The kit of claim 184, further comprising a vial comprising a synthetic modified RNA molecule encoding a LIN28 reprogramming factor and a buffer.

186. The kit of claim 184, further comprising a vial comprising a synthetic modified RNA molecule encoding a green fluorescent protein and a buffer.

187. The kit of claim 184, wherein the modified RNA comprises a modified nucleotide selected from the group consisting of 5-methylcytidine (5mC), 2-thiouridine (s2U), pseudouridine, and 2′-O-methyladenosine (m6A).

188. The kit of claim 184, wherein each vial contains a lipid or lipid-based molecule.

189. A method of altering the developmental potential of a cell, the method comprising contacting the cell and optionally the progeny cells thereof with at least one synthetic, modified RNA encoding a developmental potential altering factor at least three times, wherein the at least one synthetic, modified RNA comprises at least one modified nucleoside selected from the group consisting of 5-methylcytidine (5mC), 2-thiouridine (s2U), pseudouridine, and 2′-O-methyladenosine (m6A).

190. The method of claim 189, the method further comprising a step of determining that the cell population and/or progeny cells thereof maintain increased viability by measuring viability of the cell population and/or progeny cells thereof, wherein viability of at least 50% of the contacted cell population and/or progeny cells thereof indicates that the cells maintain increased viability.

191. The method of claim 189, further comprising a step of determining that the cell population or progeny cells thereof does not have a significant increase in expression of Type I or Type II IFN by measuring expression of Type I or a Type II IFN in the contacted cell population or progeny cells thereof, wherein less than three-fold increase in expression of Type I or Type II IFN in the contacted cell population or progeny cells thereof compared to cells that have not been contacted with the synthetic, modified RNA indicates that the cell population does not have a significant increase in expression of Type I or Type II IFN, wherein measuring the expression of Type I or Type II IFN comprises the step of measuring expression of at least one IFN-signature gene selected from IFN□, IFNB1, IFIT, OAS1, PKR, RIGI, CCL5, RAP1A, CXCL10, IFIT1, CXCL11, MX1, RP11-167P23.2, HERC5, GALR3, IFIT3, IFIT2, RSAD2, and CDC20, wherein a less than six-fold increase in expression of the at least one IFN-signature gene compared to said cell population or progeny cells thereof prior to contacting the said cell population or progeny cells thereof with the at least one modified and synthetic RNA.

192. A method of reprogramming a somatic cell into a pluripotent cell, the method comprising contacting the somatic cell or progeny cells thereof with at least one synthetic modified RNA encoding at least one reprogramming factor at least five consecutive times within 25 days, wherein the at least one reprogramming factor is selected from the group consisting of OCT4, SOX1, SOX 2, SOX 3, SOX15, SOX 18, NANOG, KLF1, KLF 2, KLF 4, KLF 5, NR5A2, c-MYC, 1-MYC, n-MYC, REM2, TERT, and LIN28.

193. The method of claim 192, wherein the at least one reprogramming factor comprises a synthetic modified RNA encoding OCT4, a synthetic modified RNA encoding SOX2, a synthetic modified RNA encoding c-MYC, and a synthetic modified RNA encoding KLF4 and, optionally, a synthetic modified RNA molecule encoding LIN28.

194. The method of claim 192, further comprising the step of determining increased reprogramming efficiency of the somatic cell by measuring efficiency of reprogramming, wherein efficiency of at least 1% is indicative of increased reprogramming efficiency.

195. The method of claim 192, further comprising the step of:
i) determining that the reprogrammed somatic cell produced by the method has an increased likeness to the potency of an embryonic stem cell by subjecting the pluripotent cell or pluripotent cell population generated by the method to an unsupervised hierarchical cluster analysis and comparing it to a reference from an unsupervised cluster analysis of a pluripotent cell produced by viral expression of one or more of the reprogramming factors, exogenous protein introduction of one or more reprogramming factors, small molecule mediated expression or induction of one or more reprogramming factors, wherein if the reprogrammed somatic cell clusters more closely to an embryonic stem cell than it does to a the reference, it has an increased likeness to the potency of embryonic stem cell; or
ii) determining that the reprogrammed somatic cell or progeny cell thereof does not have a significant increase in expression of IFN by measuring expression of at least one IFN-signature gene in the reprogrammed somatic cell or progeny cell thereof, wherein if the increase in expression of the at least one IFN-signature gene is less than six-fold compared to a reference from a somatic cell prior to it being subjected to reprogramming indicates that the reprogrammed somatic cell or progeny cell thereof does not have a significant increase in expression of IFN, wherein the IFN-signature gene is selected from the group consisting of IFN□, IFNB1, IFIT, OAS1, PKR, RIGI, CCL5, RAP1A, CXCL10, IFIT1, CXCL11, MX1, RP11-167P23.2, HERC5, GALR3, IFIT3, IFIT2, RSAD2, and CDC20; or
iii) determining that the reprogrammed somatic cell or progeny thereof expresses sufficient levels of genes to determine pluripotency by measuring expression of at least two genes selected from the group consisting of SOX2, REX1, DNMT3B, TRA-1-60, TRA-1-81, SSEA3, SSEA4, OCT4, and NANOG and comparing the result to a reference from an embryonic stem cell, wherein if at least two of the genes is expressed at the level they are expressed in the embryonic stem cell, it indicates that the reprogrammed somatic cell or progeny thereof expresses sufficient levels of genes to determine pluripotency; or
iv) the combination of any two or more of i), ii), and iii).

196. A method for changing the state of differentiation of a somatic cell comprising the step of introducing an mRNA encoding a pluripotent stem cell pluripotency induction factor into a somatic cell to generate a reprogrammed cell.

The application's sequence listing, which the Patent Office published only in electronic form, follows.

SEQUENCE LISTING (1500 sequences)

SEQ ID NO: 1 - DNA, 428 bp, Homo sapiens
  modified_base (422)..(422): a, c, t, g, unknown or other
tttttttttttcataccgtattcatttttttatttaacttggggatggaatggggatagcatacattttatttgtacaatatttaacaatcacttatccaaggtggggttttatggggattttaagctttctgttaaatacttgcagaaaaaatagcaagtacgatttgacagtagtacaataacctgtgcccaaaacacaagaaatacagagtaaagcgaaaataactgcttaccaatattctgagaggtaacaaatgggatatgggttgagactgcataaaaaacgtactgctggttgaatatctgaggtaaatgatgttcaatcaagatgctacttgtatcattttgcccataaatggataaataattttatgcatatcataccaaatggttcctaaaaagtaatctttccaaaaagtntaaaag

SEQ ID NO: 2 - DNA, 407 bp, Homo sapiens
agcaggtcctgagtgtcaggaattcagattctctgccccactcctgctggataggaggacacttccactagaacctgggcctggcctttccagttttctgctgggagtccggattctggtgctttgctccgaagcagtgcccgtgggctccgggctggctcatcatcacagcttctctgctcagtgaggagaccatcattgtgctgcttttctgatgccttccatttgcctttttctccacttgggaaaaacaaaaaaagctagtatgctacatcctgaaaagttgttaatccttcaccaccacatacattgaaaaatcagttcctgccgggaagtaccactaaaggcatattgtaaactttttttctaattggaaaggtaaactttttttcccccataactatttt

SEQ ID NO: 3 - DNA, 2172 bp, Homo sapiens
aatcccttcaaccttctgcgcgcttccgccttcatgctagcaacgcccgcagtgacgcgcaggccccgccccctcccgcgcgcctcccggaagtggccggtccagagctgtggggtggcctccgcgcggtctctggcggagtcggggaatcggatcaaggcgagaggatccggcagggaaggagcttcggggccgggggttgggccgcacatttacgtgcgcgaagcggagtggaccgggagctggtgacgatggcggggccgcagcccctggcgctgcaactggaacagttgttgaacccgcgaccaagcgaggcggaccctgaagcggaccccgaggaagccactgctgccagggtgattgacaggtttgatgaaggggaagatggggaaggtgatttcctagtagtgggtagcattagaaaactggcatcagcctccctcttggacacggacaaaaggtattgcggcaaaaccacctctagaaaagcatggaatgaagaccattgggagcagactctgccaggatcgtctgatgaggaaatatctgatgaggaagggtctggagatgaagattcagagggactgggtctggaggaatatgatgaggacgacctgggtgctgctgaggaacaggagtgtggtgatcacagggagagcaagaagagcagaagccactctgcaaaaacaccgggcttcagtgtccagagtatcagtgactttgagaaatttaccaagggaatggatgaccttgggagcagtgaggaggaggaagacgaagagagtggcatggaagaaggggatgacgcggaagactcccaaggcgagagtgaggaagacagggctggagatagaaacagtgaggatgatggtgtggtgatgaccttctctagtgtcaaagtttctgaggaagtggagaaaggaagagccgtgaagaaccagatagcactgtgggaccagctcttggaaggaaggatcaaactacaaaaagctctgttgaccaccaaccagcttcctcaaccagatgttttcccattgttcaaggacaaaggtggcccagaattttccagtgccctgaaaaatagtcacaaggcacttaaagcattgttgaggtcattggtaggtcttcaggaagagttgcttttccagtacccagacactagatatctagtagatgggacaaagcccaatgcgggaagtgaggagatttctagtgaagatgatgagctggtagaagagaagaagcagcaacgaagaagggtccctgcaaagaggaagctggagatggaggactatcccagcttcatggcaaagcgctttgccgactttacagtctacaggaaccgcacacttcagaaatggcacgataagaccaaactggcttctggaaaactggggaagggttttggtgcctttgaacgctcaatcttgactcagatcgaccatattctgatggacaaagagagattacttcgaaggacacagaccaagcgctctgtctatcgagttcttggcaaacctgagccagcagctcagcctgtcccagagagtttgccaggggaaccggagatccttcctcaagcccctgctaatgctcatctgaaggacttggatgaagaaatctttgatgatgatgacttttaccaccagctccttcgagaactcatagaacggaagaccagctccttggatcccaacgatcaggtggccatgggaaggcagtggcttgcaatccagaagttacgaagcaaaatccacaaaaaagtagataggaaagccagcaaaggcaggaaacttcggtttcatgtccttagcaagctactgagtttcatggcacctattgaccatactacaatgaatgatgatgccaggacagaactgtaccgctctctttttggccagctccaccctcccgacgaaggccacggggattgacatcgcccacctccgacacccagtgggcgccttggctggtgcggctgctggtccagatggaggaaaccagtgactttatggggctgagctagtagggaagcccctggaaagatgctgcgttccgaacctgtgcctaatacacgcaagggcgctgtcccgcccaaccccgcctttaaacgccacaaataaagagcattgttaccgccaaaaaaaaaaaaaaaaaaaaaaaaaaaaaaaa

SEQ ID NO: 4 - DNA, 6505 bp, Homo sapiens
gacagatttcaatgtctgttgaaggcccccccacaccctccttcagtgccgggggcatggagggatatcttgggctcctgctgttttttaaaatgatgcgagctcatctcctgtcctgggtgtgaacgagtatatcttaccagggatgtaactgaacatttttttctgcattgtgttcctactgagcaacccaagatggccaggaactgctctgagtgcaaggagaagagggcagcacatatcctctgcacctactgcaatcgctggctgtgcagctcttgcacagaggaacaccgacacagccctgtccccgggggcccattctttcctcgggcccagaagggatctccaggagtgaatggtggtcccggagacttcaccttgtattgtcctctacacacacaggaagtactcaagctattctgtgagacatgtgatatgctcacttgccatagctgcctagtggtggaacacaaagaacacaggtgcagacatgttgaagaagttttgcaaaaccagaggatgcttctggaaggtgtgactacacaggtggcacataagaaatccagtctacagacatctgcaaagcaaattgaggacaggatttttgaagtgaagcatcagcataggaaggtggaaaaccagatcaaaatggccaagatggttctgatgaatgagctgaacaaacaggccaatgggctaatagaggaattagaggggattactaatgagagaaagcggaagctggaacagcagttacagagcatcatggttctcaaccgtcagtttgagcatgtgcagaatttcatcaactgggctgtctgcagcaaaaccagtgtcccttttcttttcagcaaagagctgattgtgtttcagatgcagcgattgctggagacaagttgtaacacagatcctggctccccttggagtatcagattcacctgggagcctaacttctggaccaagcagctagcttctcttggctgcataactactgaaggtggacaaatgtccagggcagatgctcctgcttatggaggcttacaggggtcatcacccttttatcaaagccaccagtctccagtggctcagcaagaggctcttagccacccctcacacaagttccagtctccagcagtgtgctcctcatctgtgtgctgctcccactgctccccagtctcgccttccctcaaaggccaggtccccccacccagcatacacccagcccacagcttcaggcagccccctgagatggtgccccagcagctggggtctctgcagtgctctgccctgctgcccagggagaaagagctggcctgcagccctcatccaccaaagctgctgcagccctggctggaaacccagccccccgtggagcaggagagcacatcccagcggctggggcagcagctgacttcccagcccgtgtgcattgtccccccacaggatgttcagcaaggagcccatgcccagcccaccttacagacaccctctatccaagtccagtttggccaccaccagaagctgaagctcagtcactttcagcagcagccacagcagcagctaccacctccaccaccacccctcccccatcccccacctccccttccccctcccccacagcagccacacccacctcttcctccatcccagcatctggcttctagtcagcacgagagccctcctggccctgcctgttctcagaacatggacataatgcatcacaagtttgagctggaggaaatgcagaaggacttggagcttcttctccaggctcaacagcccagcctgcaactgagtcagaccaaatctcctcagcatcttcagcaaaccattgtggggcagatcaactacatcgtgaggcagccagcacctgtccagtcccagagccaggaggagaccctgcaggctacagatgagcccccagcatctcagggctcaaagccggctctccctcttgacaagaatactgctgctgccttgccccaggcgtctggggaagaaacccctctcagtgtccccccagtggacagcaccatccagcactcctctccaaatgtggtgagaaagcactccacctcgctgagcatcatgggcttttccaacactctggagatggagttgtcatctaccaggttggagaggcccctagagccacagatccagagtgtgagcaacctgacagctggtgccccccaggcagtaccaagcctgctgagtgctccccccaaaatggtgtccagcctgacaagtgttcaaaaccaggccatgcccagcctgacaaccagtcacctacagactgtgcccagccttgtgcatagcacattccagtccatgcccaacctgataagtgactcccctcaggctatggcaagcctggcaagtgatcaccctcaggctgggcccagcctaatgtctggtcacacccaggctgtgccgagtctggcaacttgtcctctgcagagcatccctccagtttctgacatgcagccagaaactgggtccagctccagttctggccgaacttcagggagcctgtgtcccagagatggggctgatccctccctggagaatgctctgtgtaaggtaagtcctggggaaatgctatccaaacttcctttgttcatcattgggcaaaagattggccactgggacccttattctgaccttagcttaacagttctgagaccactaatgacaaccatgtctgagttctttgattcttgtcgacatttcacttttgaaagatggaaagtgaggattccactcgcttcactgacttactgggacaaggtcccatagtccccggtctggatgctcccaaggacttggccatcccctcagaactggaggagccaattaacctctctgtgaagaaacctccactggcgccagtggtcagcacgtctacagctctgcagcagtaccagaacccaaaagagtgtgagaattttgaacaaggagccctagagctggatgcaaaagagaaccagagcatcagagccttcaatagtgagcataagattccctatgtgcgactggagcgactcaagatctgtgctgcctcctcaggagagatgcctgtgttcaaactgaagccacagaagaatgatcaggatgggagcttcctgctgatcatcgagtgtggcactgagtcctccagcatgtccattaaggtcagccaggacagactgtctgaggccacccaggccccaggtctggagggaagaaaggtcactgtcacttctttggctgggcagcggccaccagaagtggagggcacatctcctgaagaacacagactcattcctcgaaccccaggagccaagaagggccccccagccccaatagagaatgaggacttctgtgctgtttgcctcaatggcggagagttactgtgctgtgaccgctgccccaaagtgttccacctctcctgccatgtgccagccttgctcagcttcccagggggagagtgggtgtgtaccttgtgccgcagcctgacccagcccgagatggagtacgactgtgagaatgcctgctataaccagcctggaatgcgggcatctcctggcctaagcatgtatgaccagaagaagtgtgagaagctggtattgtccttgtgctgcaataacctcagcctgcccttccatgaacctgtcagccccctggcccggcattattaccagattatcaagaggcccatggacctgtcaatcatccggaggaagctgcaaaagaaggacccagctcactataccaccccagaggaggtggtatcagatgtgcgcctcatgttctggaactgtgctaagttcaattatcctgactccgaggttgcagaggctggccgctgcctggaagtgttctttgagggctggttgaaggagatctacccggagaaacggtttgcccagccaaggcaggaggactcagactccgaggaggtgtctagtgagagtggatgttccactccccagggcttcccgtggcctccctacatgcaggagggcatccaacccaagaggcggcgacgacatatggagaatgaaagagcaaaaagaatgtcatttcgcctggccaacagcatctctcaggtgtgagagccaaaaggagactgggcactctggcagctgttgtcccatactgtcgaccattcctccccatcttgcagcttatcctcttcagagtgtggatggtagatgagtcttgttgaactgtgtagtgctcttctttgccatttgcatctacagcatttatttaggagccgtagtacatccactacagagaagatttcagtaataaacaggaaagaggaaggtatttattattaccagagtaatcagatgtataggctccacttgacaagaccacacctggttaggctcgggaaaacctactttccttggtgaatttttttctgcctgggaaagcagacccgtctaaccttttagtgtccagggctcaggagccatgtatacatctgaactcctcctgggctcagaagtgggtaaaagaagggagagaggtttagacatatggcaggactgtgatccctggcccagcacagccaaagactgtcactgtttgcctttgcttgtcctgtctggatagaggcacctgccatgtgcagactagtggaggcttctagaggccataggtctcaatttgtgcctatttgggttctaacggttttcagggtatttgttttgcatagtcactttcctgatgttgacataggtggctgctgtgaaaatgctgtggatggtgtgacattcttgactgagctgggtggctgtggagagaccacttaaatcttctggttcagatttcacttacagacttagtaagatgtccacttcagagcccgccctctgtgctacttactctgggctaatcacacttctttagggtgagaacctgccttcctagaagtgactgttggtgcttgtcagtggccatacccttcatcatcctcattcagaggtatggatcgtgagttctgcttgtgaatactgtgagacagctgctgtctgcttcaggtccagagttccatgggtggagagagtaacccacaaccagctcactcctctgggcctctcctcctgcttaaagattctagttctcaacctctccaagttcatgagccaaagatcagaagtgagtcttctgaccagcccgcctccaggctgtctacagccccaaaaaagccaacacttttctggcagccctttttgttggaggttagagaaggcctcagggaccaacaggggccagatctagacattcctgggggaagtttgtctaaggtggacagggggaaaaatcaagaggcaaaaagccagtgtcctttggtgaccatgaagcaacctcagagccttagttctcctagaatgcagagagaagcattctggaagccatgggaacaggagctcgaggctgcatcctgaatgcatctgcatggccctcgcagggtgtttgtgaggatactggaggtcaggctacctcccaagcaagggcttggttgagaaggaacccattgctcatattgttgggggagctatgaacctgacatgtcagtggccaggactgagacagctctccctggtcctgtcattgcatggctaatttcaggggagtctgaggtcatggctttatttttgctaacagatgaagttcaaggatgttcttgtttgtagggcctttgctaatgagcagttttttaattagaaaacatttcttctctctttgtgagttgatggtattgctcatttccttctctacccaacctgagagatcatcttcactttaaagcaaaccatgccccttggcttgccattctttcagcagcacatgccacgttctaagcagatgggcttccgtgatcccgttttctagtttggggtaactgagtcttgaatgctttactagtccggcaatctttggacttaggcttctgccctttgagactcacatgactttctggtttggggtctggtcatttccctttcaatttttgaatctccttctctgttcagttggcttggcaaagtaccctctgttctcatgtcactaattcctgctctaggtcatctttcctttgtgcagcccacattcccaccatcctgtgaactttgttgtacttggtgttgggcaactggtgagtgttgtgacaggctcagacctgatccttcctcaggagcaattggagaccacaaatttaaagcagaaatacctgttaaaagcttggctttccttatatgagtgaggctcccagcttgggtgtggcctcctgggctcacggatcagcttgctgggccagagggggtcttagtaatgtgctagagagacacatgctcccttctcatcgtagagagcctgcatgctgagaggctccctttacacacctgcctctcgctggcttttcctttagacctagccaccagtgttttgaatcatggttttgttttgtttttgcatgcaaaaaccagaacatgacttagaaatt

SEQ ID NO: 5 - DNA, 4101 bp, Homo sapiens
agagtggacagcaattgtgaagatcgccagagagttctgtgtttcatcaccgccgaaaggttaaaaaataaatcatgactgaatctgcctctagcacaagtggtcaagagtttgatgtgttcagtgttatggactggaaagatggagtgggcacgttaccaggaagtgacttaaagtttcgggtaaatgagtttggagccctggaagttattacagatgagaatgagatggaaaatgttaaaaaagcaactgctaccaccacttggatggtaccaactgctcaagaagccccgacctctcccccgagctccaggcccgtatttccacctgcctactggacatctccacctggatgtcccacagtcttttcagagaagactgggatgcctttcaggttgaaggatccagtgaaagtagaagggcttcagttctgtgagaactgttgtcagtatggcaacgtagatgagtgtctttctggaggaaactattgcagccagaattgtgctcggcacatcaaagataaagatcagaaggaagaaagggacgtagaagaagacaatgaggaagaagatcctaagtgtagtcggaagaaaaaaccaaaattatctctgaaagctgacaacaaggaggatggagaagagagagatgatgaaatggagaacaaacaagatgtaagaatcctgaggggttcgcagagagcacggaggaaaagacgaggggattcggctgtactaaagcagggtttgcctcctaaaggaaagaaagcgtggtgctgggcatcctacctggaagaggagaaagcggtggcagtgccggcgaagctgttcaaggagcatcaatcctttccatataacaaaaatggattcaaagttggcatgaaattagaaggcgtggatcccgagcatcagtctgtgtactgtgtcctcaccgtcgcggaggtttgtggataccggataaagcttcactttgatgggtattctgattgctatgacttctgggtgaatgcagacgctctggatatccacccagttgggtggtgtgagaaaaccggccacaaactccatcctccaaaagggtataaagaagaagaattcaattggcagacctatcttaagacatgtaaagctcaagctgctcctaagtcattatttgaaaatcagaatataacagtgatcccatcgggctttcgagttggtatgaagcttgaggcagtagacaaaaagaatccctcattcatctgtgttgctacggtaacagatatggtggacaatcgtttcctggtacattttgacaactgggatgagagctatgactattggtgtgaagcatcaagtccacatattcatccagttggttggtgtaaggaacatagaagaacccttattactccaccaggttatccaaatgtgaaacatttttcttgggataaatacttagaagaaaccaattctttacctgctcctgcaagagctttcaaagtgaaacctcctcatggattccagaaaaaaatgaagcttgaggttgtagacaaaaggaaccctatgtttattagagtagcaactgtggcagacacagatgatcaccgggtaaaagttcactttgatggctggaacaattgctatgattactggatagatgcagattctcctgatattcaccctgtaggctggtgttcaaaaacaggacatccccttcagcctcctttgagccccttagaattaatggaagcttcagaacatggtggatgctcaaccccgggatgtaaagggattggccatttcaagagagcgagacatctgggccctcacagtgctgccaactgtccctattcagaaatcaatttgaataaagaccgtatttttccagaccgcttaagtggtgagatgcctccggctagtccgtcatttccaagaaataaaaggacagatgcaaatgaaagctcttcttcccctgaaatcagagaccagcatgctgatgatgtcaaagaagactttgaagagagaacagaaagtgaaatgagaacatcacatgaagccagaggtgcccgggaagaacccaccgtccagcaggcacagcgtcggtcagctgtctttctgtcctttaagtccccaattccatgtctgcccttgcgctgggagcagcaaagcaaacttcttccaactgtcgcaggaatccctgccagtaaagtttccaaatggagcacagacgaggtgtcagaatttatacagagcttacctgggtgtgaagaacatggaaaggtatttaaagatgaacaaattgatggagaagcatttctacttatgactcaaacagacattgttaaaattatgagcattaaactgggccctgctctcaaaattttcaattccatcctgatgttcaaagctgcagagaagaattctcacaatgaactttgaagatggtgaattctgaataccatcagcattctgctttaaagctcatgttttattcaaagcacaaggacggttataactcctaagtgagaagtctccaaaactcaaaagagcaacactatcggattatttatattactcaagagacaatatatatgaattcttatgaaagtgcttgagcttttaaccaggtactgtctaacaacagtcatcttttggttctgttcactgagctaaatttatctttgtaaatctttttgagtctggggggtggggggaaggggggcttcattaattatttatggtaatggggggcagagtaagaacttttggcattttgtaaacattgttgaattctctttcatgtacactgtttctttttcaatactttcagaaacctttttatataatcaaatttcaatttaaaccaaattagtcgaaacctggctaagtttagccagtaggactgttatctgtattgttaattttgtgccatattttgaattgcaacattatgctaagtataactttgcaagtcatgatattgcctaactgcttgtcataattgtcagggctgaatagttgtaagaatgacttttctttgaatcagtatttttccttttgcacgcattatgaaatgttaaacaaattacttttcaccagcatctttactataattaccaaaaacatgtatataaaagaatgaaattgaaaaataaaatatataaacataaataaattaggtagtgtattttgagtggcatcagtctcactcatcttggtgccccggtgtttacaagagccagatggtgtcagaggagtacgcagttgtatgcagttatggttggggggaatgtttgtgagggtcttgaactatttatgagatgatcttgagcttctaattttcattgatgaaattgtggtggtttacagagactaagagctcattctgtcaacagaaacactaatctgtacagagcgctgtctcaggtcatgcattgtcctccaaacccaaaggtttttttcagggttggctagagagcgagtattgtgattttgctgaaaagacaaggtgtgaaggagcaacttcagttgacacaaaatttgaaatgctcacagatcagggaggtgatttcccaaagtaattgcccaagaacctccgttttggaaggattcctttttctgtagaatactttgcctcgatatataagcatacagatgcactttaaatgaaaacccttgattataaattgatagctggtagtgtttcttttgcaagaatgcatttctaaggcaaaaggtaaattattttgtccgtcttttgatgtactttctgattccaggattggatatttattcaaggactattttaaaaatagaaagtaagtttgtagcatgctgtctgaattctggggtaagttccacctcttctttagttgctttcgttttttatgatgtaggacttcctttgatatccctgttggaagtccattagcagtcctttgcatttgccaattcaaggtaaaacagggtcagtgacatctgcagtgtcccagtcatttatttgcatgaatctgcttaaataagttttttgttgctgttttttcttttttatgttttgttcagaatttgtacattcaagttgtacttgttatatctgacatgaatgaaataaaatcttaattac

SEQ ID NO: 6 - DNA, 3954 bp, Homo sapiens
agggtctgtgtcaagagcggcaggggctgcaggagataagagaaacgggctgccgtggggtgtgtgtaggcttcagagacatgggatcacggaagactgaagcagaaacagtggattaagacttcctgagcgatagctggcactgccttccccacaatggcagaggtggtggctgaggtggccgagatgccaacacagatgtcaccaggggcagtggagatgtcaacacctatgtcggcagagatgatggagatgtcaacagaagtgactgagatgacacctggggaggcccttgcctcatccctcttcttccagcatcaccagttcatgtgctctgagtgtggcagcctctataacacactggaggaagtcctctcacaccaggagcagcacatgcttgctgtctcagaggaggaggcactgaccacacagaatgttggcctggagccggagctggtgccgggtgctgaggggcccttccagtgtggtgaatgcagccagctcatcctctcccctggggagctcctggcccaccaggatgcccacctccgagagtctgcaaaccagatccaataccagtgctgggactgccaggagctgttcccctcgcccgagctgtgggtggctcatcgaaaggcccagcacctttctgctacggtagctgagccaccagtgccacctcctttgcctcccccaacaccactgcctccaccttctcccccatccgaagtcaagatggagccctatgagtgtcctgagtgctctaccctctgcgccacccctgaggagttcttggagcatcagggcacccactttgactccctagagaaagaggagcgcaatgggttggaggaggaggaagaggacgatgaggaggatgaagaagatgatgaagagatggaggatgaggaggccatggcagaggtcggtgatgatgctgtgggaggtgacgagtccacagctggctgggctcagggctgcggggactgtccccagcaccagccctcagcaggggctcgccggcaacaccggcggacggctcacagcccggcatctgccacccaccccttccactgcagccagtgtcagcgcagtttcagctccgccaaccggctgcaggctcatgggcgggcccatgttggtggcacacatgagtgtacaacctgctccaaggtcttcaagaaagcagcatcgcttgagcagcacttgcggctgcatcgcggggaagcccgctacctctgtgtagactgtggccgcggctttggcacagaactcacgttggtggctcaccggcgggcccacactgccaacccattgcatcgctgtcgttgcggcaagacgttcagcaacatgaccaagttcctctaccaccggcgcactcacgccggcaaaagcggggcacctcccacaggagcaacagctcccccagctccagcggagcccacccctccaccaccaccccctgccccacctgcccagctgccctgcccacagtgctccaagtcctttgcctcagcttcccggctgtcccggcaccggcgtgcagtacacgggccccctgaacggcgtcaccgctgtggggtttgtggcaagggcttcaagaagctgatccacgtgcgcaaccacctgcggacacacacgggtgagaggcccttccagtgccactcatgtggcaagacctttgcttctttggccaacctcagccgccaccagctgacccatacgggtgcacgtccctaccaatgcctggactgtggcaagcgcttcacacagagctccaacctgcagcagcaccggcggttgcacttgcggccagtcgcctttgcccgcgccccccgcctccccatcactggtctctacaacaagagtccctactactgcgggacttgtggccgctggttccgcgccatggcgggcttgcgactgcatcagcgggtccatgcccgagctcggactttgacgctacagcctcccagatcaccatctcctgccccacccccacctccagagcctcaacagactatcatgtgcacagagctgggggagaccatcgccatcattgagacatcccagccactggcgcttgaggacaccctgcagctgtgccaggctgcactgggggccagtgaagcaggcgggctcttgcagttggacacggccttcgtgtgacgcagctgaaaagcaacaacaaaagggtttggttgcaacagccagtgtgggtacctctggggagagaggacctcctctgacaaactggtctggtacccaccatgtgccaggatccaccctggcctctttttacccactgactccccagaacaacccttccaggcttctcttgtcatctttctctgcctgaggggaaactgaagctctgaaatgcgatgtgatctgtaccaggtcacccagctatgctgcaaagtgggttggccaaggccctttgcactgcatcaccctggtgcccagcaacatcaggtaaccttcactgagcaccaagcttatgccaggtctgtgctggccactctcatatacctcttcagatcctctgcttgtacccccagcccttgccttccctggattttgggcacccaggactttgctctgcctggtggagggtacttgatttctctgggcttccttcatctcaattctgacagtgtggaaggaaatctgtaggtacccaggtcctcagctccagactgggtgatgctggagacccaggagcaagtcagcacaggctctgcccacaggaggcatgcacaatctggtaggagaaacgcacaagtacagatagcttgctctctgagtgtgtctcattgattcattcagcctgtgtgtcctaaagcctcccttctcccatactgggtgatgctgggggcagagatgagtcaggcctaaggcttctctgggctgtgatggggatgtgcagggacagtgggatcccaggaaacagacctccatggtgggagatcaggagttaaggacttcctagagaaggtagtccctgaaggaaaagtaggaatctggcagtgaaagaggaaaagaacattccaggcagacagcactgcaagagggtgagctcttggtgtatttggagaccatccagttattcatctgactgcctacctgaggcaagcaccacacttaccactgtatgtgtactatgatcccaacaggcttgtgacatagatttcatattatccctgttgtatagatttttaaaactggtggctgggcgtggtggctcacgcctgtaatcccagcactttgggaggccgaggcgggcagatcacgaggtcgggagatcgagaccatcctggctaacacggtgaaaccccgtctctactaaaaatacaaaaaattggccaggagtggtggcgggcgcctgtggtggccagctactcaggaggctgaggcaggagaatggcgtgaacccgggaggcggagcttgcagtgagccgagatcgcgccactgcactccagcctgggcgacagagtgagactccctctcaaaagaaaataaaaataaaaataaactggccaggtgcggtggctcacgcttgcaatcccagtgctttgggagactgaggcaggaggatcacttaaggccaggagttcgagaccagcctgggcaacagcaagacctcatctctacaaaacttaaaagttagccaggcctggtggcacatgcctgtaatccgagtgctttgggaggctgaggcaggaggatcactcgagctcaagaattcaagacctgggcaagagagagagactttgtctctattaaaaataaaaatgattggccgagcatggtggtgcacaccagtattcccagctactctggaggctgaggcggaggcaggattgcttgatatgagggagattgaggctgcagtgagctgtgttcacaccactgcactccagtctgggcaacagtgcaagaccctgtcactt

SEQ ID NO: 7 - DNA, 2255 bp, Homo sapiens
tacggccgtcgtgccgctcgtgtcagtcaacatggaggcagaggaatcggagaaggccgcaacggagcaagagccgctggaagggacagaacagacactagatgcggaggaggagcaggaggaatccgaagaagcggcctgtggcagcaagaagcgggtagtgccaggtattgtgtacctgggccatatcccgccgcgcttccggcccctgcacgtccgcaaccttctcagcgcctatggcgaggtcggacgcgtcttctttcaggctgaggaccggttcgtgagacgcaagaagaaggcagcagcagctgccggaggaaaaaagcggtcctacaccaaggactacaccgagggatgggtggagttccgtgacaagcgcatagccaagcgcgtggcggccagtctacacaacacgcctatgggtgcccgcaggcgcagccccttccgttatgatctttggaacctcaagtacttgcaccgtttcacctggtcccacctcagcgagcacctcgcctttgagcgccaggtgcgcaggcagcgcttgagagcggaggttgctcaagccaagcgtgagaccgacttctatcttcaaagtgtggaacggggacaacgctttcttgcggccgatggggaccctgctcgcccagatggctcctggacatttgcccagcgtcctactgagcaggaactgagggcccgtaaagcagcacggccagggggacgtgaacgggctcgcctggcaactgcccaggacaaggcccgctccaacaaagggctcctggccaggatctttggagccccgccaccctcagagagcatggagggaccttcccttgtcagggactcctgagggcctgggtggccccttccatttcctggccctgctctgcttcctgtctacctcatactagaatgatcgtgactacccgggcagacattttactgtgtttctcagaccaagtgtctactgatggcccaaacatggagttttgtgggcttccactgtccccactccgaactcctgtatgtgcctggctgagtcacctaattcatactgtcatactagcataattatgactattgcatatgcttgttttgtttgactcttggctgcctacgtctgtagggtcccctgaaaatcccacttcctgcccccagaaagggcctttatttccaactaggaggataatgcctagtccaggcaatctttctctgtttagcagtcacaggtgagggtggtattagcatcttttttatgtagaaaaaattgagttaatggggtggactgggttgggaagaaatacatttcctaatgtatttatagaaaataaaaatatttttatgtgcctttttatttttgttggtggggaggtcattggacaagttccaactttcatcttgtgttcccttcaccttcatatcctgatcttagagcccccctccccctgccacccaccttactgtttaacctggatttttttttctatttaatttttgtctaatatcttagcccagtttatcaatcagttatcttaagtcagcattttctaagccattgtttgaggaaacagtgacaataggtaataacacatcttagtattaagagttttacaggccactagtataagataggcatcgtggtagatgcatataaagggtggaatgggagccatggcaggtcatagagtcctctcaatgggaacctgattgatgatcacagtcttcagtggtgagtcagtcctcaccaagttttccagatcattcctacaaagtaaactgggagaataataagtctgaaagagtgtggagtgctcccacaattacaaagaatgcttcctgggtggagtgttgagttggaaccattgtaaaggtgggcaaagcctagtagagaaccagtgcacctcaggtgcacttacatatggtggggctgaggcaaagcagccctgtaggcttcaaagaatcagtgtaagccactaaaaggaactgaaaacctaggtgtcacaataaacagtctacacagtctcacgtagaccaaaattctgatcattttccaggctgttgcatgaagtgatagagtatgattataatttctgtttgcttgtgctgtttgtttttgtttttcatctgtcaatgtgatgatctgtgttttatagggtagagtggatttgtctactttggctgtaaaataccctaatcacattatgatcttgacaggtgcactttactggggagaataaaaaggaccatacggtaaa

SEQ ID NO: 8 - DNA, 4713 bp, Homo sapiens
cggccgcggcgcgagccggagtccgccgagccggagcgcgacgaggccccgggcgcgccctccccgctgccgccaccgccgtgccgccgccatccgcccgccgccgccgccgctgtccggcccccgagcacgccggccccgcgcgcgcctcgaggccgagtcaaggtgtgagatgcacaatgcgaaacctaggccccagcttttacaccatgatgcgcagggttgtactttttgtactgaactgataggtggcctagtggttatgccctgtactaccattttgaggatctggactccgtttcctgccttgctctttggaccacattgtcaattcacaccgaaactatgttccaacttcctgtcaacaatcttggcagtttaagaaaagcccggaaaactgtgaaaaaaatacttagtgacattgggttggaatactgtaaagaacatatagaagattttaaacaatttgaacctaatgacttttatttgaaaaacactacatgggaggatgtaggactgtgggacccatcacttacgaaaaaccaggactatcggacaaaacctttctgctgcagcgcttgtccattttcctcaaaattcttctctgcctacaaaagtcatttccgcaatgtccatagtgaagactttgaaaataggattctccttaattgcccctactgtaccttcaatgcagacaaaaagactttggaaacacacattaaaatatttcatgctccgaacgccagcgcaccaagtagcagcctcagcactttcaaagataaaaacaaaaatgatggccttaaacctaagcaggctgacagtgtagagcaagctgtttattactgtaagaagtgcacttaccgagatcctctttatgaaatagttaggaagcacatttacagggaacattttcagcatgtggcagcaccttacatagcaaaggcaggagaaaaatcactcaatggggcagtccccttaggctcgaatgcccgagaagagagtagtattcactgcaagcgatgccttttcatgccaaagtcctatgaagctttggtacagcatgtcatcgaagaccatgaacgtataggctatcaggtcactgccatgattgggcacacaaatgtagtggttccccgatccaaacccttgatgctaattgctcccaaacctcaagacaagaagagcatgggactcccaccaaggatcggttcccttgcttctggaaatgtccggtctttaccatcacagcagatggtgaatcgactctcaataccaaagcctaacttaaattctacaggagtcaacatgatgtccagtgttcatctgcagcagaacaactatggagtcaaatctgtaggccagggttacagtgttggtcagtcaatgagactgggtctaggtggcaacgcaccagtttccattcctcaacaatctcagtctgtaaagcagttacttccaagtggaaacggaaggtcttatgggcttgggtcagagcagaggtcccaggcaccagcaagatactccctgcagtctgctaatgcctcttctctctcatcgggccagttaaagtctccttccctctctcagtcacaggcatccagagtgttaggtcagtccagttccaaacctgctgcagctgccacaggccctcccccaggtaacacttcctcaactcaaaagtggaaaatatgtacaatctgtaatgagctttttcctgaaaatgtctatagtgtgcacttcgaaaaagaacataaagctgagaaagtcccagcagtagccaactacattatgaaaatacacaattttactagcaaatgcctctactgtaatcgctatttacccacagatactctgctcaaccatatgttaattcatggtctgtcttgtccatattgccgttcaactttcaatgatgtggaaaagatggccgcacacatgcggatggttcacattgatgaagagatgggacctaaaacagattctactttgagttttgatttgacattgcagcagggtagtcacactaacatccatctcctggtaactacatacaatctgagggatgccccagctgaatctgttgcttaccatgcccaaaataatcctccagttcctccaaagccacagccaaaggttcaggaaaaggcagatatccctgtaaaaagttcacctcaagctgcagtgccctataaaaaagatgttgggaaaaccctttgtcctctttgcttttcaatcctaaaaggacccatatctgatgcacttgcacatcacttacgagagaggcaccaagttattcagacggttcatccagttgagaaaaagctcacctacaaatgtatccattgccttggtgtgtataccagcaacatgaccgcctcaactatcactctgcatctagttcactgcaggggcgttggaaagacccaaaatggccaggataagacaaatgcaccctctcggcttaatcagtctccaagtctggcacctgtgaagcgcacttacgagcaaatggaatttcccttactgaaaaaacgaaagttagatgatgatagtgattcacccagcttctttgaagagaagcctgaagagcctgttgttttagctttagaccccaagggtcatgaagatgattcctatgaagccaggaaaagctttctaacaaagtatttcaacaaacagccctatcccaccaggagagaaattgagaagctagcagccagtttatggttatggaagagtgacatcgcttcccattttagtaacaaaaggaagaagtgtgtccgtgattgtgaaaagtacaagcctggcgtgttgctggggtttaacatgaaagaattaaataaagtcaagcatgagatggattttgatgctgagtggctatttgaaaatcatgatgagaaggattccagagtcaatgctagtaagactgctgacaaaaagctcaaccttgggaaggaagatgacagttcctcagacagttttgaaaatttggaagaagaatccaatgaaagtggtagcccttttgaccctgtttttgaagttgaacctaaaatctctaacgataacccagaggaacatgtactgaaggtaattcctgaggatgcttcagaatctgaggagaagctagaccaaaaagaggatggttcaaaatacgaaactattcatttgactgaggaaccaaccaaactaatgcacaatgcatctgatagtgaggttgaccaagacgatgttgttgagtggaaagacggtgcttctccatctgagagtgggcctggatcccaacaagtgtcagactttgaggacaatacctgcgaaatgaaaccaggaacctggtctgacgagtcttcccaaagcgaagatgcaaggagcagtaagccagctgccaaaaaaaaggctaccatgcaaggtgacagagagcagttgaaatggaagaatagttcctatggaaaagttgaagggttttggtctaaggaccagtcacagtggaagaatgcatctgagaatgatgagcgcttatctaacccccagattgagtggcagaatagcacaattgacagtgaggatggggaacagtttgacaacatgactgatggagtagctgagcccatgcatggcagcttagccggagttaaactgagcagccaacaggcctaagtgccaggttccctggcgttggtgacatgctgcagcctggaactctgatctccagtgtgactgcaaagctgtcttctcactggtactgccttgtgagtactggttggactgtggggcatgtggccgctgcagttccagtggttatttctaagtctatgacaggacaggctgttcttgcttcagaaccttctctgacagacacggtaactaaatgtgaaaaaccaataagctggtgactcatgaatacacacgaggaaaagcagaggtttattttatctgccttttcaacatttctttccctctgtgaaatgattggtcagatgtctttgagaagtgttaaactaattcacatggtagtgtagggccaacatacaagctaccagtctaatgtgtatagtagactttgggaaaagcgattttttttcatgtattcattctgaatagttgaaatgtatatttgtacagtcttttagacctattcaagtgatgctcatgatcctgttactgtgtgcccatcatagatttctttttttagtgttgcccttgctgtgtaataaacgctctatctagtttacctagcaaaagctcaaaactgcgctagtatggactttttggacagacttagtttttgcacataaccttgtacaatcttgcaacagaggccagccacgtaagatatatatctggactctcttgtattataggatttttcttgttctgaatatccttgacattacagctgtcaaaaacaaaaactggtatttcagatctgttttctgaaatcttttaagctaaaatcacatgcaagaattgactttgcagctactaattttgacaccttttagatctgtataaaagtgtgttgtgttgaagcagcaaaccaatgagtgctgcattttggatatttagttttatctttagttcaacaccatcatggtggattcatttataccatctaatatatgacacactgttgtagtatgtataattttgtgatctttattttccctttgtattcattttaagcatctaaataaattgctgtattgtgcttaatgt

SEQ ID NO: 9 - DNA, 5660 bp, Homo sapiens
gaggaggaggaggagcaggcgccgccatggccgccgctatcaccgacatggccgacctggaggagctctcccgcctgagccctctgccccccggcagcccgggttcggcggcgcggggccgggctgagccccccgaggaggaggaggaagaggaggaggaggaagaggaggcggaggccgaggcggtggcggcgctgctgctgaacggcggcagcggtgggggcggcggaggcggcggcggaggagtggggggcggcgaggcagagacgatgtcggagccgagccccgagagcgccagccaggccggggaggacgaagacgaggaggaggacgacgaggaggaggaagatgagagcagcagcagcggcgggggtgaggaggagagtagcgccgagagcctggtgggcagcagcggcgggagcagcagcgacgagacccgctcgttgagccccggcgccgccagcagcagcagcggggatggggacggcaaggagggcctggaggagcccaagggaccgcggggcagccagggcggcggcgggggcggcagcagtagcagcagcgtagtctccagcggcggcgacgagggctacgggactgggggaggcggaagcagcgcgacctccgggggccggcggggcagcttggagatgtcgtcggatggggaacccctgagccgcatggactcggaggacagcataagcagtactataatggatgtagacagcacaatttccagtgggcgttcaactccagcaatgatgaatggacaaggaagcactacttcttcaagcaaaaatattgcctataattgttgttgggaccagtgccaggcttgcttcaactctagcccagatctggcagatcacatccgttccatacatgtagatggtcagcgaggaggggtatttgtttgcttatggaaaggttgtaaagtatataacactccatctaccagtcaaagttggttacaaaggcatatgctgacacacagtggagacaaacctttcaagtgtgttgttggtggctgcaatgccagctttgcttctcagggagggctagctcgtcatgtacccacacacttcagtcagcagaactcctcaaaagtttctagccagccaaaggccaaagaagaatctccttctaaagctggaatgaacaaaaggaggaaattaaagaacaaaagacgacgctcattaccacggccacatgatttcttcgatgcacaaacactggatgcgataagacatcgagccatatgctttaacctctcagctcatatagaaagtttagggaagggacacagtgttgtttttcatagtactgtaatagctaagagaaaagaagattctgggaagatcaaacttttgcttcattggatgcctgaagacattctgcctgatgtgtgggtgaatgaaagtgaacgacatcagttaaaaactaaagtagttcatttatcaaagctacccaaagatactgccttgcttttggacccaaacatatacagaacaatgccgcagaagaggttgaagaggtaaaaaataaataaatacataaaaagcaaacaagcggggacacctgcagtcttagtcactgacaatgggtttagggaaagttgcacattagagtcaaccccttcttttttttttttttttttttaaatccagtatttaggataatatttatgcttagtgtaaacattctgtgaatgaagtagactcttcggtggaatatattaatatattactgtatatccacattttcatggaatggtactgtgggagactgagcaaacactcttttggcaacttagtagaacagcttcttaaaggctttgcatgcttgctgctttaagctgcttttttttttcttttcttccctttagtgatttcagtagtttatattggaaagaaaaacaattacaacatgtgcccttacaaataccaaaagcactgtaaggatatttgtcttgacagtgtttattgatttgaagtcatattaggaaatatttagacaatgaaaattatcaagagataatttacctttcaattatgataaatagatgtgattggttgccatttgtgttcttttgcagaactctgataagaaaagtgttcaatttgtatttaagcaaacagtgaacgacgtttgcaatcaactaaaaattcgtctatcgaattagggctgaaaattactgttaaagagtgttgcagtatgtctggtggctcccttttcaggactagggctttctcatggagtacagtatgttaatatttacctatataactaatctgttaacggtttttgaaaaacctttcaaattatttgaataatcttcatattttcatttaacctatatgactctaattttttttctgaggaaatcatttggtttttgagttgttttttcttaatgtaagaaaaattgtattttttttacaagtatcttcaaactgaatcttttatgcaccaaagttggtcttgaaaaggaaaataaaatcactttcttgcttggtaagcaagaagccatatcgattttttttaacttacagaaatggaaatatgtgtaacttgttagtattgtattaaacaaatgttgcatagagataatagaacattgcttgtaaataattcagcagatttgtaatatatttttatattttgaaatgtactgtagatgttttctagaggcatgaaagttaaatgtatatattatggtagaaataatattgaaggatattgtacttcactagtgctgccagaggaattgttaataaaagcaccttctttaacaataaatgtctttcacagacttaagggactatgtactactgttaatatctctaagaacaaaacacattgaacatccttccagaaagtctttgagggaggacctatacccataatagaattatggcactcatttctgacagtgatcaagaaatcagttatttccttactgttggaaggacattgtaaagtatgtggttatatgcagtgaaactgcagaaaatactcctggttgaggagttttcactttactacagtgatataaaaaccagcagtttttacactaaattttttaaagaaatattagacaaaaatatagaattaaaacctttggttccaaaatgggaaaggttccacgatacataaatcatttctcatttgctttaaaaaatttaaaagtgtaaaaattatgagagactttattcgttaacaatgggggtaaagagctatatacatgaaaatgagtcttataaaattaagtgaagtgcaaataaaagcactgctactataagacattctggaatggttgtttaataagggtattatccatttgatctatagcaatgtgattttatttttaaaaagaaaagcagtgtgttttctttttttgttgttttcttttgcttaagcacttcatcaattgctttattctgtatctgcgaagtaatctgcaatctcttttgttctttttaaaatttgatttgttataaaattgccaaatagaagtgtttcagatacatagtttgtacctgtatttttattttattgcctcatgttcttgtaagtcattcttaattgaccaatgattgtagaccttgcttgagtattttttctaataaaacaaagcaaatcacatttagcttcaaattgtaacaattcaattgaattttaaaatgacacctgaaaagatacatctgatattttctatatagagcacagtaaataagttttttcattgtgtagaaatacttagatgtcaaaaccagatttcgtgatccttgattaacttctgagtactcaatcaatcataatccttttgctgcttatctgatgttggtttgatactgttaacacaccaaaaagaatatggaattgaaatgagctagctttataacttgtatgtatacatatatacacataacatccaattatgactgggtaataagtgtgaaaattttaatttgtggttttcatttattaatgtctgcccatctgtattgttgctcctaccttcaaatatgacacctgaaataataagtctgttgtccagaatttatgtattgttcagcatcaagcaaactacagctcacaagcatacccatttatatgttgtctatgcctgctttctcctgcagtggcagaattgagtggtgagaccttaggtcctgcaagcccccaatttttactacaggttggcaatccctaatccaaaaatctgacataaaaaatgctccaaagttcaaaactttctgagtgctgacatcatgctgcaagtggaaaattccacgcctgacctcatgtgactggtcatagtcaaaacaattaagactttgtttcatgcacaaaattattaaaactgttgtataaaattaccttcagtctatgtgtataaggtgtttgtgagatataaatgaactttatgtttagtcttggatcgcatttctgagtctcattatgtatatgcagatactcaaaaatctgaaaaaaatcaaaaatctgaaatacttctggtcccaagcatttcggataagggatactcagcctgtctctggtcctttaagaaaaagttttcgattcctttgtctagttgacaaaaagtttggaaacataaacttagaccacacaacttgcattttaatatgacaatgttgatcttggtaataagccagtacattaaattttagtgaaagctgtttcatgtattttacagtaaatactgccatattaggtacctacaacaaatggtggtttttggaaacttttacggtgggtttttaaagttattaatagtccatcatttcatcatttgtgtttctgtatttattttgctaagaactaaataagattttgtacatcagattgtgtttgaaccgtaaggcacatctgctttatctaaaagaatcttaaggtggaaatagtgtaaaatttaaaattttttatatttctaataaactttttatatataaatgttacctaaagtggacacatgttacttctgaatttcacatgaaaggaaattaaagatggacaataattatctctcaatattttaagatttgttttactaattgaaaacagtatgtcagtaaatctttggccttagtgcttttttcccccttttacacattaataaaatgttttaaatatggtaatactcttaaaacggtagaatttgccacagttgtttaaagcatttttattttttctttgaattcttaattcatggtgaacagatgttgggttcttaaaatataaaaatgagaaaatatgtattaaaaatacttgatagagggttttctctttaatcacaacttaaaaaaagaaacctttaatacctctgcataagttctctgaaagaacttaaattcttagtttatatgaaaactgatatgtatgtctgtgtaacaaagcctgttgggtacaggtctacaaggagatactttgtttctaaaaaaggagttaaatcgtgtcacctgaattttttttttttgagataagtggacattttggggattttggttaaaacatatttctctattctaaaaattacagaatatgtattcataaaagggaagaaattgttagaaaatttcctgtgtacgtagtttgtttttaaattaaagaatcttgtgacctggtgtaggacattt

SEQ ID NO: 10 - DNA, 3512 bp, Homo sapiens
ggggaggggacaggcgctgcaaggagcagagccgcgggaagcaactccctaagccacaatgctagtcgcgaacacaggaaaaagctcatcccgccgccgcggggccccatgctcccgccggcaatgactatgcctgtgggagcaacggctaccggcgcgcggccttctgggagttgtttgttgcgcggagcgcgggcacgtccgccggccaccggaagcaccgccattggccggtgcgtgcaggtggcagccaagagcctcctggcacagcggcaccaggcaggtgacgcctattggaccccagaggtcatcccagctccagacgtggacacattttcttccaatgatgtctacggatgaggaaactgaggcctggagaggttaaagagacccgttcagagtcctacagtggcagactggtcttctgaggacctctgccctctacacagcggcctcttcaggtgcagggaggaaatggaagcacgttctatgctggttccaccccaggcatctgtgtgcttcgaggatgtggctatggcattcacacaggaggagtgggaacagctggacctggcccagaggacactgtaccgagaggtgacactggagacctgggagcatattgtctccctggggcttttcctttccaaatctgatgtgatctctcagctggagcaagaagaggacctgtgcagggcagagcaggaggccccccgagactggaaagctacccttgaggagaataggttgaattctgaaaaagatcgagctagggaagaactatcccaccacgtggaagtgtacaggagtggaccggaggagccaccctctttggtattaggaaaagtgcaagatcagagcaaccagttaagggaacaccaggagaactccttgaggttcatggtactcacctcagagagactgtttgctcaaagggaacattgtgagcttgaacttgggggaggttattctctaccttctactttaagccttctacctacaacattacctacaagtacaggtttccctaagcccaactcacaagttaaagagttgaaacaaaattcagctttcattaatcatgagaaaaatggagcagatgggaagcactgtgagagtcatcagtgtgctagagctttctgtcagagtatttacttgagtaaacttggaaacgttgaaacaggaaagaaaaacccttatgaatatattgtcagtggtgactctctcaactatggttcctccctttgttttcatggtagaactttttcagtgaagaaaagtgatgactgtaaggattatggaaacctcttcagtcacagtgtgtctctgaatgaacagaagccagtgcattttgggaaaagtcagtatgagtgtgatgagtgcagggaaacctgttctgagagtctgtgccttgtacaaacagaaagaagtggccctggagagacccccttcagatgtgaggaacgctgtgctgccttccccatggcctcatctttttctgactgtaacatcattcagactacagagaagccatctgtgtgtaatcagtgtggaaaatctttcagctgttgtaagctcatacaccagagaacacacactggagaaaagcccttcgaatgtactcagtgtgggaaatcttttagccagagctatgaccttgtcatacatcagaggacacacactggagagaagccctatgagtgtgacctgtgtgggaaatccttcacccagagatccaaacttattacacatcagcgaattcacactggagaaaaaccgtatcagtgtattgaatgcagaaaatccttcaggtggaactctaacctcattgtacatcagagaattcatactggagagaaaccgtatgagtgcactcactgtggaaagtccttcagccaaagctatgagttagttacacataaaagaacgcacactggagaaaaacccttcaaatgtactcagtgtgggaaatctttcagccagaagtatgaccttgttgtacatcagaggacacacactggagagaagccctatgagtgcaacctgtgtgggaaatccttctcccagagttccaaacttattacgcatcagcgaattcacactggagaaaaaccgtatcagtgtattgaatgtgggaaatccttcagatggaactctaacctcgtcatacatcagagaattcatactggagagaaaccgtacgattgcactcactgtggaaagtccttcagccaaagctatcagttagttgcacataaaagaactcacactggagaaaagccctatgaatgtaacgagtgtggaaaagccttcaatcgaagcactcagctcatcaggcatctgcaaattcacactggggagaagccgtacaaatgcaatcagtgcaataaagcctttgcaaggagctcctaccttgtgatgcatcagagaactcacactggtgagaaaccttttgagtgtagtcagtgtgggaaagccttttcagggagctctaaccttctttcccatcacagaattcattctggagagaaaccctatgaatgtagtgactgtgggaaatccttccggcagcaatctcaacttgtagtgcatcggcggacacatactggagagaaaccttaggagtgcagtcattgtgggaaagctttcatccagaggtctcccctcatcatgcaccagaggacgcatgtcggtgggaagagctatcagtgtgacgtgtattaagccagcggttgtgactcattgaacatcagaggacatatcctggagaaaagccctacgaatgcattgattgtgggaaagccttcaatgatcgctcaacccttagtaaacacgagaggacacacactggaggcaaaccctatgaatgtgaccattgcgagaaagcctttagccaacggtgtcaacttactaggcagcagagaattcatactggagagaagccctgtgaatgttaacaaatgtggaaaagcttccagttatgatactttccttattcaacatgagaaagctcatgggcaagaaactctatgaataaccaagatggagccgggtgcagttgccaacacttgtaatcccagcagtttgcgaggccgaggcaggtggatcacttgagcccaggagtttgaaaccagcctgggtaacatggcaaaatcctgtctttacaaaaaatacaaaaattagcctagcatggtggcgcatacctgtagtcctagctactcaggaggctgaggtgggaggatcacttgagcttgggaggcggtggttgcagtgagctgtgatcatgccatcacaccgctgccttgtgagagattgagacactctaaataaataataaccaagatgggaaatttccctgccagaccttgtttactagaaatcaggtggccaaaacatgactctcagagtggggcttcatgaccatgtgcatcagaattgcctggagtgtgcactgaaactgtgtattaccaagctcactctagccaactaaataaaaatctctggcagtaaaa

SEQ ID NO: 11 - DNA, 1308 bp, Homo sapiens
cctccgcctccattgaaggcggggaaataccgcggcgcggacggtagttgctgtggtttccgttctgagctcgcagcttaggagctgaagatcgcggacttagcgttgccgcgtccgagtccggccatcagtggctgcagatccggaggccaggagctcaaccacccttcttcggaacagggccggcctgctgctgtgccctcgacgctcggtgcctgtatctactccggggcctaggtcggctccgggggcggcttaggagaaggccgccggcgagatgttcaaaaacacgttccagagcggcttcctctccatcctctacagcatcggcagcaagcctctgcaaatctgggacaaaaaggtacggaatggccacatcaaaagaatcactgataatgacatccagtccctggtgctagagattgaagggacaaatgtaagcaccacatatatcacatgccctgcagaccccaagaagacgctgggaattaaacttcctttccttgtcatgattatcaaaaacctgaagaagtattttaccttcgaagtgcaggtactagatgacaagaatgtgcgtcgtcgctttcgggcaagtaactaccagagcaccacccgggtcaaacccttcatctgcaccatgcccatgcggctggatgacggctggaaccagattcagttcaacttgctagacttcacacggcgagcatacggcaccaattacatcgagaccctcagagtgcagatccatgcaaattgtcgcatccgacgggtttacttctcagacagactctactcagaagatgagctgccggcagagttcaaactgtatctcccagttcagaacaaggcaaagcaataactggaattgtgactcgagggatagacccctggatgtgactcttctttttaaaaggaaactatgtggaggacgatgcaaaaacatatttatcttagtttgctctgctgtagttctgttatttatacttggtgttgcttgtcatggacaccggtgaacatgccgtaactctgtgactgcattgtaagtgcagtgggggtaagcagtcctgtgagtggcgcatgaacgctggagcttattccgccgcctgccccagtgtggggggagatacctttaccatgaacttacagaattaaagatggcccataaggaattccagaccaatatttcttcctgcggtttattctatgttttatatattatctaaatatatgtatatgctgtgtcatactcataatctggaaatgaataaagtgatatattcctggtttgtaaaaaaaaaaaaaaaaaaa

SEQ ID NO: 12 - DNA, 9580 bp, Homo sapiens
cttggtcacatggtggcacggccgctgcgtcagtcacagccctggctgcaggagtccagctgccgtcgccgccgccagcggacggggcggggatcctggtgccaggtcttcgttaacccgcccccgccgcctcagtcagctgtcccagcccgggcccgaccgtcatggagcggtgcggggcctacgcctgttccgtgtgaggcgcatcgctgccgccgccgccgacgccgccttcgtttgtcgaggcctccggaacccccgccgcctcccggagcccctcgcccttggcagcctgtcaccgccccctgggcgggctcgaatgcgcgtccggtgaaggtgcaggcccggcgccgccactgccgcagccaggagatggttcgggcctagcggagccgggactggagcaacatgaaccgtgaagaccggaatgtgctgcgtatgaaagaacgggaaaggcggaatcaggaaattcagcagggcgaagacgccttcccacctagctctcctctctttgcagagccatacaaagttactagcaaagaagataagttatcaagtcgtattcagagtatgcttggaaactacgatgaaatgaaggatttcataggagacagatctataccaaagcttgttgcaattcccaagcctacagtaccaccatcagcagatgaaaaatctaacccaaatttctttgaacagagacatggaggctctcatcagagtagcaaatggactccagtaggacccgcacccagcacttctcagtctcagaaacggtcctcaggcttacagagtggacatagtagccagcggaccagcgcaggtagcagtagtggcactaacagtagtggtcagaggcacgaccgtgagtcatataacaatagtgggagcagtagccggaaaaaaggccagcatggatcagaacactccaaatcacgttcttccagccctggaaaaccccaggctgtttcttcattaaactctagtcattccaggtctcatgggaatgatcaccatagcaaggaacatcaacgctccaaatcacctcgggaccctgatgcaaactgggattctccttcccgtgtacctttttcaagtgggcagcactcaactcaatctttcccaccctcattgatgtcaaagtccaattcaatgttacagaaacccactgcctatgtgcggcccatggacggacaggagtccatggaaccaaagctgtcctctgagcactacagcagccaatcccatggcaacagcatgactgagctgaagcccagcagcaaagcacatctcaccaagctgaaaataccttcccaaccactggatgcatcagcttctggtgatgtgagctgtgtggatgaaatcctaaaagagatgacgcattcatggcctccccctctaacggctattcatacaccatgcaaaacagaaccttccaaatttccttttccaactaaggagtctcagcagtccaattttggcactggagaacaaaaaagatataatccttctaaaacttcaaatgggcaccagtctaaatctatgttaaaagatgacttaaaactaagcagcagtgaagacagtgatggggaacaggattgtgataagacaatgccgaggagtacaccaggaagtaactctgaaccttcacaccataatagtgaaggagcagataactccagggatgattctagtagccacagtggatctgaaagcagctctggatctgactcagagagtgaaagtagttccagtgacagtgaggcaaatgagccatcccagagtgcatctcccgagcctgaacccccgccaacaaacaaatggcaacttgataattggctgaataaagtgaacccacataaagtgtcacccgcctcttcagtggacagtaacatcccatcatctcaaggctacaaaaaggaaggccgagagcagggcactgggaatagctacactgatacaagtggacctaaagaaacgagttccgctactccgggacgagactccaaaaccatccaaaagggatcagaaagtgggcgtgggaggcagaaatctcctgcacagagtgacagcacaacacagagaagaactgtaggcaaaaaacaacccaaaaaggctgagaaggcagctgctgaagagcctcgtggaggcctgaagatagaaagtgaaacccctgtagacttggctagcagcatgccctccagcagacacaaagcagccaccaaaggctcaaggaaacccaatataaagaaggagtctaagtcttcccctcgacctacagcagagaaaaagaaatataagtcaacaagtaaatcttcccagaaatcaagggaaatcatagaaacagatacctcatcctcagattcagatgaaagtgagagccttcctccttcctcacaaactcctaagtaccccgagagcaataggactcctgttaaaccctcctcagtggaggaagaagatagcttttttcggcaacgaatgttctctcctatggaagagaaggaacttctttcacccctcagtgagcctgatgacaggtacccacttattgtgaagattgacctgaatcttttgactagaataccaggaaagccttacaaagaaacagagccgcccaagggggaaaagaaaaatgtgccagaaaagcacacgagagaggctcagaaacaagcctcagaaaaagtttccaacaaaggcaagaggaagcataagaatgaagatgataaccgagccagtgagagcaagaaacccaaaacggaggacaagaattcagcaggccataagccatccagcaacagagagtcatctaagcagagtgctgcaaaagaaaaggatttgttgccttctcccgctgggcctgttccttcaaaagatccaaaaacagagcatggctctcggaagaggactattagtcagtcttcttccttaaagtcaagcagtaacagcaacaaggagacgagtggcagcagcaaaaacagttcctccacatcaaagcagaagaagaccgaagggaagacttccagtagctccaaggaggttaaggaaaaggctccaagtagctcctctaactgtcctccatctgcaccaactcttgattcttctaagcctcggagaacaaagcttgtctttgatgacagaaattattcagcagaccattatttacaagaagcaaaaaagctaaagcacaatgcagatgcattgtctgataggtttgagaaagctgtatactatcttgatgctgtggtatctttcattgaatgtgggaatgcattagagaagaatgctcaggaatccaaatccccattccctatgtattcagagacggtggatctcatcaaatacactatgaagctaaagaattacttggcaccagatgctacagctgcagataaacgactcacagtactttgcctgcgatgcgagtctttgctgtacctgaggctgttcaaactgaagaaggaaaatgctctgaagtactcaaagacactgacagagcacctgaagaattcttataataattctcaagcaccatcgcctggcttgggaagcaaagctgtggggatgccttcccctgtttctccaaagctgtcaccaggcaattcaggaaattattcatctggggccagtagtgcttctgcaagtggttcttcagtgaccattccacagaagatccaccagatggcagccagctatgttcaggtcacatccaacttcctctatgccaccgaaatttgggaccaagctgaacagctttccaaagagcaaaaagaattctttgctgaactggataaagtaatgggccctctcatctttaatgcaagcatcatgacagatctagttcgttatacccggcagggactgcactggcttcgccaggatgccaagttgatatcttgaactgaacacattctcgttgcctctgattttctccacaacactgtgtcacatcacgaaggaaaactgccataacataccacctagtcgacactaagaatgaggaatagttttctcctcgttggttcatgtgttgttgtttttgataatccaaagcgatcatgtcagttggccctttaatatttccaatgtgaaagattatttaaatgcttttaaatctgcagcacattgataagatggtttccgtgagctatgataagattgaaattccagttgcaattcataactaatgaattgaaattttatttattttaatttttttaagttcccagattggggctagtttaagacttagttatttctgcctataaatttactctgttgaatatttagcataaatttaatgtagacatttttatttatataccttgggagctttattacctaatatctttttgtggtagctgttctaagagtaagaattggttcgtctaaaataaggacatattctttctacacctgctacctgacctgatatttgaaatcttaactccaattttattattgtggaatttacagttagtattaaggatattcttctacacatgaaaaaatcacttaaatatgagaaaatggcattctacatgtatgtactatgaaatgtgtctgatttggtatgcattatttcaaaaactgtgaatgtgtgttaataacactacagcaatcacacagtgactatagcttgcatttaatgcattacaaaagagggaggacaaactttctagaagaagcatttcatgttgaagggtttcataaaaggacaatcctgaacgttacggattttattaaaaccatatgttattttttgttgctaatcatttgacacttaatcgaaacagaataagttactgtggaaaaaaggatgatccaactcctgaggattgccgcctgtgtgtctttaattgattatctttgatagttagagttatttttcagatttttccccctcatactggattgtgatgctctgatatgagcatgcaatgactgatacagaaataggctggagcttcggtgtgtgcttttgctatacagcttacagttctaatgcctgatgtagagatgatgaatttctcctttttaaacctatcttctgtttactccttttgcattatgaaggccctcttcaatgatgtatgtttctgatggaatcagaaaatttcacactagaaaagtgtacctaacttgattcagtgtgagctcttgggacagggagtggagccaggggtagagcttaaagaagctggctctgtaagagttgtatatcaaagtaccttttgctacaaggtgcatatagaagtctaagataagaaatgtaccctctatactttatttttcatgcccctatcatgtttggtgtgccttaaatcttacctttaaatgaagactctatggattgtttacaaatgaagttttacactaggaccagatcgtccatacatgattggtcttctacaataataatgttcaattctttcattttaaatctttctttagggtcatataaagattagttctttcagaaaagctattgctttggtacatgacttagtctaaccagttgggtaatgctgctttgaaaaatagtttgtccctctccccattccaaaaatgaatccattcagtcagaaaaaaagattatcctactatttgtagatgattgctaaggcttgaaataggaaaggggaaagaagggatagaaaagtttcaagtccagtagtgcagtgaatcctttgtgtttgagacttttttacacttatttctgaagttagtgaactttcattgtccctgtggcctcatatttatagagcttcttaactgttttgtacctcagattgtttttagatgtcattgaagattgagatgtacaaattatgttgaatttaacctgtttctcttggagaaattgcctctgatatctttctaacttaatcttagtgtgttctaggaacagttttccataagaggacaacttctcaatgatcatgatagttatttagtaagaaataatggttgttaatcaaatacatgttatgtcttgtccttctctgatttttctgacttggattccttaatttgcagtgatgtcttagaaatggaaaaagtatcctctgggctttcagactttcagcaacaacagccagtgggatacctctgagttcttgtgttctagtctcttgtatgtcctgaaaggcagcaggagcatttttggggtcacactgatattttgttaaagcagagtttcctgcatggtttatggtgctgctctaatattttctctttaaaactgtgtcaatttttggagaatgaatttttcaaccttttcattgtggaggatttttcccacaaggtagtaatgggcaatggatcaaaatcctatcataaatgattgaattttcaatgtcatagtgtgtggaaatactactccctttcctccatgtctatcttcttagatgttctgtctttgtcatcatctgctccagcacatactttggactcctttacaggtgaccttcccccctccctcctcaataggtgtcctcagtgttttctaagcatttaaaactgaatttgacaagtggctaaaaacttagtctgagacttgtacttagtatatggttaattatagaaacaacaactattttaaacagttactctgttgactgctctttatgactacacttgtatgccaggaggcagcagcctatacaccattagactctttacaagcaaccaacgaaccaattgcagtggttgcagttgtcacagtagtcttgcctgggccagactgggctgggctgtgggaagcattccccttcaggggagtttccacagctcagcccaggctccagtctggctagagagcatccagcccattccttgcctcagtgccacctttttctgggcaagtagccaagaagtgactttatatgcagtgagtacttcagataaacttacagctacagctgccgaagagtggagaaggttgaccaccatttatttaattctctagtgtaaaaacaattgagagcagtgtgcgtgagcccacagacacctgtgtttctgggagctctggcagtggcggattcataggcacttgggctgcactttgaatgacacacttggctttattagattcactagtttttaaaaaattgttgttcgtttcttttcattaaaggtttaatcagacagatcagacagcataattttgtatttaatgacagaaacgttggtacatttcttcatgaatgagcttgcattctgaagcaagagcctacaaaaggcacttgttataaatgaaagttctggctctagaggccagtactctggagtttcagagcagccagtgattgttccagtcagtgatgcctagttatatagaggaggagtacactgtgcactcttctaggtgtaagggtatgcaactttggatcttaaaattctgtacacatacacactttatatatatgtatgtatgtatgaaaacatgaaattagtttgtcaaatatgtgtgtgtttagtattttagcttagtgcaactatttccacattatttattaaattgatctaagacactttcttgttgacaccttgaatattaatgttcaagggtgcaatgtgtattcctttagattgttaaagcttaattactatgatttgtagtaaattaacttttaaaatgtatttgagcccttctgtagtgtcgtagggctcttacagggtgggaaagattttaattttccagttgctaattgaacagtatggcctcattatatattttgatttataggagtttgtgtctgggtcccaggaacatctactggggatgactgttaggcagcttgtgatgatgttttttaaaaaacctaagtaacttggggagacagagcatttcaaacccatatagacacctatcatacctgtatatcccctaatacatggaacataaatttcatttcagctttatgcattaatgtattgaagaggcaggctttttttccagtaataatactgtacatctaaggttgctattcagtaaaactaatagaagagataattattgaataccttggaatatgtagtgagaagaggccaaatttttcatgtttgtgagcatgtctttcagatactcgctaatggagaaattcactttagacctctagaccccaaaaccaagttagcaagtgacaaaaagtaaattattaatagtctgtaaagtggatgctggtcttacaaagctcctattcacatgaaccctatggttaattagaaagaacttgctgtctccagaaaagggaatggaaataataactatgtatcttcttttcatgtaatttggtcacagaataaggtattcaagttaagtctaatccaagtcttagagatctttaagtatcctaaaatagcagcctaagtagtcatcatgtaaagaagttgactttcaggaatgtcagcattgacctctccttgccactgttactcagctaaacataacttgccattcttaaaaataaaaaagctcccacccagaaactctagtgatactcagttttgacctcttactgcttccatgtgggacttcttttcagcttttaaccattggaattttctacctgctatgttcctctctggaaaatatcaatttggaaatgctgcctttcaaatcaatgccatgatcatccatattgttgagtttgttgttggtgttccagaagtgtccccattttacaactttatgcacacacctggcaaatcattaacatgagcattcaacagtactgggatgggtggggtgggggtagggggctcaccaacagaactggccagttgacattgcctgaaaaggcaccacctttaagggccagttgtggggttggtaagcacagttatgaaaatttctatctagcctccgttttgaatggttttaagaaattttgtatatggaggatggaaatgcttatatatttattgaaaatccttttatttgaaattaaaattatttggtatataattgtttgatatttggggagggttttggaggggagataatgtcactgataaattaaaagcctgttgattttgcagaaaggtactgttagtgactgataaggatgcctttgttttgtacatgaaccaaatctttgttttacatttcttttatccaaaatatttaggcatctgacattttcaaccagaatttcaattatatactgtgatttttatttgttgcaatacattacaatttcagaggtactttggggctcaaaagctaggatttctaagtcagtatgtgcatttcacacgataaagctgttaatggtgagcaaagtattatatactaactagatttttccacatctgtatagtatattatatgtattttgtggtattgagagtatagaaagtttagagtgtcaaacatgcgtttaatgtgtatttttaaacaaatttatggcaattaaaatatttggagacaagggtatcacatttcaatttgtaaagatctttttaactctactgtgtcattaagatgctttgtacaatgccaaaccatagttggagaaactaagtttaataaatatcaaatagattttctgtattaaagttactgaacactgta

SEQ ID NO: 13 - DNA, 6247 bp, Homo sapiens
agtggctggggagtcccgtcgacgctctgttccgagagcgtgccccggaccgccagctcagaacaggggcagccgtgtagccgaacggaagctgggagcagccgggactggtggcccgcgcccgagctccgcaggcgggaagcaccctggatttaggaagtcccgggagcagcgcggcggcacctccctcacccaaggggccgcggcgacggtcacggggcgcggcgccaccgtgagcgacccaggccaggattctaaatagacggcccaggctcctcctccgcccgggccgcctcacctgcgggcattgccgcgccgcctccgccggtgtagacggcacctgcgccgccttgctcgcgggtctccgcccctcgcccaccctcactgcgccaggcccaggcagctcacctgtactggcgcgggctgcggaagcctgcgtgagccgaggcgttgaggcgcggcgcccacgccactgtcccgagaggacgcaggtggagcgggcgcggcttcgcggaacccggcgccggccgccgcagtggtcccagcctacaccgggttccggggacccggccgccagtgcccggggagtagccgccgccgtcggctgggcaccatgaacagcagcagcgccaacatcacctacgccagtcgcaagcggcggaagccggtgcagaaaacagtaaagccaatcccagctgaaggaatcaagtcaaatccttccaagcggcatagagaccgacttaatacagagttggaccgtttggctagcctgctgcctttcccacaagatgttattaataagttggacaaactttcagttcttaggctcagcgtcagttacctgagagccaagagcttctttgatgttgcattaaaatcctcccctactgaaagaaacggaggccaggataactgtagagcagcaaatttcagagaaggcctgaacttacaagaaggagaattcttattacaggctctgaatggctttgtattagttgtcactacagatgctttggtcttttatgcttcttctactatacaagattatctagggtttcagcagtctgatgtcatacatcagagtgtatatgaacttatccataccgaagaccgagctgaatttcagcgtcagctacactgggcattaaatccttctcagtgtacagagtctggacaaggaattgaagaagccactggtctcccccagacagtagtctgttataacccagaccagattcctccagaaaactctcctttaatggagaggtgcttcatatgtcgtctaaggtgtctgctggataattcatctggttttctggcaatgaatttccaagggaagttaaagtatcttcatggacagaaaaagaaagggaaagatggatcaatacttccacctcagttggctttgtttgcgatagctactccacttcagccaccatccatacttgaaatccggaccaaaaattttatctttagaaccaaacacaaactagacttcacacctattggttgtgatgccaaaggaagaattgttttaggatatactgaagcagagctgtgcacgagaggctcaggttatcagtttattcatgcagctgatatgctttattgtgccgagtcccatatccgaatgattaagactggagaaagtggcatgatagttttccggcttcttacaaaaaacaaccgatggacttgggtccagtctaatgcacgcctgctttataaaaatggaagaccagattatatcattgtaactcagagaccactaacagatgaggaaggaacagagcatttacgaaaacgaaatacgaagttgccttttatgtttaccactggagaagctgtgttgtatgaggcaaccaacccttttcctgccataatggatcccttaccactaaggactaaaaatggcactagtggaaaagactctgctaccacatccactctaagcaaggactctctcaatcctagttccctcctggctgccatgatgcaacaagatgagtctatttatctctatcctgcttcaagtacttcaagtactgcaccttttgaaaacaactttttcaacgaatctatgaatgaatgcagaaattggcaagataatactgcaccgatgggaaatgatactatcctgaaacatgagcaaattgaccagcctcaggatgtgaactcatttgctggaggtcacccagggctctttcaagatagtaaaaacagtgacttgtacagcataatgaaaaacctaggcattgattttgaagacatcagacacatgcagaatgaaaaatttttcagaaatgatttttctggtgaggttgacttcagagacattgacttaacggatgaaatcctgacgtatgtccaagattctttaagtaagtctcccttcataccttcagattatcaacagcaacagtccttggctctgaactcaagctgtatggtacaggaacacctacatctagaacagcaacagcaacatcaccaaaagcaagtagtagtggagccacagcaacagctgtgtcagaagatgaagcacatgcaagttaatggcatgtttgaaaattggaactctaaccaattcgtgcctttcaattgtccacagcaagacccacaacaatataatgtctttacagacttacatgggatcagtcaagagttcccctacaaatctgaaatggattctatgccttatacacagaactttatttcctgtaatcagcctgtattaccacaacattccaaatgtacagagctggactaccctatggggagttttgaaccatccccataccccactacttctagtttagaagattttgtcacttgtttacaacttcctgaaaaccaaaagcatggattaaatccacagtcagccataataactcctcagacatgttatgctggggccgtgtcgatgtatcagtgccagccagaacctcagcacacccacgtgggtcagatgcagtacaatccagtactgccaggccaacaggcatttttaaacaagtttcagaatggagttttaaatgaaacatatccagctgaattaaataacataaataacactcagactaccacacatcttcagccacttcatcatccgtcagaagccagaccttttcctgatttgacatccagtggattcctgtaattccaagcccaattttgaccctggtttttggattaaattagtttgtgaaggattatggaaaaataaaactgtcactgttggacgtcagcaagttcacatggaggcattgatgcatgctattcacaattattccaaaccaaattttaatttttgcttttagaaaagggagtttaaaaatggtatcaaaattacatatactacagtcaagatagaaagggtgctgccacggagtggtgaggtaccgtctacatttcacattattctgggcaccacaaaatatacaaaactttatcagggaaactaagattcttttaaattagaaaatattctctatttgaattatttctgtcacagtaaaaataaaatactttgagttttgagctactggattcttattagttccccaaatacaaagttagagaactaaactagtttttcctatcatgttaacctctgcttttatctcagatgttaaaataaatggtttggtgctttttataaaaagataatctcagtgctttcctccttcactgtttcatctaagtgcctcacatttttttctacctataacactctaggatgtatattttatataaagtattctttttcttttttaaattaatatctttctgcacacaaatattatttgtgtttcctaaatccaaccattttcattaattcaggcatattttaactccactgcttacctactttcttcaggtaaagggcaaataatgatcgaaaaaataattatttattacataatttagttgtttctagactataaatgttgctatgtgccttatgttgaaaaaatttaaaagtaaaatgtctttccaaattatttcttaattattataaaaatattaagacaatagcacttaaattcctcaacagtgttttcagaagaaataaatataccactctttacctttattgatatctccatgatgatagttgaatgttgcaatgtgaaaaatctgctgttaactgcaaccttgtttattaaattgcaagaagctttatttctagctttttaattaagcaaagcacccatttcaatgtgtataaattgtctttaaaaactgttttagacctataatccttgataatatattgtgttgactttataaatttcgcttcttagaacagtggaaactatgtgtttttctcatatttgaggagtgttaagattgcagatagcaaggtttggtgcaaagtattgtaatgagtgaattgaatggtgcattgtatagatataatgaacaaaattatttgtaagatatttgcagtttttcattttaaaaagtccataccttatatatgcacttaatttgttggggctttacatactttatcaatgtgtctttctaagaaatcaagtaatgaatccaactgcttaaagttggtattaataaaaagacaaccacatagttcgtttaccttcaaactttaggtttttttaatgatatactgatcttcattaccaataggcaaattaatcaccctaccaactttactgtcctaacatggtttaaaagaaaaaatgacaccatcttttattcttttttttttttttttttgagagagagtcttactctgccgcccaaactggagtgcagtggcacaatcttggctcactgcaacctctacctcctgggttcaagtgattctcttgcctcagcctcccgagttgctgggattacaggcatgtgccaccatgcccagctaatttttgtatttttagtagaaacgggtttcaccatgttggccagactggtctcaaactcctgacctcaggtgagcctcccaccttggcctcccaaagtgctgggattacaggcgtgagccactgcattcagctcttcttttctttagatatgagagctgaagagcttagacacattttgcatgtattatttgaaaatctgatggaatcccaaactgagatgtattaaaatacaatttttggccgggtgcagtggctcacgcctgtaatcccagcacttggggagggcgaggagggtggatcacgaggtcaagagatggagaccatcctgaccaacatggtgaaaccctgtctctactaaaaatacagaaattagctgggcatggtggcgtgagcctgtagtcctagctactcaggaggctgaggcaggagaatagcctgaacctgggaatcggaggttgcagagccaagatcgccccactgcactccagcctggcaatagaccgagactccgtctccaaaaaaaaaaaaaatacaatttttatttcttttactttttttagtaagttaatgtatataaaaatggcttcggacaaaatatctctgagttctgtgtattttcagtcaaaactttaaacctgtagaatcaatttaagtgttggaaaaaatttgtctgaaacatttcataatttgtttccagcatgaggtatctaaggatttagaccagaggtctagattaatactctatttttacatttaaaccttttattataagtcttacataaaccatttttgttactctcttccacatgttactggataaattgtttagtggaaaataggctttttaatcatgaatatgatgacaatcagttatacagttataaaattaaaagtttgaaaagcaatattgtatatttttatctatataaaataactaaaatgtatctaagaataataaaatcacgttaaaccaaatacacgtttgtctgtattgttaagtgccaaacaaaggatacttagtgcactgctacattgtgggatttatttctagatgatgtgcacatctaaggatatggatgtgtctaatttagtcttttcctgtaccaggtttttcttacaatacctgaagacttaccagtattctagtgtattatgaagctttcaacattactatgcacaaactagtgtttttcgatgttactaaattttaggtaaatgctttcatggcttttttcttcaaaatgttactgcttacatatatcatgcatagatttttgcttaaagtatgatttataatatcctcattatcaaagttgtatacaataatatataataaaataacaaatatgaataat

SEQ ID NO: 14 - DNA, 5661 bp, Homo sapiens
ggcacgtggactccctttaatccagtgactgtcaggtcgatcatatgccgaggacgatgatcccgccgggggagtgcacgtacgcgggccggaagcggaggaggcccctgcagaaacagaggcccgccgtgggggcagagaagtccaacccctccaagcgacaccgggaccgcctcaacgccgagttggaccacctggccagcctgctgccgttcccgcctgacatcatctccaagctggacaagctttctgtcctgcgcctcagtgtcagttacctccgggtgaagagcttcttccaagtcgtgcaggagcagagctcacggcagcctgcggccggcgccccctcgcccggagacagctgtcctcttgcagggtctgccgtgctggagggaaggctgctgttggagtctcttaatggctttgctctggtcgtgagtgcagaagggacgatattttatgcatcagcaacgatcgtggactatctgggcttccatcagacggatgtaatgcaccagaacatttatgactacatccacgtggacgaccgccaggacttctgccggcagctccactgggccatggaccctccccaggtggtgtttgggcagcccccgcccttggagacaggagatgatgctatcctggggaggctgctcagggcccaggagtggggcacaggcacgcccaccgagtactcggccttcctgacccgctgcttcatctgccgtgtgcgctgcctgctggacagcacctcgggcttcctggcccgggggtcacaggcttggcagctgcggctctgctgtcccgagccactcatgacgatgcagtttcaaggaaaactaaaattcctgtttggacagaagaagaaggcgccgtcaggagccatgctcccgccgcggctgtcgctgttctgcattgcggcacccgttctcctcccctccgcagcggagatgaaaatgaggagcgcgctcctgagggcaaaacccagagcagacaccgcagccaccgcggatgcaaaagtaaaagccaccaccagtctgtgcgaatcggaactgcatggaaaacccaattactcagcaggaaggagcagcagagagagcggcgttttggtgctcagggaacagactgacgctggccgatgggcacaggttcccgccagggccccatgcctgtgcctccggggtggccctgaccttgtccttgaccccaaggggggctcaggggacagggaggaggagcagcacaggatgctgagcagggcctctggagtgacagggcggagggagactccaggacccacaaagcccctgccctggacagcgggaaagcacagtgaggatggtgccaggccgaggctgcagcccagcaagaatgacccgccctccctgcgccccatgccccgcggctcctgcctgccctgcccgtgtgtccagggcactttcaggaactcgcccatctctcacccgccgagcccgtcccccagtgcctactccagccggaccagcagacccatgcgggatgtcggtgaggaccaggtgcaccctcccctctgccactttccccagaggagcctgcagcaccagctccctcagcctggagctcagcgttttgccacgaggggctatcccatggaggacatgaagctgcaaggtgtaccgatgcctccgggggacctgtgtggtccgacgctgctgctagatgtgtccatcaagatggagaaggactctgggtgtgagggtgctgcagacggctgtgtgcccagccaggtgtggctgggggccagtgacaggagccacccagccaccttccctaccaggatgcacctgaaaacagagccagactctcggcaacaggtgtacatctcgcacctggggcacggcgtgcggggggctcagccccatgggagggccactgctgggcgcagcagggagctgacccctttccaccctgcacactgtgcctgcctggagcccacagacggccttccccagtcggagcctccccaccagctctgtgcacggggccgaggtgaacagtcctgcacctgcagagctgctgaggccgcccctgtggtcaagcgggagcccttggactcaccccagtgggctactcacagccagggaatggtgcccgggatgttgcccaaaagtgccttggccacgctggtcccgccccaagcttcggggtgcacattcctgccatagcgcagtgaccaccatccaagctcagatctgtgtgtctacgctcagatgcgtcggtggctgggctgccctgctcctggtcaggccggagcccgtcctaagacacacgctttgcagagctgtgcatgcgcagtctgctagtgtgtgtgtgcagcatacgcaggagcctatcctgaattttgtaaaatatcccaacagttcttaaatgaaaactggccttaagtctattcaagcatgacagcatttctctttgaggaattaaaatctttaggaaagtgatcatggctggacagcttcatgccccagaggcagcgagcacccgtcccatggctgccaagtccacagtcggggatgaagcagtcgggtgatgctcccaagtccgcagtcggggatgaagcggtcgggtgatgctcccaagtccgcagtcggggatgaagcggtcgggtgacacacctagctcagccctcccaggccacctgcagctcccagcctgtgctgtgcaggcagggtcagcccatcgccacagtgcactgtagaggccagcacacggcaaattagaaatacaacacgcggagaaaggggtccgtgagcccactcatagaggaatctagaacgttccaggcagcagaggctggcagcgtgggtcccacactgccccacaccgtgcggcaggtgctccatggcgccatgacagagtctgaggccagacctggactggaattgacagcataacccctgttccttctggacatctcccgagttctcagtgggtctctgcggacggttcttcctaatctgcctcttggtacatcacgtaatacagagttcacagactccgggtttggaagtacagagaaacacacaacgtagagagaagacacaggaaactgcgctgcctgtgggggtttctctctggctggctgtacagttcactcaaatgagggttcccattgccatcctaggagaataattagggacaagacagacaagtattaatagcattaaaacagttgtaaaggcgatattttctgagagtaggaaatttggatacaaaagcataagtcagaaagtgaaggtcaccaatccaccaacccgagaacctacagctgatggtgcatttcaggcttcttccacggtctggcctggaaccccacccggctggtgcaggcatcagatcagggtgtagaagtcaccccaagcaagaggaagccaggcagtgaggccctggggtgtggctgcagctgggcccacctgtgcgggggtgggaaggccccatcctcagggagagggcatcggcgccctgacgtcagctccactgggagtggcaggagctgtgggagcccatgggtgagggacccaccaccccgctgcactgtgcattgtgcctcccgtgtggacgccctctctgttgttggcccgcgggtgagggacccaccacccctagggacccaccaccccgccgcactgtgcattctgcctcctgtgtggacgccctctctgttgtcagtggctttgaggtgtcagtgcttacttagatgctggtttaatgctggacccatttgttaaacgcaccttcactttgtcaaaacccaggtttggttggcaggactgggtcttctgcccaatgccaggtgcctgcgcctctcagtggcctggttcttggacagtttgcccccatgtggcagggatagggataaggatctcctctcagtactggaagagaacagccaaccatctgagcccagagtcacagatccatcgtggccccctatgacccccaagccctaccgagggggcactcactctctgcttagccagggggcgtctttcaaaaggtgacctccatgctgtgctgtcgtgggtgtgagacgtgctcatggccttccactgccatctctcccttatctgatgcctaaagtcacgatggggacagagctacccaggggccagccatggggtgaccagccacctgagggtcagtcacctgtggagagcaggcacctgtgaagaccaggcacctgaggactggcgcctacttcccactttggccctacactggcacagagcccctctttattcatttctcatgctgagcatggcacacttctggcctctgggcatttatggatttaagaccaggatggtatttcagaagcttcccacttccttcctattctaaccgagtgcccagctcctttgctgatcatggaaagacccttaataattaggcctgcaggccaggcgcagtggctcatgcctataatcccagcactttaggaggtcaaggtaggaggatcgcttaagcccaggagttcaagaccagcctgggcaacacaggaagaatgtgtctctacaaaaaataattaaaaatcagatctgctgtatccctgaaaaagtctcaatcaacatgcatgttccactcttggagttccctgttctgagggccagccacgtcctgtgtcctggagcttagccctcagcagctcccttcagcctgggcgccgcctgggtcccaaacgtggcagctgctcttccagtctcggggccgaggagggcagggagctcagtgactgagagtcttgtgtatcacatgtcttgagtgtcctggagccaacggctgtcactgggaaaaacaccaggccccaaagatcgaatcagagacgtggctgcgtgtttgcgattgtagccaggcccttcagtgtcatcaaaggagcactggggcctccttaagcacagacggcagcccctgcccaggaggcttcttcaccacgtcctgccctgcagcctcccagacctttagatgcgcccctgcccaaggccctcctggtgacaggtgccagattgagtggtgggttgctgccaggcaggccacgctgtgttgacgctgcactcagcacgtgggtgttggctctgccggttttgtggtgtggggaccctacaggaggctgcggccctgagagcctgggatcagcgaggtgtccgacatcccttcctcaacggcaacaaaaactccccaagtcagcactttggttattttatagccacaaccctcttggaaaacagtggggaagactatggaacatagaaagtgtggatgtatcacttctctctaaaatgtcattgttagcactaattacaggttcatgtttttctgtgtatgtagcttttccctatatagctgaaaaagtattaaagtcaaatataaggtgggaatgggatggaagggaggagatcaatacaacttatatttttgcagtttctactggaagaaaaaagttttcaatacctagaccaacttgttgaatttttaaaacttatgcactataaatgcaactttctctactgctttctcagtgcctttaggaagctttcaaatttttttgtactgtggtttgtattaaatttgcaatattgatgtaaaatacatgacatgctagtacatgtttaacaaaaatttaaa

SEQ ID NO: 15 - DNA, 429 bp, Homo sapiens
ttttttttttatttttatcaacccacatctttattcttccctcactcacctccattccccatgaaaaaaaggaacttttggcccaaagtgcatcaaaattatgattatgagaagtggcaagaaaaagatgtctttcttatagatgttcttttctgaagactctgacagagccaggattcatgttcttctggcctctgacctgcaaaatgctgtaggtgtggccaggtctctaggagatagcacagagaccagagcaagggacatcccacgctagttatctggggatggaaggatgccctaacaggaaatgtaaaggcacacaatgtattcttcttttgggctcctcatggttttcctaatcctctacccctataagatcagatttttggtatcaggatggtggggtgacattttgttttatagtataaa

SEQ ID NO: 16 - DNA, 392 bp, Homo sapiens
gagacggagtctcgctgtgtctcccaggctggagtgcagtggcagagtgagactcctcaaaaaaaaaaaaaaagttcttgaataaagaaggattattcttccaagaatccaacgtagctgagtaccttgtaacaagtgcagtccacttactgttatactcaaagacaagtttgtatattgattggttctttcaaattcttcacctcagtttcttcttgagtacttgtagaaagaatgatgatactgatggctattttgatttcttttttacgttcttttctcgtttcatttctggaaatatttagtaattaaatgtattatatgttaaagtctgttaacttatactgagctatgttaagaaattatttccaatgtgtttgtaccaacaggtt

SEQ ID NO: 17 - DNA, 122 bp, Homo sapiens
caacaaaacaggaatggattttgtgtgggtagaacagcactgtggtcgaatcaggaaatctgggcccacctttatgatgtagatgctggaatgaacaagccacttggcccccaaacccagcc

SEQ ID NO: 18 - DNA, 2257 bp, Homo sapiens
agacgggcgggcgcacagccggcgcggaggccccacagccccgccgggacccgaggccaagcgaggggctgccagtgtcccgggacccaccgcgtccgccccagccccgggtccccgcgcccaccccatggcgacggacgcggcgctacgccggcttctgaggctgcaccgcacggagatcgcggtggccgtggacagcgccttcccactgctgcacgcgctggctgaccacgacgtggtccccgaggacaagtttcaggagacgcttcatctgaaggaaaaggagggctgcccccaggccttccacgccctcctgtcctggctgctgacccaggactccacagccatcctggacttctggagggtgctgttcaaggactacaacctggagcgctatggccggctgcagcccatcctggacagcttccccaaagatgtggacctcagccagccccggaaggggaggaagcccccggccgtccccaaggctttggtaccgccacccagactccccaccaagaggaaggcctcagaagaggctcgagctgccgcgccagcagccctgactccaaggggcaccgccagcccaggctctcaactgaaggccaagccccccaagaagccggagagcagcgcagagcagcagcgccttccactcgggaacgggattcagaccatgtcagcttcagtccagagagctgtggccatgtcctccggggacgtcccgggagcccgaggggccgtggaggggatcctcatccagcaggtgtttgagtcaggcggctccaagaagtgcatccaggttggcggggagttctacactcccagcaagttcgaagactccggcagtgggaagaacaaggcccgcagcagcagtggcccgaagcctctggttcgagccaagggagcccagggcgctgcccccggtggaggtgaggctaggctgggccagcagggcagcgttcccgcccctctggccctccccagtgacccccagctccaccagaagaatgaggacgagtgtgccgtgtgtcgggacggcggggagctcatctgctgtgacggctgccctcgggccttccacctggcctgcctgtcccctccgctccgggagatccccagtgggacctggaggtgctccagctgcctgcaggcaacagtccaggaggtgcagccccgggcagaggagccccggccccaggagccacccgtggagaccccgctccccccggggcttaggtcggcgggagaggaggtaagaggtccacctggggaacccctagccggcatggacacgactcttgtctacaagcacctgccggctccgccttctgcagccccgctgccagggctggactcctcggccctgcaccccctactgtgtgtgggtcctgagggtcagcagaacctggctcctggtgcgcgttgcggggtgtgcggagatggtacggacgtgctgcggtgtactcactgcgccgctgccttccactggcgctgccacttcccagccggcacctcccggcccgggacgggcctgcgctgcagatcctgctcaggagacgtgaccccagcccctgtggagggggtgctggcccccagccccgcccgcctggcccctgggcctgccaaggatgacactgccagtcacgagcccgctctgcacagggatgacctggagtcccttctgagcgagcacaccttcgatggcatcctgcagtgggccatccagagcatggcccgtccggcggcccccttcccctcctgaccccagatggccgggacatgcagctctgatgagagagtgctgagaaggacacctccttcctcagtcctggaagccggccggctgggatcaagaaggggacagcgccacctcttgtcagtgctcggctgtaaacagctctgtgtttctggggacaccagccatcatgtgcctggaaattaaaccctgccccacttctctactctggaagtccccgggagcctctccttgcctggtgacctactaaaaatataaaaattagctgggtgtggtggtgggtgcctgtaatcccagctacatgggagcctgaggcatgagaatcacttgaactcgggaggtggaggttgcagtgagctgagattgcgccactgcactccagtctggtcggcaagagtgagactccgtctcaaaaacaaaacaaaacaaaaaaaccacataacataaatttatcatctcgaccacttttcagttcagtggcattcacatctcatgtaa

SEQ ID NO: 19 - DNA, 2759 bp, Homo sapiens
agtttcagccgcgacagcaagaacggcagagccggcgaccgcggcggcggcgacggcggaggcaggagcagcctgggcgggtcgcagggtctccgcgggcgcaggaaggcgagcagagcacaaatgaggatgtcccaatttctgccttttgggttttaccagctgctgtaggttttccacactgagtagttgcagtagactggctgccctctgtccaacatgcaatgccacttggtatcattcatggtttgatcccgagaacaatccacctattatataattttcccctcacatgtcattccactgacctcaatcaactgatgtggtgatgaaatgaaacacgttcatggagaagctgagaaaagtgtgcaaagtacacctacaaggagagtttccccatgttttccataatgtggccatccaggatgaggaaggaacaagaatacttgaacatcacagagaccaaaccatttccatacgtcaaaaccagagagcctgggatcaaagttatacttggaaaagggctgtaagaaatgaaaaaccacctagcagcatctgtacttcccttaaaatccaacctccactggcttcctctgaatccatcagggtcttaaatatttaaagaaaggctaaattcagaaggtatttaagaaatgggcaggccctgctgggtcctgatgagtccagtgcctccgggagctgcccaatgggccagcagtctctgtggaatccaggtgacccttcccactagggattggaccaacacttcacgcagctttcttccgaggaccccaacgaaggagtgatttgaacccaagtcaaaagggtgccctacaaggctagtttgaacagaacccctaccctgatgtgactcccagagaacaactgaccagagaaattggcactccagaatttagaatacagatgtggtttcgaaaccagagaacacaacacctcagacagagtctactggggtctggattggggtcgatttcctggaattgctatcagggaagaactggctgcacaaacaggcctctcagagtccagaactcagatatggtttcataaccaaagagctcggcactgtggccagagttgtagacttgtgaattccctggcagaaggccccaagtcggagacctcacatgactgtgtgacaaggcaaggcaacttgtgcatggcccctagcagtggggtcacttccctccctccagttctttcagcaacaaccagctcttcttccacctcacacatgctttggttcttgggttccccctgggctcggagtgagccaggcaccaagggtcatgatgctccacccaccaggctgtgctgggaggagagatctctccacctcttctgacacttaggagtcacatgtcaacaggcccagctctaggaggggcgctcttacatcctctggctcctttccagcccccacaccaaggaagatgccaggatgacaaggacagagacacatggcctggcagtactgccctgtaaggactctacacagccccaacctggcaatcctaagcaccagttgcagggaactggtcagcaagacacatctcaccttatgcagtggtggcacaaggggccccaaggagtgatgtcaaatggccagctggagcaggggcacttcagcagcccacagagcctgcacacacctggacatccctgtggcagtagcgggcaccaccagctgcagagccatctcagccactcgagcaaccgcacagctctctgcaaaacccacccttttaggtcaatgcctgtcaattgtatagtttcagaaaaagacacaagcctgcctgaatccaagtccacaggaaaaggtccctctaccacttgaaccacctctcagtgaggaagaatttgatgctctgcctgatgtgatgcagacctcaccagggtgtcagctttgggaggagcaaggcctccttctcacctccaccatctaggccactttcctggacacagaatcaatgtgataccaagaaggacaaacaatgcacacactgtgtttggcagcaagaccaatgcgagaaaaagcaccaaacacttagaaacccaaagggagcattttgactcagtcttgtgggaggcgcttgacttctcctctcacttaatggcctatatgattgttgcaaagctctctactgcccctgtaaggcatcatgggcaccaagccatgaatgccttcactgcatcctgaagaaccaaagcatttttatagcaaacatcacctactccctgcaatcctcaccgcttgggcagtctggactatacaggaactggaaccaaaccaaaccagggcgaggacactaggtctaagggggacagctccacacttctttccttctggcaagttcagaagtcacacctgaaagcaggtagatgtctagaatatagagggatgctgtattttcttgttctgtgagttgataacaaggagtttttaatctcagctctgagagttgcaaatgggaattggaagtcacttcactacccacctcttgggaactgattccacaagtttatatccataatcccgagtaggcttcatgaccagttttccctctgaacattgaaatgtagagaaaatgacagaagttagaatagcaactcccttagatcattgaacaaagcatatgaatgttactcttctcacattgttagcatttctgtatgttaacctgtacttctacccatcaagctgccctttttattataaataaatgtcaagtttaaat

SEQ ID NO: 20 - DNA, 2918 bp, Homo sapiens
gggtgtgtctgcggaacctccacctgagctgtagagtgtttccctcgacccactagtctgggttccacagggtctgagctcctcagaggtgggagctgcggccgagggaagggtgcatgtgcgcggcgacaatcaggcctcttccccaggcagcttgtgagcccctctccctctccgccctcgcccaggctgctccgatcttcgtttccttgcctaggctcatacacccaggctttatttagggccaaagtatccgtcataacctcggttttctgtctcgcaagtatcttgccgctcaatttgtgaccctgaagctttagtgagtcgctctgtgctcactatttctggtcttttcagaggatggcttcactttcaatggaattgcccgagtaactgccctgtgttgtcacgtaaacaagtccttttaaactgagtctgtagttgtcctgtgttgagtgttttcttatatcaaaaactttcctgaccaagaacaaaaaaggagctcaagtaaaatcacccatttgactagaccccaactggagagaacctttgcctgagctgtctaagctcgggatggaagcagtctctagggtcttcccagccttggctggccaggctccagaagaacaaggggagattatcaaagtaaaggttaaagaagaagaccacacttgggatcaggaatcagccctacgtaggaatttgtcttataccagggaactctctcgtcagcgcttcaggcagttctgctatcaggagacacctgggcccagggaggctctgagtcaactgcgggaactttgccgtcagtggctgaacccagagatacataccaaggagcagatcctggaattgttggtgctggagcagttcctgaccatcctgcctgaggagctccagtcttgggtgcgggagcataatcctgagagtggagaagaggtggtgactttgctggaagatttggagagggagcttgatgaacctagacagcaggtctcacagggcacatatgggcaggaagtttctatggaagaaatgatccctctggattctgcaaaggagtctttaggcacccagcttcagtctatggaagatagaatggaatgtgaatctccagagccacacccacttcaagataatgggtcatttttgtggttttccatgatgtctcaaagcatgggtggtgataacctcagtagcttagatactaatgaagcagaaattgaaccagaaaacatgagagaaaagttcttcagaagcttagcaaggttactggaaaacaaaagtaataatactaagatattttctaaagcaaagtactgtcagttgataaaggaagtgaaagaagctaaagctaaggcgaaaaaggaatcagttgactaccgtcgcttggctagatttgatgttatccttgtacaaggaaatgagaagctaattgaggctgtaaatggggaaacagataaaatacggtattacttacacagtgaggacttatttgacattctgcataatacacatctcagcattggacatggtggacgtactcgcatggagaaagagttacaagcgaaatacaagaacatcacaaaagaagttataatgctgtatctgaccctctgtaaaccatgccaacagaaaaattcaaaactcaagaaggttctaacatcaaaatcaattaaggaagttagttcaagatgccaagtagatcttatagacatgcagttgaatcctgatggggagtacagatttattttgcattatcaagatctctgtacaaagttaacttttttacggtcattaaagtctaaaaggcctacggaagttgcacatgctcttttagatatatttacaattattggagcacccagtgtcctacaatctgacaatgggagggaattttcaagccaggttgtcagtgaactcagtaatatttggccagaattgaaaattgtccatgggaagtctcagacctgccaaagccagagttctgcagaacaaactgaggatatccgaaagaggattttctcctggatgcaaactaacaactcatcacactggactgaatttttgtggttcattcagatgtcccaaaatcagccctatcacagaagcatgcaacagactccatgtgaaagtgcatttagctctgaagctaaactgggcttgtcccattctcagctaactgaagaacttgttgccagcttgcatacagaaaatgaattagatcaggctgacaaagagttagaaaatactttaagagcccagtatgaagaaaacattgagactggaacagacagtagtgatattgaagagaatctttctgtcactcctaaggtggctgaaaaaagccctcctgagagcagactaagatttttatcctgtgtagtttgtgaaaaagaatgcacaggtgttaatagttgtatatcatgtgatggaaatatccatgcaatttgtggagtgccctctcaacatgggactgagggctgtggtcggcaaataacttgtagcctttgctatgaaaccagcacaatgaaaaggaaacatgatgagattcaaagaagtttgcctgttaaaccttccaaaatgctaaagccatcagggacaccattttcaccagacaaagtaggagattggatggcgaaacaagcttcactggacttttttgtcaagaaaagacatgccttttctgaacacagtagtagtaataaaagaaatgttaacaatagaagttatcctgaagaagggaaaaccaaaagagttcatgctagtttcactcggaaatatgatccttcatatattgagtttggttttgtagctgtaattgatggtgaagtactaaaaccacagtgtattatttgtggagatgtactggctaatgaagcaatgaaaccatcaaaacttaagcgacatttatattc

SEQ ID NO: 21 - DNA, 1506 bp, Homo sapiens
aaagggacacggtgtccgagtctttaggtctgcgcgggagccgaggctgcgcacctgggctgaacctccacagtcctctacactcttccaggagcagcagaaaatgaacatgtctcaggcatcagtgtcattccaggacgtgactgtggaattcacccgggaggagtggcagcacctgggccctgtcgagaggacgctgtacagagatgtgatgctggagaactacagccacctcatctcagtgggatattgcattactaaacccaaggtgatctccaagttggagaaaggagaagagccatggtctttagaagatgaattcctgaaccagaggtacccaggatattttaaagttgatcacatcaaagggatccgggaaaaacaagaaaaacctctgtggcaagaaatattcatcagtgatgctgacaaaacattgagtaaagaaggacagaaagttttagaaaaaccatttaatctggaaatagctccagagctttcagaaaaaatatcctgtaaatgtgactcacacagaatgaatttgccagttgcttctcaattaattataagtgaaagaaaatattcaagaaagaagactgaatacatgaatgtgtgtgagaaactgcagcttgatattaagcatgagaaagctcatgctgaagagaaatcttatgaacatggtgaaaatgctaaagctttcagttataagaaagatcagcattggaaatttcaaactttggaggaatcttttgaatgtgatggatctggacaaggtttatatgataagacaatttgtattacacctcagagttttctaacaggagaaaagtcctgtaaggatgatgaatttagaaaaaactttgataaaatcactttatttaaccacatgagaactgacacaagggggaaatgctctgatcttaatgaatatgggacatcctgtgacaaaaccaccgctgttgaatacaataaagttcacatggctatgacacactatgagtgtaatgaaagggggattaatttcagtaggaagtcacccctcactcaatctcagagaactattacaggatggagtgcttttgaaagcaataaatgtgaagaaaattttagccagagctcagcccatatagtacatcagaaaacacaagctggagataaatttggtgaacataatgaatgtacagatgccctctaccagaaattagactttacagcacatcagagaattcacacagaagataaattctacctttctgatgaacatgggaaatgcagaaaatccttttaccggaaagcacacctcattcagcatcagaggccccactcaggagagaaaacttaccaatatgaggaatgtgcaaaatccttttgttcaagttcacatcctattcagcatcctggaacttatgtgggattcaaactttatgaatgtaatgaatgtgggaaagctttctgtcagaattcaaacctcagtaaacatctgagaattcacaaaaaaaaaaaaaaaag

SEQ ID NO: 22 - DNA, 2084 bp, Homo sapiens
actcgcccttccggctcggcctttagttagtgaccagctcctcggcgttctgcagagcgtgggtttcagcgagttctacgtgccaggtccgcccggtgccggcttcctcgctgcccctggcggctcgtcagcccccactacccctgaacttggtcccaatggcggcccgcccctccttcacccggaccgtgggcatctgggcctcgccgaagccgtcaaggtggctgctcgggcttctagagcccgtgtccagccctttgccaccgaggcctgatcctcttttctgccctaaagaacttgccctgacagcctctggctcccgctcttgaggatcttgcttgtccaaacccagaagacagtgcatgaagccaggggacatccgccatgctccaaacaacttggcctcaggagtcagtgacctttgaggatgtggctgtttacttcacccagaatcaatgggccagcctcgaccctgcgcagagggccctgtacggggaggtgatgctggagaattatgcaaatgtggcttctctggtagcgtttccattccccaaacctgctctgatctcccacctggagagaggggaagcaccatggggcccagatccctgggacaccgagattctgagaggcatcagtcaaggtggtgagtcctggatcaaaaatgaagggctagttataaagcaggaagcctctgaagaaacagagttgcacagaatgccagtaggaggacttctcaggaacgtttctcagcactttgattttaaaaggaaggcactgaagcagactttcaatctaaatccaaatctgatacttcgaggtggatcagttgaggtcaggagtttgagaccagcctgaccaacatggagaaaccctatctctactaaaaatacaaaaattagctggatgtggtggtgtgtgcctgtaatcccagctacttgggaggctgaggcaggagaattgcttgaatccagaggcagaggttgcagtgagctgaggttgcaccactgtgcttcagcctgggtaacagagtgagactgtctcaaaaaaaaaaaaaatttagttccaaatattactgctcgttgataatgtgtctggtcacccaagagttctgatggagatgtacaaagagattaatgtttttatgtctgctaaacaacatccattctgcaggatccattactccatgggtcaaggagtaattttgactttcaagtattatttaaggaatacattttgtaaggctgtggctgccatagtggttgttctgtacaaagtaacttgaaaaccttctggaaaggattcatcattctagatgccattaaggacatttgtgattcatgggagaaggtcaaaatatcaacattaacaggagttcagaagacattgacctcagccctgatggatgatcttgaggggttcaagacttcagtggacgaagtaactgcagatgtggtggaaatagcaagataactagacttagaagtggaacctgcatatgtgactgaattgctgcaatctcatgataaaacgtgaacaaatgaggagttgcttctaatataagagccacaaaagtggtttcttgagatggaaactactcctggtgaagatcctgtgaccattgttgaaatgacaacaaaggacttagaatattacataaacttagttgataaaacagcagcagagtttgagaggattgacttcaattttgaagaatgttccactgtgggtaaaaggctatccaacagcaacacatgctacagataaatctttcggaaaggaagagtcagttgatgttgcagccttccttgttgtctcatttaaagaaatctctagagccacactaaccttcagcaaccaccacaccgatcattcagcagccatcaacagtgaggcaagactgtcttccagcaacaaagactcactgaagacttagattatcgttagcatcttttagcaataaaatatttttaaattaaagtatgtacattgtcagatataatgccattgcaaacttaatagactataatatagattaaacataacttttataggtcctggaaaaaaaaaaaaaaaaaaaaaaa

SEQ ID NO: 23 - DNA, 1987 bp, Homo sapiens
acaagatggccgctgcgcgcccagaggcccagagtcggagctcaccgactccggagtcgcgatcccaggagccactggacctggtcctggtgcctgatgactgccggcctggcacacccccgagtgacctcatcgagatccaggtggtgaaggtgacggacaccacgctggtccctgagcccccggagccaggttctttccactgtgccttgtgccctgctgccttccggctggtttccgagctgctgttccacgaacatggccacttggctggggccgagggaggcgggcagggtggggacccgagccggtgccacgtgtgcggccacagctgcccgggccccgccagcctgcgcgcgcactacagcttgcacacgggggagcggccctaccgctgcgcgctctgcccccgcgccttcaaggccttggcgcccctgctccggcaccagcaccggcacggggtggagccgggcacctctcggaggcctccggacacagcggccgttgcagaacagaggcccggggtggccccggagagggcggaggtggtgatggcggcggcggcggcgggcgcagcggtggggaagccttttgcctgcaggttctgcgccaagcccttccgccgctcctcagacatgcgagaccacgagcgcgtgcacactggcgagcggccataccattgcggcatctgcggcaagggcttcacccagtcctcggtgcttagcggccacgcccgcatccacactggcgagcgcccgttccgctgcacgctctgcgaccgcaccttcaacaactcctccaacttccgcaagcaccagcgcacccacttccacgggccggggccggggctgggagactctggaggccagctgggctcgtcggcggctgaggggtcggggagcgggtgtggggtaggggaccctgcggaggaggggcggggggagaccgcgaaggtgaaggtggaggccgaccagtaggctgcagaccagggacatgggttagttaaggcggaggtacgaggccgacccggggagggggacggggtggggaaacggaggcaggggacagaagaggggagattgggggagagatgacagctgcagggatggttgtgagccgctagtgatggagagcagagggagagggccaggctccagactcccacacgcccacacagcacctctgccaggcctaggagaggacaggtgcagctcttgcagctctgcgggtgtgcggccaaaggcaaggcccacgggctggatgtcacttccccgactgtctcttggttggcttgtccttgtgcaagacccagcctgtcacgacagagcctgggcacttcagaggaggagccaggatcgaatggaaggggggaattggggtccaccatagtcttctgctctggtcctccacgggtggaccaggatggtgtctcttgcctacctcactgcattgcactggacctgggatgcctatccaccctctggcagaagacactcaccaggttatctgtgaagagactctgggatcccatcacctcaaagccagagggtccccaagtcaccgctgagagcacttgagcctcaaggatgtaagcctgaccataggaccttgactccaacagcggcaacccccacccccattgtggtccgtccttaacccatccactcttcttcggaggcaactgagaacacataaagcaagcagctacctagcatccccctcctaaagctttagactcagagcccagggtcccccacaagcctcaaggtagcctcaggtttctctaatttcctccactcccagttcgaagcaaacagcttactgcctagtccccgccaatcccaagggcgggctggctgatggcagcatggtgggctggcctgggtgtggagtgaaagagtcactgtggtgggggcgagaggaggacttgggagctggaggtgtgacaccttcagttctgttcctattaaaggaccttctgaagggc

SEQ ID NO: 24 - DNA, 2434 bp, Homo sapiens
gcaggcgcagtggtccccgcaggcttgcgcgcgcactcgctgcgggacaagcttctggaagctctttgcggtggcgttggtgctgtttgcggatgctgatgcagtttctgcaggactgtaaactggattcctggaacctttgatattcctggctgtgtatagtgcctgttggtggactgtactgatactcaactagagtgtgaagggactggattcctgcccctgagacacaatgcaagctgtagtgcccttgaacaagatgacagccatctcaccagaacctcaaactctggcctcgactgaacaaaatgaggtcccaagagtggttacttctggggaacaagaagctattttaagaggaaatgctgctgatgcagagtctttcagacagaggtttaggtggttttgttactcagaagtagctggacccaggaaagctctgagtcaactctgggagctctgcaatcagtggctgagaccagacattcacacgaaagaacagattttagagcttctggtgtttgagcagttcctgaccattttgcctggggagatcaggatttgggtaaagtcacaacatcctgagagtagtgaggaagtggtgaccctaatagaagatttgacccagatgcttgaagaaaaagatccagtctctcaagattctactgtttcccaagaggagaactcaaaagaggataaaatggtcactgtttgtcccaatactgagtcctgtgaatctataacattgaaggatgtagctgtgaacttttcaagaggagagtggaagaagctggagccttttcaaaaggagctatataaggaagtgctactggaaaacctcaggaacctagaatttctggactttccagtttcaaaattagagttgatttcccagctaaagtgggttgaattgccatggctgctggaagaagtctcaaaaagctcccgactagacatacatggagcagtaaaaaagatgcagatgttctctgaggctgaataagaccatgctctgccttcttgtttcaactgttacacagagatgaccagaggatggggccactgcagtgcagttcaagaggctctggttcggggaagagctggatggagtatgaatcccaactctgggggtattagctagtggagtggccataggcaagttacttaacacttctgaacctccttttgtctttcataaaataaaagctactaggatgagttgttttaaggatttcagattatagtctatgtgagatatgtgcaaacatgtacatatttcccctagaagcaatggttttcagccttggtggtgaccttatagaacataaatattgtgaataatgaaaatccactgaatctaataagggacttgtatcggtaagatgtaaagaactcttggccaggtgtggtggctcatgcctataatcccagcactttgggaggccaaggcaggtggatcacctgaggtcaggagttcgagaccaacctggccaacatgacgaaactccgtctctatttaaaatacaaaaattagctgggcatggtggtgcatgcctgtaatcccagctactcgggaggctgaggcaggagaatcacttgaactcgggaggtggaggttgcagtgagccaagatcgcgccactgcactccagcctggatgacagagcaaaaaactgtctcaaaaaaaaaaaaaatcttacaacctcacaaataacctagttcaaaaatgggcaaagattttgaacagatatttctccaaagaagatatacaaatggcaaatacatacgttgaaagatccttaatattgttagccatagggaaatgcaagtcaaactcaaatcagaatgaaatatcacttcaaacctactaggatggttataataaaaaagacagacaatagcacgtgttggtgagtatgtagagaagttggaaccctcatacactgcttgtgggaatgtaaagtactgtagccactttgcaaaacagtttgacagctcctcaaaatgttaaacatgaaattatcatatgacccagcaattctactcataggtatatacttaaaagaaatgaaaaatccacacaaaaacctctgcatgaatgttcatagtaacattatacttcatagccagaaagtataagctaatacccatcaggctgggtgtggtggctcacgcctgtaatcctagcactttgggaggccgagttgggaggtttgcttgagcccaggagttccagaccagcctgggcaacatggcgaaaccccatctctactaaaaatataaaaattagttgcgtgtggtggcacatccctatagtcccagctacttgggaggctgaggtggaaggactgcttgagcgagggaggtcgaggctgcagtgagccacgatcacaccactgcactccagcctaggtgacagagtgagatcctgtctc

SEQ ID NO: 25 - DNA, 2675 bp, Homo sapiens
cgttcttacttctcctaaaggcccaggctgtgtggccccgtgtcctgcaggtattgggagatccatagctaagacaccgggacctcctggaagccaaaaatgtaatgtgttctcattttgcccaagacctttggccagagcagagcatgaaagattctttccaaaaagtggtactgagaagatatgaaaaatgtgaacatgacaatttacagttaaaaaaaggatgtataagtgtggatgagtgtaaggtgcacaaagaaggttataatgaacttaaccaatgtttgacaactaccccaagaaaaatatgtcaatgtgataaatatgtgaaagtccttcatcaatttccaaattcaaacggacaaaagagaggacatactgggaaaaaacctttcaaatatatagaatgcggcaaagcttttaagcagttctcaactcttactacacataagaaaattcatactggagggaaaccctacaaatgtgaagaatgtggcaaagcctttaaccactcttgtagccttactagacataagaaaattcatactggagagaaaccctacaaatgtgaagaatgtggcaaagcctttaagcactcctccactcttactacacataagagaaatcatactggagagaaaccctacaagtgtgataaatgtggcaaagcctttatgtcatcctcaacccttagtaaacatgagataattcatacggaaaagaaaccctacaaatgtgaagaatgtggcaaagccttcaaccggtcctcaacccttactacacataagataattcatactggagaaaaaccctacaaatgtgaagaatgtgacaaagcctttaagtactcctatacccttactacacataaaagaattcatactgaagacaaaccctacaaatgtgaagaatgtggcaaagcctttaagtactcctctacccttactacacataagagaattcatactggagagaaaccctacaaatgtgaagaatgtggcaaagccttcaagcggtcttcagaccttactacgcataagataattcatactggagagaaaccctacaaatgtgaagaatgtggcaaagcttttaagtactcctctaaccttactacacacaagaaaattcatactggagagagaccctacaaatgtgaagaatgtggcaaagccttcaaccagtcctcaatccttactacacataagagaattcatactggagagaaattctacaaatgtgaagaatgtggcaaagccttcaagcggtcctcacaccttactacacataagataattcatactggagagaaattctacaaatgtgaagaatgtgacaaagcttttaagcatttctctaaccttactacacataagaaaattcatactggaaaaaaaccctacagatgtgaagaatgtggcaaagcctttaagcactcctctaaacttactacacataagagatttcatactggagagaaaccctacagatgtgaataatgtggtaaagcttttcacctatcctcacaccttactgcacataagataattcatactggagagaaaccgtgtgaatgtgatgaatggggaaaatcttttaaccagccctcaatttctaactatgagaattgatatgaaatataaaccctacaaatgtaaagaatgtgacagattttttaaggaacttctcaacctttattacacataattcatactggaaagaaaccctacaagtgtgaagaatgtggcaaagcatataacaagttctgtctttttttttttttttttgagatggagtttcaactcttgtcacccaggctggtgtgcaatagcacaatctcggctcactgcaacctctgccttctgggttcaatccattctcctgcctcaacctcccaagtaagggggattacaggtgcccacccccatgcccagctaacttttgtatttttagtagagacaaggttacaccatgtttgtcaggttggtatccaacccctgacctcacatgatccacccacctcagcctcctaaagtgttgcaattacaggcatgagccaccatgcctggccacaagttcttactattaagagacatggtgataattcattctgaagaggaactctacaaacctgaaagatgtgacagtgcttttttcaacacttccatcctttctatacataaaaaatttatactagtgtgaaaccctagaaatatataaaatgtgaaacagcctttatatggttgccacatttgatagtaagataattcatactggcaaaattcctacaagcatgaagaatgtggcaaaacctttaatcaatgtgtacatcttattttgcaggaaagctattatccctgagaaaaattgtacaaatataaagaatatggaaaacccattaatgcctactcacatcttactcaacataagaaggttcatagttaatgaaagcattaaaagtgcaattactgtcaaaaaatctttcagaaaatataagcctttaaagtgaagaagagtatttattctgaagacaaccattacaaatatacaggaggtttattacacacattttgtactagaggaaaatcctgaagcagttgctcaagctttgctcaacatcagagaacttatattggagaagagtcctgcaaatgtaatgaatttggaaacacttt

SEQ ID NO: 26 - DNA, 2820 bp, Homo sapiens
gcttttacgcagtgttttgaggtgcaggactgcaatgcgcgcacttccggaccccagactcttcctacggcgactgacacctcagacacgcgttgtggggggcggcgctctggctccggggctgtgcccagcgcgagcgtggccggcacccacttgctgcagagccggcactgcactggggtccttgggggcgactcctccagacgtctctgcgggttgtcgggtgctgccgagttgggttgggggacgctacaggtagtgggtccggagcagcggctggcccctcatctcactgcccttcctcggaccccaccgtcctctggaagcttgtgcagggcacctgccactgtgaccacctggacgcagatacctgctttcccacaacagcaaggaagaaccatggcccaggggtcactgtcattcggggacgtggctgtgggcttcacccggaaagagtggcagcagctggacctggagcagaggaccctgtaccaggatgtgatgctggagaactacagccacctgctctctgtgggctgaactgtctgcttgcttggaaggcccagctggctcagcacaaatcctttaaccgtttctccccaagagggtgtcaagtcagcaaaccagctgtgatctccagtttggagcaggggaaggagccatggatggaggaggaagagataaggacgtggagcttcccagaagaagtttggcaagttgctacccagccagatagccaacagcaacacgaagaccaacatttgagccatacgtttctagacaagaaagactggaccggaaatgagcttcatgaatgtaacgaacttggaaaaaaactccatcagaacccaaacctccttccatcaaaacagcaggtccgcacacgtgacttgtgcagaaagagtttgatgtgtaacctggacttcactcctaacgcctacctggcgaggaggagatttcagtgcgacggccacggaaacttcttctctgttcgaaacttgaaactccaccttcaggagcgaatccacgcggaggtcaccagtgtggaagtgctttaagctgtgacgagggagttcctgcagctcagggagccagtagtgagaaaccccacgaatgcacgaagtgtgggaaagccttgtgctgcagatcggacctcagggtacatcacggggtccacgcgggggagaagtcctctgcgtgcagtgaacgggggagtggtttcagggagaagctttgccctgacaaacagggaacttacacaaaggagaaacccgctagagacagcagaagtggtaaaacgatcttccggaagacacgcctgtgtgtcccgggcacagttcacgccggagcgaagccttacaagtgttgggagtgtgagaaaacctcccacaagtcgcgcctcatcgagcaccttcgctcccacacgggggagaagccctgcggctgcagggaatgcggaaaggcctttttccagaagtcacacctcatcctgcgtcagaggactcacacgggggagaagccctgcgactgcgcggagcgcgtgagccactttagccaggatatacttaattataaagacaactgtggatatgaagtttttttttcttttgagatgaagttttactcttgttgcccaggctatgggaagaaatgaaatcattacgactaacagatctaaaaagcgtgagaacatcccagagggacgcaggggtgtgttccaagtgtgctacagacagataatttttatttttgtgttgcactggtgaacagaacataattgtgaatctgtagacatacataccataatatatagaagatctatggatactttctatgctaaattatacccttctgtgtttgtgatatagaactggaataagatgaatatattattaaagcagagaggcccactgcagcagcacataccatttcttctgtttgtcatcacgtattacagagcccctgaacttggaagctaacaatttcatgacatctgataactcacagtcaactagtttataagttatatttttggctgggctcggtcgctcacacctgtaaacccaacactttgggaggctgaggcgggcagatcacatgaggtcaggagttcgagaccagcctggccaacacggtgaaaccccgtcactgaaaaatataaaaattggctgagcatgctggtgattttctgtaatcccagtaatcccagctacttgggaggctcaggcacgagaattgcttgagcccggcaggcagaggttgcagtgagctgagattgtgccacttcattccagcctgggcgacagagcaagactctgtctcaaaacaagctatatttctatattaggactccattttctggcaatacggtggaccgtctaaagtgaaaatcaccggggcagtggctcgtgcctgtgatctcagcacttgggaaagtcaaggtggacaggtcacttgaccccaggagttcaagaccagcctgggcaacacgaaagctgacttcatgagaccgaggatctcgttcgttgatcgatgctacatattcagcatgttagataatgaggttggtgagattgatgaaatcccgcccaccagggccgacccacaaagagccactttatgaagaacatgctcctgaactccactccacaaccagcttttgaaaagaaaaatctgaaaaaatttgacctcagttaaactggtccaaatgcctgagcataaccaaaatctttcctcattcactcttcacgtggaccgtgtttaatttggttgctggtgatcatatttgttttagtaaaggctgtcactctatcttgggcg

SEQ ID NO: 27 - DNA, 2524 bp, Homo sapiens
gtcaatatggctgcgttgggatctgttcaccttcaggctgagtcgagactgaggtgaaaaagcggaaaaacgcgagaaaaggtttccccgttgtacagaggctagagtgaggctcggctgaatcggttgcaggcgttggtgcctctgtcagcgtccaggtcactgccgctcccgccccgctcttccctggctgtgctggcggaggctgcgccgatgaacctgactgaggattatatggtttttgaggacgtggccatacatttctcccaggaggagtggggaattcttaatgacgttcagagacacctgcacagcgatgtgatgctggagaactttgcacttttgtcctcagtaggttgttggcatggagccaaggatgaggaggcaccttccaagcaatgtgtttctgtaggagtgtcacaggtcacaactttaaagccagctttgtccacccagaaggcccagccctgtgagacatgtagctcacttctgaaggacactctacacctggctgagcatgacggaacacaccccaagcgtacagccaagctttacctgcaccaaaaggagcatcttagagagaagctcaccagaagtgatgaagggaggccttcgtttgtgaatgacagtgttcacctggcaaagaggaacctcacatgcatgcagggtggcaaggattttactggtgattcagatcttcaacaacaggctcttcacagtgggtggaagccacacagggacactcatggtgtggaggcctttcaaagtggacagaataattacagctgcacccaatgtgggaaagacttttgccaccaacatacactgtttgagcaccagaaaatccacacagaggaaaggccttatgagtgcagtgaatgtggcaaattgtttaggtacaactccgaccttattaaacatcagcgaaatcatactggagaaaggccttataagtgtagtgaatgtggaaaagccttcagcctcaaatacaatgttgttcaacaccagaaaattcacactggagaaaggccttatgagtgcagtgaatgtgggaaagcttttcttagaaagtctcacctacttcagcaccagaggattcacaccaggccaaggccttatgtgtgtagtgaatgtgggaaggccttccttacacaggctcaccttgttggtcaccagaaaattcatactggagaacggccttatggatgcaatgaatgtgggaaatactttatgtacagttcagcactcattagacatcagaaagttcacactggagaaaggcctttttattgctgtgaatgtgggaaattctttatggacagctgcacactcattattcaccagagagttcatactggagaaaaaccttatgaatgcaacgaatgtgggaaattctttagataccgttccacactcattagacatcagaaagttcacactggagaaaagccttatgagtgtagtgaatgtgggaagttctttatggacacttccacactcattattcatcagagagttcatactggagaaaagccttatgaatgcaacaaatgtgggaaattctttaggtattgcttcacactgaatagacattagagagttcactctggagagaggccttatgaatgcagtgaatgtggcaaattctttgtggacagctgtacactgaagagtcatcagagagttcacactggagaaagaccttttgaatgcagcatttgtgggaaatcctttagatgtcgctccacacttgatacacatcagagaattcacactggtgaaaggccttatgagtgtagtgaatgtgggaaattctttaggcacaactcaaatcatattagacatcggagaaatcactttggagaaaggtcttttgagtgcactgagtgtgggagagtttttagccaaaattcccacctcattcggcaccaaaaagttcacactagggaaagaacttacaaatgcagcaaatgtgggaaattttttatggacagctccacactcattagtcatgagagagttcatactggagaaaagccttatgagtgcagtgaatgtgggaaagtctttagatacaactccagcctcattaaacatcggagaattcacactggagagagaccttatcagtgcagtgaatgtggaagagtctttaaccaaaattctcatctcattcagcaccagaaagttcacaccagataaagaatgtatatataaagcagatggggaaagacttcacacagaaatctactctgatttagcactgggacctacgttttaaaaaaagtattcttgtagaatacagataacataaaatctaacatcttaaccatgttaaagtgtatagttcagtaccgttaagtcattcacattgtgcaatgaatatctagaagtcttttcaacttatgaaactaagtctataccttttaaaaccttattcctcactccatccagcctcttgacaagcaccgctctgtatgaattttactagtccgggtacctcatataagaaaacttaagtttt

SEQ ID NO: 28 - DNA, 3588 bp, Homo sapiens
agtgcttgttggggccaggctttgtaacggtctcctgagcagcgagcagaaaatctgttatcgagagagagtgagcacagtgacctgcccctaaaggttcatgcgcatccctcagacccctctttagacgcgccccgcttctccctctgccctctccccttgcccaagccccgaggtgggggcctggtgtgaatgctccggccgaagtgaacctgcacccccgcacccgaaggcctctttccggcttctgggcaaggcggccccggtgagcacggccgtcacacatctctgctttttcccaagaagagcaggaaatggccaaaccccagtcctgcaagctgtacaagaagcatgacaccagcatctgcatctggtgaggactcaggaagcttctactcatggcagaaggcaaagagggaacaggggctagtgacatttgaagatgtagctgtggatttcacccaggaggagtggcagtacctgaacccaccacagaggaccctgtacagagacgtgatgctggagacctacagcaacttggtctttgtggggcagcaggttaccaaaccaaacctcatcctcaagttggaggtagaagaatgcccggcagaaggaaaaatcccattttggaactttccagaagtctgtcaagttgatgaacagattgagaggcaacatcaggatgaccaagataaatgtctgctgatgcaagttggattttctgacaagaaaacaattatcaccaagagtgctcgtgactgtcatgagtttggaaacatacttcatctgagtacaaaccttgttgcttcaatacaaagacccgataaacacgaatcatttggaaataatatggtagataatttagacttatttagtagaagttctgcagaaaataaatatgataatggatgtgcaaaattgttcttccatactgagtatgagaaaacaaatcctggaatgaagccctatggctataaagagtgtgggaaaggtcttaggcgaaagaaaggccttagtctacatcagagaattaaaaatggagagaaaccctttgaatgtactgcatgtaggaaaaccttcagcaagaagtcacacctcattgtacattggagaactcatacgggagagaaaccttttggatgtaccgaatgtggaaaagcttttagccaaaaatctcagctcattatacacttgcgaactcatacaggagagagaccctttgagtgtcctgaatgtggaaaagccttcagagaaaagtcaactgtcatcatacattacaggactcacacaggagaaaaaccttatgaatgtaatgaatgtggaaaagccttcactcagaagtccaacctcattgtccatcagaaaacccacactggagagaaaacctatgaatgcactaaatgtggagaatctttcatacagaagcttgatctaattatacatcatagtacccatacaggaaagaaaccccatgaatgtaatgagtgtaagaaaactttcagtgataagtcaactctcattatacaccagagaactcatacgggagagaaacctcataaatgtactgaatgtgggaagtctttcaatgagaagtcaaccctcattgtgcatcaaagaactcatacaggagagaaaccctatgaatgtgatgtgtgtggaaaaaccttcacgcaaaagtcaaaccttggtgtacatcagagaactcattcaggagagaaaccctttgaatgtaatgaatgtgagaaagccttctctcagaagtcctacctcatgctgcatcagagaggtcatacaggagagaaaccttacgagtgcaatgaatgtgaaaaagcattttcacagaaatcatatctcattatacatcaaagaactcatacagaagaaaaaccctataaatgtaatgaatgtggcaaagccttcagagaaaagtcaaagctcattatacatcagagaattcatacaggagagaaaccttatgaatgtcctgtgtgttggaaagcttttagccagaagtcacagctcataatacatcagagaacgcacacgggagagaaaccctatgcatgcactgagtgtggcaaagccttccgagaaaagtcaacattcactgtacatcaaagaactcatactggagagaaaccctataaatgtacagaatgtgggaaagcctttacccaaaaatcaaaccttattgtacatcagcgaacccatgcaggaaagaaagcccatggaagaggccacactcggaagtcaaagttcatggcacattagagagctaatcagcagtatctattatggacactgaaagaaagttgtgtcaattttactcacattttaaaagtatattttgacttgtggtttaaatatgggagtaaattcagcctttcttcttttcatctcagtcataacccaaaagctacgggagaaaaagcagaagtgtaatctctgtatctgacaaaattaggagacagctgcaaccctaatgagagggctgccacaggcagaggaaatgaagcactggtgcaggagatttcagagtgagagtgctcaaggctgcaggtgcaagacagcactggtaaggactcttagctgaggttcgggatataccccgaggcgcggaaccatagatataacagtggtaacagtgcgtgggcaggtgggaggtaggatgtttcctagaccatttggggtctgaggagaaacaggctggggcctcgagaaggagtcactcagacaagccatatttttagaaagtagtctactgatgggagcaacagttatggcatgctgggggaagagaagggacttttccttgtgaagagccctacagctgcccctatttactgacttgggagaagtaaagtcagaaagaacgaacagctgtggggggaaaaaattctcagttgtcaaaaaaaaaaaaactgatctgcttagaatgtggccctggtttcttttcccacatgaacctccagcaaatagcaagtccaggaaaaactcttctcattcaaagaggaattattcaaaagtaatcaaaaccacaaatgcatttggtttttgggccagcaattccacttctaggaatgtacatactcacacatgtacaaaatgatgaacatacagaagtattcattaatgcagcgtttgtgaaaacaaaagattggaagctgtttaaatgacaccatatcagggttctggttccctaaattgtggtatattcatacagcctactcctgggtagacaacaatgaataaataaggagaacttggaaaccatttatgtagtgatgtgggataaccttcagtttatgttattaggtaggaaaaataaggttgaggacagtgactgccatttgtatataaaaaggagaaaaatggtaagtacataattgtgaattcataagttatctctggaaagagacatgagaacctggtaaccctgattaccttgggaggggaaggggcagtggtggctggggggatggaattgagagggagacaactgtatcctttcatagcttttgaaaatgtgggtgtactatgtactatgtggatgtactaccttttcaaaaataaaacatttaaaaagct

SEQ ID NO: 29 - DNA, 3381 bp, Homo sapiens
gaaaaagcccgcggcgtcttctctgtcacccgcgctcggctccctgctcggtcgggctggaacctgtactggcagccggaggtgtaggtaggaaccggaatacctcggaagccgggaaatgacggagtttcattcttgttgcccaggctggagtgcaatggcgcgatctcagctcaccacaacctctgcctcccacattcaagcgattctcctgcctcagcctcccgagtagctgggattacagtgtggtgtgttgaatattatagtttcaaaatccttcatgtgtgttaggactcaatgatctttgaggatgtggctgtgaactttacccaggaggagtgggctttgctggatccgtcccagaagaaactctacagagatgtgatgtgggaaatcatcaggaacctgatgtctgtaggaataaaatgggaagaccggaacattgaagatcagtacaaaaattccaggagaaatccaagaaatcatatggcagagagactctgtgaatgtaaagatggtcaatgtggagaaactttcagcctgattccagatggtataatgaacaagaacactcttcctggggtaaaaccatgtgaaagcagtgtgtgtggagaaggcaacgtggatcattcatctctgaattgctacatcagagctgacactggacacaaaccgtatgagtgtcaggaacatggagagaagccacataaatgtaagcagtgtgtaaaaaccttcagctgcctccactccttccaaacacatgaaaagcctcacacaggagagaaaccctatgattgtaaggaatgggaaaaaaccttcgattctccccaaaccgttcgaagatacagggtagtgcacagtggagatggaccttataaatgttgaagaatttgtgaccgtggataagttcgtttcctgttatgtgaacttggcagattaatgctaaatcctgtgggacagcatttagcaacacctaaaaaacatgataaagaaatacctgagactgggtaatttataaagaaaagaggttgaattggcccatgattctgcagactgcacaggaagcatggtactggaaggatggcatctgctcagcttctagggaggcctcaggaaactgacaatcatggtggaaggcaaagggggagcagcagttcacacggccagagaaggagcaagagagagcagggcaaggtgccacagacttttaaatgaccggttctcacaagaacttaccatctcaagaacagcaccacagggatagtgctaaaccattcatgaaggaccaccatccagtcacctcccacaaggccccaccttcaatattgggaattacaattcgacatgagatttgggtggagattcaaatccaaaccatgtccttttgcttttttctgttttgtttgtggagtagatttttctccatccctttactttgagcctaagggtgccattgcatgtgagatgggtctcttgaagacagcataccattggatcttgcttttttatccaagtcaccactgtgccttttaattggggcatttagcctgcttacattcaaggactcagtgacctttgaggatgtggctgtgaacttcacccaggaggagtgggctttgctgggtccttcccagaagaatctctacagagatgtgatgtgggaaaccttcaggaacctgatgtctgtagaagtcatatggtagagagagtctgaaggtaaggaagatggtcaatgtgaagagatcttcagccttgttccaaatggtatagtgaagacgacttttactggagtcaaatcatgtgaaagcagtgtgtgtgaagaaggcaatatggatcattcatctcttaattgctgcatcagagctgacactggacacaaatcagatgagtgtcagcaacatagaagccacatacgcagtgtgtgaaaaccttcagctattgccactcctttcaaacacatgaaaggcctcacactggaaagaaactccatgtaagaaatgtggaaaaaccttcatttctgttcaaaccttttgaagatacatggtaatgcacagtgaagatgaaccttataaatgtaagttttgtgggaaggcctttgataatctacatttatatcttacacatgaaagaactcacactggagagaaaccctatgaatgtaataaatgtgggaaagccttcagttgttccagttccattcgaaaacatgcaagaattcacactggagagaaaccctatatatgtaaacaatgtggcaaagcctttagatattccagttctattcgaaatcatgaaaacactcacactggtgaaaaaccctgtgaatgtaagcaatgtgggaaagcctttagttattccagttactttcgaatacatgaaagaattcacactggagagcaggtgtataaatgtaaggaatgtgggaaaacattcacttatcccagtgcctttcataaacataaaagtacccacacttcacagaaactttatgaatgtaaggaatgtgggaaagcatttgattgttttagttcctttcatagtcatgaaggggttcacactggagagaaaccctatgaatgcagaacgtggaaaagccttcagtagttctaagtacttaaaaatacatggaagaactcacactggagagaagtcctatgcagtaaagaatgagggaaagtattttattgtctcagtccccttcaaagacatgaaaggactcacatcagagaaaagttgtatgaatgtaaaaaatgtgataaagccttccattcgtccagtactgttagaaaccatgaaagaagtcacatttaagaaaaacacagtgatgttaggaatatggggaacctttcctttctcttccagtctttggaaggcacagggtatgacacactggtgaccttataactgtaaggagtgtggataagtatttattagtccttgtgtgttttagatacatgaaagaatttactcaaaaggaaactctatgaatgtaaagaatgtggtaaaacctgtgtagtttcagtttctcttgaataaagtcatttcctggtattctcaggggattggttccagcaccccttgagaatatataattttgctcaagtgctttacagaaaagtgtatttgcctataactaggcaatcctgtatactttaaatcatctctagattacttataatacctaatgcattgtaaatgctatgaagacaactgttttattgtatttagggaagtatgacaagaaaaaacatctgtacatattcagtacagacacaaccaccatacggctacctacctagtacacatcatctacaatataacattttctttttaaaaaacagttatggattggtttcattaaatgacctgcaagcgtgtgtt

SEQ ID NO: 30 - DNA, 2479 bp, Homo sapiens
agatcccgcctccacggcgatcaggttagtgtgcgccgcgggtgctgggggctcgagaaccgagcggagctggttgagccttcaaagtcctaaaacgcgcggccgtgggttcggggtttattgattgaattccgccggcgcgggagcctctgcagagagagagcgcgagagatggagatgggcagacggattcatttagagctgcggaacaggacgccctctgatgtgaaagaacttgtcctggacaacagtcggtcgaatgaaggcaaactcgaaggcctcacagatgaatttgaagaactggaattcttaagtacaatcaacgtaggcctcacctcaatcgcaaacttaccaaagttaaacaaacttaagaagcttgaactaagcgataacagagtctcagggggcctggaagtattggcagaaaagtgtccgaacctcacgcatctaaatttaagtggcaacaaaattaaagacctcagcacaatagagccactgaaaaagttagaaaacctcaagagcttagaccttttcaattgcgaggtaaccaacctgaacgactaccgagaaaatgtgttcaagctcctcccgcaactcacatatctcgacggctatgaccgggacgacaaggaggcccctgactcggatgctgagggctacgtggagggcctggatgatgaggaggaggatgaggatgaggaggagtatgatgaagatgctcaggtagtggaagacgaggaggacgaggatgaggaggaggaaggtgaagaggaggacgtgagtggagaggaggaggaggatgaagaaggttataacgatggagaggtagatgacgaggaagatgaagaagagcttggtgaagaagaaaggggtcagaagcgaaaacgagaacctgaagatgagggagaagatgatgactaagtggaataacctattttgaaaaattcctattgtgatttgactgtttttacccatatcccctctcccccccccctccaatcctgccccctgaaacttatttttttctgattgtaacgttgctgtgggaacgagaggggaagagtgtactgggggttgcggggggagggatggcgggtgggggtggaataaaatactatttttactgccactctttatttttttcccctactttttctttgtgtccggtttttgtccctgtaaatgcgatagctaagtacacactaagtgagcatttgttcctgactctcaaagaggatggtttggagttctcttacgtttcctggtatttcccaagtctcttgggttggttggaaggctgtggctggtctcagtttggttactcaatgcccaggaggggctgagcaccagccatatcttttgctttggttcacatgatgatacctgcttttctcaggcctgctagaggcatccaacgccctggtttgtaaatagcaacctaaaggcgtattttggcactggtctggggacattccccatctctcatcccttttcccccttcacagatggtggtgggcttcgctctacaaagaggactctgatgttactcttgagcttatgagccagagagctgaaaaccgcaggcttgttgtgttaagttacaaggaaaatggatttggtaattaaaattagaagaaacacaccttcaaacttcaacttctttaaaagaaaaaaaaaactgtcctatcttgttctgtaaaatattagaacgctttgttttacaaaaaatgatgagagaattcttccacatgtacttctgtgcttagaacatttttacggacctaagcgctggagacgttgctgcatgtcggctgggttttttttttcatacacccgagcacggaaaaactaacgcaaaattgtattttcttacctagtggaaatctgaaatgactgcaaattcctagtgaatgtacaggtttgctttcgtgtccctcttctggttgctttagaagtgacgtgtaatttctgaacccatgtttcatctgtataaaagaacatctgcaccagtttttctcctgcccctcagaagagccaaactttgagttttatgtctgtttgtcattgataaatttcaataaatctttttatacaatttttttggggatggcttctttgagtccaacaggccattgatcttttcaagatgcattccagatgaactgctaggtgagggggaagcttcatttttgttacctgatagaatagcttttcttatgagatatatataatgtgatactatgtttggatatttttggtcttaaagcaagactcagtggtgtatcttcattaaaagcttcctttaaaaaagttacagagttactaaaaaaacaagtacccaaacaatcaagttgggccaaccttggaaccttgttttgaatatctttcattgttttgtttgtcgtattgtaaaaagaatgtatggttgaaaactcaggaatgtttataaaacaaattatttcacaaaaaaaaaaaaaaa

SEQ ID NO: 31 - DNA, 2207 bp, Homo sapiens
actgacggccggccggcttcccggaactggaaggttacattgattacccacctagtacaacatcttacgggaagagcatagtatttcctagaggaatatgaacataacaggaaggtatcattggctctgaattaaatttgaacttgtcccctgaatagctacaggttttggaagctgaatcaatgttatcagatgagttagaatccaaaccagagctcctggtacagtttgttcagaatacgtccatcccattgggacaggggcttgtagaatcagaagctaaagatattacttgcttgtccctccttcccgtgactgaagcctcagaatgcagtcggctaatgttaccagatgatactacaaatcattctaactcctccaaggaggtcccttcctcagctgttttgagaagccttcgggtgaatgtgggtccagacggagaggagacgagagctcagactgtacagaaatccccggagtttttgtccacttcagagtcttctagcttgttgcaagatctacagccaagtgatagcacttcttttattcttcttaacctaacaagagcaggtctgggctcttcagctgagcacttagtgtttgtacaggatgaggcagaagattcagggaatgatttcctctccagtgagagcacagacagtagcattccatggttcctccgggttcaggagttggcccatgacagtttgattgctgctactcgtgcacaactggcaaagaatgcaaaaaccagcagcaatggagaaaatgtccaccttggttctggtgatgggcagtcaaaagattctgggccccttcctcaagtggaaaagaagctcaagtgtacagttgaaggttgtgaccggacatttgtatggccagctcactttaaataccacctcaagactcatcgaaatgaccgctccttcatctgtcctgcagaaggttgtgggaaaagcttctatgtgctgcagaggctgaaggtgcacatgaggacccacaatggagagaagccctttatgtgccatgagtctggctgtggtaagcagtttactacagctggaaacctgaagaaccaccggcgcatccacacaggagagaaacctttcctttgtgaagcccaaggatgtggccgttcctttgctgagtattctagcctccgaaaacatctggtggttcactcaggagagaagcctcatcagtgccaagtctgtgggaagaccttctctcagagtggaagcaggaatgtgcatatgagaaagcatcacctgcagctgggagcagctgggagtcaagagcaggagcaaactgctgagccactaatgggcagtagtttgcttgaagaggcttcagtacccagtaaaaacctggtgtctatgaattcccagcccagccttggtggagagtccttgaacctaccaaataccaattctatcctgggagttgatgatgaggtgcttgctgaaggatccccacgttccctgtcttcagtgcctgatgtgacacatcacctggtgaccatgcagtcagggaggcaatcatatgaagtttctgtcttaactgcagtaaatccacaagagttactaaaccaaggagatttaactgaaagacggacatgagcgtgggtgctgactcctggaagagcaactctatctgatctcaaaatgcgtatactgggaacaggatgccttagcccacaacagaaccagaatgaatctttgaaggcacaagactctgcttttgccactcttcctctttcctggtatagaagatggatgtaggagagcttcttttctaactaccatctgatcagacaaggaatgaagcaatgactgtgggctgggaaactgtacctacctctcttcccactgcaaatttctgggatagaccaaaagtgaatttgattatgtgttggctgaagttcttcattctgactgttgaggggaggttttcctttgaagagttttcatcccagactcagctgtcttttcacatggatgaaataattcctgctaccaacaacagagcttcaccaggaagttgagttttcaagatgccttgttgctttgaagaagggagtgatgtcaattctcttgttacattctccctttagcaacctgagtaagagactctctgccactgggctgcaaaaaaataaattacttgaatctccccttgaaaaaaaaaaaaaaaaaaaaaaaaaaaaa

SEQ ID NO: 32 - DNA, 2892 bp, Homo sapiens
gcgccggcacacctattggcccccgcggcgtcccgtcgccgcgtcgcgttgctggcccgtcggagcgacgccgctcgggtcagtcggcggccggactgggaagatggacgcagctactctgacctacgacactctccggtttgctgagtttgaagattttcctgagacctcagagcccgtttggatactgggtagaaaatacagcattttcacagaaaaggacgagatcttgtctgatgtggcatctagactttggtttacatacaggaaaaactttccagccattggggggacaggccccacctcggacacaggctggggctgcatgctgcggtgtggacagatgatctttgcccaagccctggtgtgccggcacctaggccgagattggaggtggacacaaaggaagaggcagccagacagctacttcagcgtcctcaacgcattcatcgacaggaaggacagttactactccattcaccagatagcgcaaatgggagttggcgaaggcaagtccataggccagtggtacgggcccaacactgtcgcccaggtcctgaagaagcttgctgtcttcgatacgtggagctccttggcggtccacattgcaatggacaacactgttgtgatggaggaaatcagaaggttgtgcaggaccagcgttccctgtgcaggcgccactgcgtttcctgcagattccgaccggcactgcaacggattccctgccggagctgaggtcaccaacaggccgtcgccatggagacccctggtacttctcattcccctgcgcctggggctcacggacatcaacgaggcctacgtggagacgctgaagcactgcttcatgatgccccagtccctgggcgtcatcggagggaagcccaacagcgcccactacttcatcggctacgttggtgaggagctcatctacctggacccccacaccacgcagccagccgtggagcccactgatggctgcttcatcccggacgagagcttccactgccagcacccgccgtgccgcatgagcatcgcggagcttgacccgtccatcgctgtggggtttttctgtaagactgaagatgacttcaatgattggtgccagcaagtcaaaaagctgtctctgcttggaggtgccctgcccatgtttgagctggtggagctgcagccttcacatctggcctgccccgacgtcctgaacctgtccctagattcttctgatgtagagcgactggaaagattcttcgactcagaagatgaagactttgaaatcctgtccctttgaaaatcctggggtcgggggtggcacctgtgagagcctggggctcctggtgccgctgcgtttcatccatcccgcccgctcgcctgccgagggctgcgccccgtgctgcctccccccagagggccacccgctgtgctcgtggactgaggctgcgctgcccgggaggccttactgcttggtgtcagactgcccagctcagagtgcccgtcagggcctgtgcatccgcacgcggagccgtctgttaggagcttccagagtgttctctcgacactgccagccccgtgttagcacctgggcctcagtcccacttgctcccaggcgccggttctgtggttggtttggaattaaagtcctgtttgaagttgtcagacacagacatgaatttctgggcgctccctgagtcagagtctcagaagacctgtgcaggctggcgtgagaggagcggcagccacactgcggccccacgcccaaggactgggctgctctcgaggggggcgcgcccaccgctgtgtcctctctgcccagcctggcttaccaagggctacctcagtgggagatgaggttggaggaacgaaggcgaggttcctccttgctttggggagaaaagtattcaggaagtgggtgtgtgggaaacctgaagatggcgtgcacaggacacagcgtgggcggcctgggcagaagggcggctggctgtcctggagctgctgctggagcctgccctcagagtgtccctttccagtgctgtggcattctgtggcagcttccccaggtgtggtgacggggggggggcggggcctccacctgtgacagccaggcttgagggtggacggcgtgcctctcccaggagccttccccatgtccttgccttgctgagaattgccctcccatgccgctgaggtgttaggtggtttagggccaaaaggggaaaaccacttgagtcttgtggtgtgtggtgggcagacaccacagggtggcatcacctggtggcatttccagaacctcagccccgattccagcacccaccaccgcctgaccctgtgtaacctgctgtcccgggtcccagagtgcactctgccccgctgctctgctgcctgtcctgggaaagtatctttgccccactaggaaatgtaaacaggagggcttggggagcgtgggcacttttctcatgagcagctactgcggcgttggcaggactcgctgctgctgctgctgcttgtgtaggtcggggagccagagatccccgaggacgcgcgccggacagtcggcactgaccggcccacctggtagcagaggacacccccagccccccaagcattgaagacatagtgtatttcctcgtatcctttctcccttgggtgtagttggggtggggaagcagggaaggctggtgcgatctccattccttgggctccacgtccgagttcatggtgcgccgctgtgctgggagctgcagtggtaatgtgtgggacaccttgaccaaaggggagctttgtctcgtgtgttttgaaaaaggcttaatgaagagaatgttgttcattcttagtagtatagtttgcaattcttaatggcaaataataagtttcagtagaaaacaaaaaaaaaaaaaaaaa

SEQ ID NO: 33 - DNA, 4314 bp, Homo sapiens
cgagatcccggggagccagcttgctgggagagcgggacggtccggagcaagcccagaggcagaggaggcgacagagggaaaaagggccgagctagccgctccagtgctgtacaggagccgaagggacgcaccacgccagccccagcccggctccagcgacagccaacgcctcttgcagcgcggcggcttcgaagccgccgcccggagctgccctttcctcttcggtgaagtttttaaaagctgctaaagactcggaggaagcaaggaaagtgcctggtaggactgacggctgcctttgtcctcctcctctccaccccgcctccccccaccctgccttccccccctcccccgtcttctctcccgcagctgcctcagtcggctactctcagccaacccccctcaccacccttctccccacccgcccccccgcccccgtcggcccagcgctgccagcccgagtttgcagagaggtaactccctttggctgcgagcgggcgagctagctgcacattgcaaagaaggctcttaggagccaggcgactggggagcggcttcagcactgcagccacgacccgcctggttaggctgcacgcggagagaaccctctgttttcccccactctctctccacctcctcctgccttccccaccccgagtgcggagccagagatcaaaagatgaaaaggcagtcaggtcttcagtagccaaaaaacaaaacaaacaaaaacaaaaaagccgaaataaaagaaaaagataataactcagttcttatttgcacctacttcagtggacactgaatttggaaggtggaggattttgtttttttcttttaagatctgggcatcttttgaatctacccttcaagtattaagagacagactgtgagcctagcagggcagatcttgtccaccgtgtgtcttcttctgcacgagactttgaggctgtcagagcgctttttgcgtggttgctcccgcaagtttccttctctggagcttcccgcaggtgggcagctagctgcagcgactaccgcatcatcacagcctgttgaactcttctgagcaagagaaggggaggcggggtaagggaagtaggtggaagattcagccaagctcaaggatggaagtgcagttagggctgggaagggtctaccctcggccgccgtccaagacctaccgaggagctttccagaatctgttccagagcgtgcgcgaagtgatccagaacccgggccccaggcacccagaggccgcgagcgcagcacctcccggcgccagtttgctgctgctgcagcagcagcagcagcagcagcagcagcagcagcagcagcagcagcagcagcagcagcagcagcagcaagagactagccccaggcagcagcagcagcagcagggtgaggatggttctccccaagcccatcgtagaggccccacaggctacctggtcctggatgaggaacagcaaccttcacagccgcagtcggccctggagtgccaccccgagagaggttgcgtcccagagcctggagccgccgtggccgccagcaaggggctgccgcagcagctgccagcacctccggacgaggatgactcagctgccccatccacgttgtccctgctgggccccactttccccggcttaagcagctgctccgctgaccttaaagacatcctgagcgaggccagcaccatgcaactccttcagcaacagcagcaggaagcagtatccgaaggcagcagcagcgggagagcgagggaggcctcgggggctcccacttcctccaaggacaattacttagggggcacttcgaccatttctgacaacgccaaggagttgtgtaaggcagtgtcggtgtccatgggcctgggtgtggaggcgttggagcatctgagtccaggggaacagcttcggggggattgcatgtacgccccacttttgggagttccacccgctgtgcgtcccactccttgtgccccattggccgaatgcaaaggttctctgctagacgacagcgcaggcaagagcactgaagatactgctgagtattcccctttcaagggaggttacaccaaagggctagaaggcgagagcctaggctgctctggcagcgctgcagcagggagctccgggacacttgaactgccgtctaccctgtctctctacaagtccggagcactggacgaggcagctgcgtaccagagtcgcgactactacaactttccactggctctggccggaccgccgccccctccgccgcctccccatccccacgctcgcatcaagctggagaacccgctggactacggcagcgcctgggcggctgcggcggcgcagtgccgctatggggacctggcgagcctgcatggcgcgggtgcagcgggacccggttctgggtcaccctcagccgccgcttcctcatcctggcacactctcttcacagccgaagaaggccagttgtatggaccgtgtggtggtggtgggggtggtggcggcggcggcggcggcggcggcggcggcggcggcggcggcggcggcggcgaggcgggagctgtagccccctacggctacactcggccccctcaggggctggcgggccaggaaagcgacttcaccgcacctgatgtgtggtaccctggcggcatggtgagcagagtgccctatcccagtcccacttgtgtcaaaagcgaaatgggcccctggatggatagctactccggaccttacggggacatgcgtttggagactgccagggaccatgttttgcccattgactattactttccaccccagaagacctgcctgatctgtggagatgaagcttctgggtgtcactatggagctctcacatgtggaagctgcaaggtcttcttcaaaagagccgctgaagggaaacagaagtacctgtgcgccagcagaaatgattgcactattgataaattccgaaggaaaaattgtccatcttgtcgtcttcggaaatgttatgaagcagggatgactctgggagcccggaagctgaagaaacttggtaatctgaaactacaggaggaaggagaggcttccagcaccaccagccccactgaggagacaacccagaagctgacagtgtcacacattgaaggctatgaatgtcagcccatctttctgaatgtcctggaagccattgagccaggtgtagtgtgtgctggacacgacaacaaccagcccgactcctttgcagccttgctctctagcctcaatgaactgggagagagacagcttgtacacgtggtcaagtgggccaaggccttgcctggcttccgcaacttacacgtggacgaccagatggctgtcattcagtactcctggatggggctcatggtgtttgccatgggctggcgatccttcaccaatgtcaactccaggatgctctacttcgcccctgatctggttttcaatgagtaccgcatgcacaagtcccggatgtacagccagtgtgtccgaatgaggcacctctctcaagagtttggatggctccaaatcaccccccaggaattcctgtgcatgaaagcactgctactcttcagcattattccagtggatgggctgaaaaatcaaaaattctttgatgaacttcgaatgaactacatcaaggaactcgatcgtatcattgcatgcaaaagaaaaaatcccacatcctgctcaagacgcttctaccagctcaccaagctcctggactccgtgcagcctattgcgagagagctgcatcagttcacttttgacctgctaatcaagtcacacatggtgagcgtggactttccggaaatgatggcagagatcatctctgtgcaagtgcccaagatcctttctgggaaagtcaagcccatctatttccacacccagtgaagcattggaaaccctatttccccaccccagctcatgccccctttcagatgtcttctgcctgttataactctgcactactcctctgcagtgccttggggaatttcctctattgatgtacagtctgtcatgaacatgttcctgaattctatttgctgggctttttttttctctttctctcctttctttttcttcttccctccctatctaaccctcccatggcaccttcagactttgcttcccattgtggctcctatctgtgttttgaatggtgttgtatgcctttaaatctgtgatgatcctcatatggcccagtgtcaagttgtgcttgtttacagcactactctgtgccagccacacaaacgtttacttatcttatgccacgggaagtttagagagctaagattatctggggaaatcaaaacaaaaacaagcaaac

SEQ ID NO: 34 - DNA, 2985 bp, Homo sapiens
tcgggcacggcgtcctccctccgcagcagccgagccggacctgcctccccgggcgtgctccgccggccccgccgccggcccgcagcgacagacaggcgctccccgcagctccgcacgggacccaggccgccggaccccagcgccggaccaccctctgtccgccccgaggagtttgccgcctgccggagcacctgcgcacagatggagctggaccaccggaccagcggcgggctccacgcctaccccgggccgcggggcgggcaggtggccaagcccaacgtgatcctgcagatcgggaagtgccgggccgagatgctggagcacgtgcggcggacgcaccggcacctgctggccgaggtgtccaagcaggtggagcgcgagctgaaggggctgcaccggtcggtcgggaagctggagagcaacctggacggctacgtgcccacgagcgactcgcagcgctggaagaagtccatcaaggcctgcctgtgccgctgccaggagaccatcgccaacctggagcgctgggtcaagcgcgagatgcacgtgtggcgcgaggtgttctaccgcctggagcgctgggccgaccgcctggagtccacgggcggcaagtacccggtgggcagcgagtcagcccgccacaccgtttccgtgggcgtggggggtcccgagagctactgccacgaggcagacggctacgactacaccgtcagcccctacgccatcaccccgcccccagccgctggcgagctgcccgggcaggagcccgccgaggcccagcagtaccagccgtgggtccccggcgaggacgggcagcccagccccggcgtggacacgcagatcttcgaggaccctcgagagttcctgagccacctagaggagtacttgcggcaggtgggcggctctgaggagtactggctgtcccagatccagaatcacatgaacgggccggccaagaagtggtgggagttcaagcagggctccgtgaagaactgggtggagttcaagaaggagttcctgcagtacagcgagggcacgctgtcccgagaggccatccagcgcgagctggacctgccgcagaagcagggcgagccgctggaccagttcctgtggcgcaagcgggacctgtaccagacgctctacgtggacgcggacgaggaggagatcatccagtacgtggtgggcaccctgcagcccaagctcaagcgtttcctgcgccaccccctgcccaagaccctggagcagctcatccagaggggcatggaggtgcaggatgacctggagcaggcggccgagccggccggcccccacctcccggtggaggatgaggcggagaccctcacgcccgcccccaacagcgagtccgtggccagtgaccggacccagcccgagtagagggcatcccggagcccccagcctgcccactacatccagcctgtggctttgcccaccaggacttttgagctggggctgactcctgcaggggaagccctggtccagctgggtgccccctcgagctccgggcggactcgcacacactcgtgtcatccagatgtgagcaccgcacccagcggcaaagagccctcccccctgcagggctccacccatcaccctccctccgtctgtctttccggcctggaccccaccctccacactctcaggccatcacagaacaccccagcttcctcattctgctacaacacccaggccctctggacatccagaaaaccaagtgtccggatggcaggggccagcggccaccaagctcatgggacacccagagcagaagctagggcagagccaatgctgagggagcctcgacttccggcgccgccgccctctcccggcatccgcagagccagctgacgccctccctgcctcccagggcagctggccagcctcgggcagcgcggccccctcctcccaggggagagtagaagtcgcacacgcagcagagcagacctgatgtcccggtgcttcctggcccctcagctccagtgattcacgcccgcctggagaagaatcagagctcagctcatgactcacccatggcaggcggagggtcccagaggggctgagtcctcaaatccggctgaggcagcagctggcaccatcagagccaggagagtgacaacaggtctcaaggttcccacaaagtctttgctgctgtgctgggcaccacccacccctcaccttgcaggctgcctgcgtgggaggcgaagtcccaggacagcccagaggggggctacagagaggagtcggctgcagcagagggcaggagccccagcttagccctgagcgccagcgcgaggaccagggcctgccactaagcccgccccgctggccgccagctgcccgtccccagagccactgcagcaggagtcgggccctgcctccctcccagcagggaaaccccgcccgctgccaggccatcctctctgccagaggctttcatgagccccaaggctggggccacagctcctacccctgcccagcagccctgagctcagctgcaggaaggacatcccagaagccatggctcctggggcgcttccaggcattctgccctgccccgacaccagaaccctggtgctggtgggccactagcgtctgcagcctaagcaggtgctggctcagggttcatcgttctgccttgtccactgggggaccagccctgcagaccactctgacaagtcttcagcccacaccctgccagccccacagattttatttttgcacataagccataaccaatcctcaaggctggcacaggctttggggaagccctggagcctgtgaagaccctggaaacctcatgaggctgtggccaacccctgccccttgccccacacagaccaggccttaaatgtcggtccaggccctgtgcaccttaccccagagacagactctttttgtaagattttgttaataaaacactgaaacttcaaaaaaaaaaaaaaaaaaaaaaaaaaaaaaaaaaaaaaaaaa

SEQ ID NO: 35 - DNA, 8585 bp, Homo sapiens
cagaaagcggagagtcacagcggggccaggccctggggagcggagcctccaccgcccccctcattcccaggcaagggcttggggggaatgagccgggagagccgggtcccgagcctacagagccgggagcagctgagccgccggcgcctcggccgccgccgccgcctcctcctcctccgccgccgccagcccggagcctgagccggcggggcgggggggagaggagcgagcgcagcgcagcagcggagccccgcgaggcccgcccgggcgggtggggagggcagcccgggggactgggccccggggcggggtgggagggggggagaagacgaagacagggccgggtctctccgcggacgagacagcggggatcatggccgcgcaggtcgcccccgccgccgccagcagcctgggcaacccgccgccgccgccgccctcggagctgaagaaagccgagcagcagcagcgggaggaggcggggggcgaggcggcggcggcggcagcggccgagcgcggggaaatgaaggcagccgccgggcaggaaagcgagggccccgccgtggggccgccgcagccgctgggaaaggagctgcaggacggggccgagagcaatgggggtggcggcggcggcggagccggcagcggcggcgggcccggcgcggagccggacctgaagaactcgaacgggaacgcgggccctaggcccgccctgaacaataacctcacggagccgcccggcggcggcggtggcggcagcagcgatggggtgggggcgcctcctcactcagccgcggccgccttgccgcccccagcctacggcttcgggcaaccctacggccggagcccgtctgccgtcgccgccgccgcggccgccgtcttccaccaacaacatggcggacaacaaagccctggcctggcagcgctgcagagcggcggcggcgggggcctggagccctacgcggggccccagcagaactctcacgaccacggcttccccaaccaccagtacaactcctactaccccaaccgcagcgcctaccccccgcccgccccggcctacgcgctgagctccccgagaggtggcactccgggctccggcgcggcggcggctgccggctccaagccgcctccctcctccagcgcctccgcctcctcgtcgtcttcgtccttcgctcagcagcgcttcggggccatggggggaggcggcccctccgcggccggcgggggaactccccagcccaccgccacccccaccctcaaccaactgctcacgtcgcccagctcggcccggggctaccagggctaccccgggggcgactacagtggcgggccccaggacgggggcgccggcaagggcccggcggacatggcctcgcagtgttggggggctgcggcggcggcagctgcggcggcggccgcctcgggaggggcccaacaaaggagccaccacgcgcccatgagccccgggagcagcggcggcggggggcagccgctcgcccggacccctcagccatccagtccaatggatcagatgggcaagatgagacctcagccatatggcgggactaacccatactcgcagcaacagggacctccgtcaggaccgcagcaaggacatgggtacccagggcagccatacgggtcccagaccccgcagcggtacccgatgaccatgcagggccgggcgcagagtgccatgggcggcctctcttatacacagcagattcctccttatggacaacaaggccccagcgggtatggtcaacagggccagactccatattacaaccagcaaagtcctcaccctcagcagcagcagccaccctactcccagcaaccaccgtcccagacccctcatgcccaaccttcgtatcagcagcagccacagtctcaaccaccacagctccagtcctctcagcctccatactcccagcagccatcccagcctccacatcagcagtccccggctccatacccctcccagcagtcgacgacacagcagcacccccagagccagcccccctactcacagccacaggctcagtctccttaccagcagcagcaacctcagcagccagcaccctcgacgctctcccagcaggctgcgtatcctcagccccagtctcagcagtcccagcaaactgcctattcccagcagcgcttccctccaccgcaggagctatctcaagattcatttgggtctcaggcatcctcagccccctcaatgacctccagtaagggagggcaagaagatatgaacctgagccttcagtcaagaccctccagcttgcctgatctatctggttcaatagatgacctccccatggggacagaaggagctctgagtcctggagtgagcacatcagggatttccagcagccaaggagagcagagtaatccagctcagtctcctttctctcctcatacctcccctcacctgcctggcatccgaggcccttccccgtcccctgttggctctcccgccagtgttgctcagtctcgctcaggaccactctcgcctgctgcagtgccaggcaaccagatgccacctcggccacccagtggccagtcggacagcatcatgcatccttccatgaaccaatcaagcattgcccaagatcgaggttatatgcagaggaacccccagatgccccagtacagttccccccagcccggctcagccttatctccgcgtcagccttccggaggacagatacacacaggcatgggctcctaccagcagaactccatggggagctatggtccccaggggggtcagtatggcccacaaggtggctaccccaggcagccaaactataatgccttgcccaatgccaactaccccagtgcaggcatggctggaggcataaaccccatgggtgccggaggtcaaatgcatggacagcctggcatcccaccttatggcacactccctccagggaggatgagtcacgcctccatgggcaaccggccttatggccctaacatggccaatatgccacctcaggttgggtcagggatgtgtcccccaccagggggcatgaaccggaaaacccaagaaactgctgtcgccatgcatgttgctgccaactctatccaaaacaggccgccaggctaccccaatatgaatcaagggggcatgatgggaactggacctccttatggacaagggattaatagtatggctggcatgatcaaccctcagggacccccatattccatgggtggaaccatggccaacaattctgcagggatggcagccagcccagagatgatgggccttggggatgtaaagttaactccagccaccaaaatgaacaacaaggcagatgggacacccaagacagaatccaaatccaagaaatccagttcttctactacaaccaatgagaagatcaccaagttgtatgagctgggtggtgagcctgagaggaagatgtgggtggaccgttatctggccttcactgaggagaaggccatgggcatgacaaatctgcctgctgtgggtaggaaacctctggacctctatcgcctctatgtgtctgtgaaggagattggtggattgactcaggtcaacaagaacaaaaaatggcgggaacttgcaaccaacctcaatgtgggcacatcaagcagtgctgccagctccttgaaaaagcagtatatccagtgtctctatgcctttgaatgcaagattgaacggggagaagaccctcccccagacatctttgcagctgctgattccaagaagtcccagcccaagatccagcctccctctcctgcgggatcaggatctatgcaggggccccagactccccagtcaaccagcagttccatggcagaaggaggagacttaaagccaccaactccagcatccacaccacacagtcagatccccccattgccaggcatgagcaggagcaattcagttgggatccaggatgcctttaatgatggaagtgactccacattccagaagcggaattccatgactccaaaccctgggtatcagcccagtatgaatacctctgacatgatggggcgcatgtcctatgagccaaataaggatccttatggcagcatgaggaaagctccagggagtgatcccttcatgtcctcagggcagggccccaacggcgggatgggtgacccctacagtcgtgctgccggccctgggctaggaaatgtggcgatgggaccacgacagcactatccctatggaggtccttatgacagagtgaggacggagcctggaatagggcctgagggaaacatgagcactggggccccacagccgaatctcatgccttccaacccagactcggggatgtattctcctagccgctaccccccgcagcagcagcagcagcagcagcaacgacatgattcctatggcaatcagttctccacccaaggcaccccttctggcagccccttccccagccagcagactacaatgtatcaacagcaacagcagaattacaagcggccaatggatggcacatatggccctcctgccaagcggcacgaaggggagatgtacagcgtgccatacagcactgggcaggggcagcctcagcagcagcagttgcccccagcccagccccagcctgccagccagcaacaagctgcccagccttcccctcagcaagatgtatacaaccagtatggcaatgcctatcctgccactgccacagctgctactgagcgccgaccagcaggcggcccccagaaccaatttccattccagtttggccgagaccgtgtctctgcaccccctggcaccaatgcccagcaaaacatgccaccacaaatgatgggcggccccatacaggcatcagctgaggttgctcagcaaggcaccatgtggcaggggcgtaatgacatgacctataattatgccaacaggcagagcacgggctctgccccccagggccccgcctatcatggcgtgaaccgaacagatgaaatgctgcacacagatcagagggccaaccacgaaggctcgtggccttcccatggcacacgccagcccccatatggtccctctgcccctgtgccccccatgacaaggccccctccatctaactaccagcccccaccaagcatgcagaatcacattcctcaggtatccagccctgctcccctgccccggccaatggagaaccgcacctctcctagcaagtctccattcctgcactctgggatgaaaatgcagaaggcaggtcccccagtacctgcctcgcacatagcacctgcccctgtgcagccccccatgattcggcgggatatcaccttcccacctggctctgttgaagccacacagcctgtgttgaagcagaggaggcggctcacaatgaaagacattggaaccccggaggcatggcgggtaatgatgtccctcaagtctggtctcctggcagagagcacatgggcattagataccatcaacatcctgctgtatgatgacaacagcatcatgaccttcaacctcagtcagctcccagggttgctagagctccttgtagaatatttccgacgatgcctgattgagatctttggcattttaaaggagtatgaggtgggtgacccaggacagagaacgctactggatcctgggaggttcagcaaggtgtctagtccagctcccatggagggtggggaagaagaagaagaacttctaggtcctaaactagaagaggaagaagaagaggaagtagttgaaaatgatgaggagatagccttttcaggcaaggacaagccagcttcagagaatagtgaggagaagctgatcagtaagtttgacaagcttccagtaaagatcgtacagaagaatgatccatttgtggtggactgctcagataagcttgggcgtgtgcaggagtttgacagtggcctgctgcactggcggattggtgggggggacaccactgagcatatccagacccacttcgagagcaagacagagctgctgccttcccggcctcacgcaccctgcccaccagcccctcggaagcatgtgacaacagcagagggtacaccagggacaacagaccaggaggggcccccacctgatggacctccagaaaaacggatcacagccactatggatgacatgttgtctactcggtctagcaccttgaccgaggatggagctaagagttcagaggccatcaaggagagcagcaagtttccatttggcattagcccagcacagagccaccggaacatcaagatcctagaggacgaaccccacagtaaggatgagaccccactgtgtacccttctggactggcaggattctcttgccaagcgctgcgtctgtgtgtccaataccattcgaagcctgtcatttgtgccaggcaatgactttgagatgtccaaacacccagggctgctgctcatcctgggcaagctgatcctgctgcaccacaagcacccagaacggaagcaggcaccactaacttatgaaaaggaggaggaacaggaccaaggggtgagctgcaacaaagtggagtggtggtgggactgcttggagatgctccgggaaaacaccttggttacactcgccaacatctcggggcagttggacctatctccataccccgagagcatttgcctgcctgtcctggacggactcctacactgggcagtttgcccttcagctgaagcccaggaccccttttccaccctgggccccaatgccgtcctttccccgcagagactggtcttggaaaccctcagcaaactcagcatccaggacaacaatgtggacctgattctggccacaccccccttcagccgcctggagaagttgtatagcactatggtgcgcttcctcagtgaccgaaagaacccggtgtgccgggagatggctgtggtactgctggccaacctggctcagggggacagcctggcagctcgtgccattgcagtgcagaagggcagtatcggcaacctcctgggcttcctagaggacagccttgccgccacacagttccagcagagccaggccagcctcctccacatgcagaacccaccctttgagccaactagtgtggacatgatgcggcgggctgcccgcgcgctgcttgccttggccaaggtggacgagaaccactcagagtttactctgtacgaatcacggctgttggacatctcggtatcaccgttgatgaactcattggtttcacaagtcatttgtgatgtactgtttttgattggccagtcatgacagccgtgggacacctcccccccccgtgtgtgtgtgcgtgtgtggagaacttagaaactgactgttgccctttatttatgcaaaaccacctcagaatccagtttaccctgtgctgtccagcttctcccttgggaaaaagtctctcctgtttctctctcctccttccacctcccctccctccatcacctcacgcctttctgttccttgtcctcaccttactcccctcaggaccctaccccaccctctttgaaaagacaaagctctgcctacatagaagactttttttattttaaccaaagttactgttgtttacagtgagtttggggaaaaaaaataaaataaaaatggctttcccagtccttgcatcaacgggatgccacatttcataactgtttttaatggtaaaaaaaaaaaaaaaaaatacaaaaaaaaattctgaaggacaaaaaaggtgactgctgaactgtgtgtggtttattgttgtacattcacaatcttgcaggagccaagaagttcgcagttgtgaacagaccctgttcactggagaggcctgtgcagtagagtgtagaccctttcatgtactgtactgtacacctgatactgtaaacatactgtaataataatgtctcacatggaaacagaaaacgctgggtcagcagcaagctgtagtttttaaaaatgtttttagttaaacgttgaggagaaaaaaaaaaaaggcttttcccccaaagtatcatgtgtgaacctacaacaccctgacctctttctctcctccttgattgtatgaataaccctgagatcacctcttagaactggttttaacctttagctgcagcggctacgctgccacgtgtgtatatatatgacgttgtacattgcacatacccttggatccccacagtttggtcctcctcccagctacccctttatagtatgacgagttaacaagttggtgacctgcacaaagcgagacacagctatttaatctcttgccagatatcgcccctcttggtgcgatgctgtacaggtctctgtaaaaagtccttgctgtctcagcagccaatcaacttatagtttatttttttctgggtttttgttttgttttgttttctttctaatcgaggtgtgaaaaagttctaggttcagttgaagttctgatgaagaaacacaattgagattttttcagtgataaaatctgcatatttgtatttcaacaatgtagctaaaacttgatgtaaattcctcctttttttccttttttggcttaatgaatatcatttattcagtatgaaatctttatactatatgttccacgtgttaagaataaatgtacattaaatcttggtaagacttt

SEQ ID NO: 36 - DNA, 4081 bp, Homo sapiens
gtggggacgactcttctggaggaagcagcgcgggcttgaccggcgtcggcccgccgcctccgctgccgcttcgccccaatccggtccctctggcccggcctgacccggtctggcttgttcgggctcagcggccgcgaggccgcagctcccgatggaaatcatattatgtagaatacttgggtgacatctgcctgagagatctccaagaattacagaagacaaaaatactaatgcatttgagaaagcggtagttttggggggagggggaaaaagcaactgctttcctgatctgcaacttggctggatgctaagatgtcagtggacatgaatagccaggggtctgacagcaatgaagaggactatgacccaaattgtgaggaagaggaagaagaagaagaagacgaccctggggacatagaggactattacgtgggagtagccagcgatgtggagcagcagggggctgatgcctttgatcccgaggagtaccagttcacttgcttgacctacaaggaatctgagggtgccctcaatgagcacatgaccagcttagcttctgtcctaaaggtatctcattcagttgctaaacttatattagttaatttccactggcaagtttcagagatattggacagatacaagtccaattctgctcaactgcttgttgaggctcgagttcagcctaatccatcaaaacatgttcccacatcccatccccctcaccactgtgcagtgtgtatgcagtttgtgcgaaaggaaaacctactctctctggcctgtcagcaccagttttgccgcagctgctgggagcagcactgctcagttctcgtcaaggacggcgtgggcgtgggagtctcttgcatggctcaggactgtccactccgtacaccagaggactttgtgtttccattgcttcccaatgaagaattgagagagaaatacaggcgctacctcttcagggactatgtggagagtcattaccagctccagctgtgccctggtgcagactgccccatggttattcgggtacaggagcctagagctcgccgagtacagtgcaatcggtgcaacgaggtcttctgtttcaagtgtcgtcagatgtatcacgcacccacagactgtgccacaatccggaaatggctcacgaagtgtgcagacgactctgaaacagccaactacattagtgctcacactaaagactgtcccaagtgcaacatctgcattgagaagaatggaggctgcaatcacatgcaatgctccaaatgtaaacacgacttctgctggatgtgtctaggagattggaagactcatggcagtgaatactatgagtgcagtcgttacaaggagaatcctgacatcgtgaaccagagccaacaagcccaggcgagggaagccctcaagaagtacttattctactttgagaggtgggaaaaccacaataaaagcttgcagctagaggcacagacataccagcggattcacgagaagattcaggagagggtcatgaacaatctggggacatggatcgactggcagtacctacagaatgctgccaagctcttggccaagtgtcgatacaccctgcaatacacctacccatatgcatattacatggagtccggacccaggaagaagctgtttgaataccagcaggctcagctggaggctgagatcgaaaacctctcatggaaagtggagcgtgcagacagctatgacagaggggacttggagaaccagatgcatatagcggagcagcggaggagaaccctgctgaaagatttccatgacacctaagttgggatgtggatgtgccggggtgaggaagatgtggctgcaaggtctcccggctgccatactgcatgctgcaggctctgcctttcatgaccccaggcaacagccagggccccactcctgagagacactggcaacacctcttagttgatttctgttttcttctcttttcactttttgtttctaccagggtagaggccatgttgaactggcctcttttcaggacttttatttccccctggatggttgttgggagggagggaaagtgttttctgaatggctattaatagtattagatcattacaacttatgtaactttcaaaggttgtacaattatacaaaaaaaaaaaaaaggcaaactataggataacacagagccctttttgaaaataaattggcattggagtgttttaccctctagctgttttacttagaatgtaacatatgctgcctacccacctcaaaatgtctgtactgcaagagggccctgggcctctgctttccatattcacgtttggccagagttgtagtcccaaagaagagcatgggtggcagatggtagggaattgaactggcctgtgcaatgggcatggagcacaaggggtcacagcatgcctcctgccttaccgtggcagtacggagacagtccagaacatggtcttcttgccacggggtgttgttgtctctggtggtgctgcatgtctgtggctcacctttattcttgaaactgaggtttacctggatctggctactgaggctagagcccacagcagaatggggttgggcctgtggccccccaaactagggggtgtgggttcatcacagtgttgccttttgtctcctaaagatagggatctacttttgaagggaattgttcctcccaaataaatttgctttaccttggtcctttcttttgtgccagtattcaagtggtatagctctgagcagggtcacatttggccaaacctgacactgtcttgctgcattctcctttggcaaacatcagggtcagaattcaggatagcccttcctagggcactggactttctggcatgggggctgtgtttgcacaagttattttcatgttacctggagagtgtccagaggctgctctgaggctgaggtgtgttcccccttgcctggttccagctgtcagagggataccatcctagggtctgggaatccaaggccacgagactccttggtttgtggtccgagatcctgtactaaggagggtctggccagaggaacagaccagcttttgcacaatgaagcgcaagggaacaagtggtttgcctggtgtcctacctgtcctgaacctggtcctgtgggccattgaaaagttagatctgtgatctctggggtttttgtggctttgttcaatgcttccactctagggcaggcagagcagtctatactctcccaagcctgcttgacctccaagtagagctgatacagagatctgtgaatattgtgatagaaattctttggtattcatacatttcagctgcaagtcagcaatttcccaggtaccatgtaagctataaaacagtcattcttaaagacagaggatagctgtgactcatgggatcatgaggtccatggctggttgcaggttccctttttccttcctcaggttttgtctcttcctgtgttgtccccagcaagggagagactgtggggtggattgggagaacagattaggagtatagcaaatgaacccagaatggaacagtggggagctaactgtgaatgaggagagtacctgctgcaggacctggaggtcaggtgtgaatgctgtattggcacagggaataaatatcctggcgtctggagccttcacctctccgtcaagtccttcctgtgatactgccatggcacaggatctgagttgcagctctgcaccctaaatcacaccctgggcattgtctgggctgcagggctgccaggttctgtacttgtgtccagctgtggccctggatgctggagctggagggttttctgtgctcagactgtagcctgtagctcttggcctgtgtagagccccctcctgtgccctcagtggctgtcgtttgttaacatcatcaggaagatgggaaaggtcaggcagaatttttctgccctacaaagggtggaagagaaaggacacagtattttcatgaatttaccatatatctttgtttttcttcaacgaaaaagttaattgaggcaatgtcatctgctcaaagttgagtggtttattcacaataaactgtaagtttctgattataaaaaaaaaaaaaaaaaaaaa

SEQ ID NO: 37 - DNA, 1716 bp, Homo sapiens
acttgcgttgcacccgggctgagtgcggccgcgacggggcgggcggactctcgggcgctcagagctggcctcgggtcctcggagcctggcgctcgaacctcccttccgacctccacccggaccccgaccccgacccggcctggcccggcccccgcccccgccccccgggccgatggactactcctacctcaattcgtacgactcgtgcgtggcggccatggaggcgtccgcctacggcgactttggcgcctgcagccagcccggcggcttccaatacagccccctgcggcccgctttccccgcggcagggccgccctgccccgcgctcggctcctccaactgcgcacttggcgccctacgcgaccaccagcccgcgccctactcggcagtgccctacaagttcttcccagagccatccggcctgcacgagaagcgcaagcagcggcgcatccgcaccacgttcaccagcgcgcagctcaaggagctggagcgcgttttcgctgagacccactaccccgacatttacacgcgtgaggagctggcgctcaagatcgacctcactgaggctcgcgtgcaggtctggttccagaaccgccgggccaagttccgcaaacaggagcgcgcggccagcgccaagggcgcggcgggcgcggcgggcgccaaaaagggcgaggcgcgctgctcctccgaggacgacgattccaaggagtccacgtgcagccccacgcccgatagcaccgcctcgctgccgccgccgcctgcgcccggcctggccagcccgcgcctgagccccagcccgctgcccgtcgcactgggctccgggccgggacctgggccggggccacagccgctcaagggcgcactgtgggccggtgtggcgggcggtgggggcggcgggcctggcgcgggagcggccgaactacttaaggcttggcagccggcggagtccggccccgggcccttctccggggttctgtcctcctttcaccggaagcccggccccgccctgaagaccaatctcttctagctgccggcctctggaggctccgagcctgcccccagagacgtccctgcccctccaggacctgacagcccctcccatcctggccacccgcctggaagtccccatccgtctccactccctactgtctcacccctcggtgtgtcctccccaactttggagaccaagtcagggccactctcgtcctcacccaccctctaccagcagagcggagttctttataccgggacctcctccaggagaaccccggagctccttctagcttggccttctttggatgcggtatcacatgaggcctgtccctaacagtgccctcaaagtgaaggtcctcaaggaggatcggcacagcccccttccctggctctgcagcggctgggtcaccccttacgctggtgatcaggaaagcccgctgccccacccctcgggcccacccgtacagaggctggtggtcgccgggataattaatgaccaccgccaattcatccctcacgtgtctcctctcttccctagcccgtctggcacagagggtggacctgttagaggagtggaggggctgcctggggaatgggacagagggattctctttccctaatttttttggttgtcctttttctttgaaaaacttgtaatttattgaagttttactcaatccaaataaaacttaatttattgaagacaaaaaaaaaaaaaaaaaa

SEQ ID NO: 38 - DNA, 4846 bp, Homo sapiens
atcttggattccgcggtagcggaggcggcggtcaggcgccgcttctggggagtggcctttcttttcccctccctcccggttcggtggcggcggctcctcccactgggggggggggtggcgcggcggcggtggcatctgcggccatggcggcgactactgccaaccccgaaatgacatcagatgtaccatcactgggtccagccattgcctctggaaactctggacctggaattcaaggtggaggagccattgtccagagggctattaagcggcgaccagggctggattttgatgatgatggagaagggaacagtaaatttttgaggtgtgatgatgatcagatgtctaacgataaggagcggtttgccaggtcggatgatgagcagagctctgcggataaagagagacttgccagggaaaatcacagtgaaattgaacggcggcgacggaacaagatgacagcctacatcacagaactgtcagatatggtacccacctgtagtgccctggctcgaaaaccagacaagctaaccatcttacgcatggcagtttctcacatgaagtccttgcggggaactggcaacacatccactgatggctcctataagccgtctttcctcactgatcaggaactgaaacatttgatcttggaggcagcagatggctttctgtttattgtctcatgtgagacaggcagggtggtgtatgtgtctgactccgtgactcctgttttgaaccagccacagtctgaatggtttggcagcacactctatgatcaggtgcacccagatgatgtggataaacttcgtgagcagctttccacttcagaaaatgccctgacagggcgtatcctggatctaaagactggaacagtgaaaaaggaaggtcagcagtcttccatgagaatgtgtatgggctcaaggagatcgtttatttgccgaatgaggtgtggcagtagctctgtggacccagtttctgtgaataggctgagctttgtgaggaacagatgcaggaatggacttggctctgtaaaggatggggaacctcacttcgtggtggtccactgcacaggctacatcaaggcctggcccccagcaggtgtttccctcccagatgatgacccagaggctggccagggaagcaagttttgcctagtggccattggcagattgcaggtaactagttctcccaactgtacagacatgagtaatgtttgtcaaccaacagagttcatctcccgacacaacattgagggtatcttcacttttgtggatcaccgctgtgtggctactgttggctaccagccacaggaactcttaggaaagaatattgtagaattctgtcatcctgaagaccagcagcttctaagagacagcttccaacaggtagtgaaattaaaaggccaagtgctgtctgtcatgttccggttccggtctaagaaccaagaatggctctggatgagaaccagctcctttactttccagaacccttactcagatgaaattgagtacatcatctgtaccaacaccaatgtgaagaactctagccaagaaccacggcctacactctccaacacaatccagaggccacaactaggtcccacagctaatttacccctggagatgggctcaggacagctggcacccaggcagcagcaacagcaaacagaattggacatggtaccaggaagagatggactggccagctacaatcattcccaggtggttcagcctgtgacaaccacaggaccagaacacagcaagccccttgagaagtcagatggtttatttgcccaggatagagatccaagattttcagaaatctatcacaacatcaatgcggatcagagtaaaggcatctcctccagcactgtccctgccacccaacagctattctcccagggcaacacattccctcctaccccccggccggcagagaatttcaggaatagtggcctagcccctcctgtaaccattgtccagccatcagcttctgcaggacagatgttggcccagatttcccgccactccaaccccacccaaggagcaaccccaacttggacccctactacccgctcaggcttttctgcccagcaggtggctacccaggctactgctaagactcgtacttcccagtttggtgtgggcagctttcagactccatcctccttcagctccatgtccctccctggtgccccaactgcatcgcctggtgctgctgcctaccctagtctcaccaatcgtggatctaactttgctcctgagactggacagactgcaggacaattccagacacggacagcagagggtgtgggtgtctggccacagtggcagggccagcagcctcatcatcgttcaagttctagtgagcaacatgttcaacaaccgccagcacagcaacctggccagcctgaggtcttccaggagatgctgtccatgctgggagatcagagcaacagctacaacaatgaagaattccctgatctaactatgtttccccccttttcagaatagaactattggggtgaggataaggggtgggggagaaaaaatcactgtttgtttttaaaaagcaaatctttctgtaaacagaataaaagttcctctcccttcccttccctcacccctgacatgtaccccctttcccttctggctgttcccctgctctgttgcctctctaaggtaacatttatagaagaaatggaatgaatctccaaggcttttaggactgtctgaaaatttgaggctgggtgaagttaaaacacctttccttatgtctcctgacctgaaattgtatagtgttgatttgtgctgagatcaagaggcaggttagaagaacctgacatccactgtttgccttggatagtatggcttgtttttggaaagaaattctgaagagagtggaggagaggagaaatgtcctcatatttgaggaccatgaaacattgtaggtatatatggggctttagcaagtttgagcataggctctttttgctgcctgtgagcagtccctctggaaagaaacatgtgagtaagtgagagagagtgtgtgtgtatgtgtgtgtgtgtgtgtgtgcgcacacatgcttctgtatttcactctttctccctattagggagttatgcaaaatttgtccccgattttacctttgtctttctgtgtacttttcaaagagtcctaaggagttaaatcttccaggtattttccacttagtattgcagccaaagaatatttaaataaacgtctttgctgcgcttgcatccatgcccagccaatatacaactgtaaagcaaatatagaaagtcggctgttgatacgattgtctgttatcgaacacattcagtgataaagctgggttactgctgcttttggtgctctcaccttatctggaagatctgcaaacattacctaaataggctggcaagataaacactttctggaacccgagacttggccataaagataatgctgcatttttctgtcagaatcacatatgatgtgtgttctgtagaggttatttctgcatggaaactcaacttcttggattagccgtcccagtgaaaatcctcattgttggagtgtaaaccaaatacgaagccctcttgcaaagtagcctctttcatcccatactcaaaatacccagtttagcaagcaactgagatttaagtctctctggccctaagaggtttttcctctttgctccctccaatcttgagattgggttttgctttagagtgcaagtatcataattccgtatgatagatggggcctggacacccatctcaacagggtcacttggtaattaacaatagccatataaatgcggatacaggttactaccctcaccctttaccttcctcaggtaacagtcgtagataccagcttttttttttttttttttaaattggctttggccagtagctaaagtgcaagactgaattaatgagaagatatattaaatgtagtcataggggactgaggagcaagggtggccttgaagaggccaaaggaatgtccatttgctgagtttcccttccttatgtctccagtctggtgccaggtagtggagtaaaaaaggagacagtttatttttttattctatgtgcacacttacagtatacatatatatttatatcacaatttacgaaaccaaaaagttgagtttccaatggaacccttgttttttaataatcgactttttaaatgtgatcaggactataatattgtacagttattatagggcttttggggaaggggaggatagcgagaagatgctctgggggttttgtttttgcttttccttcagggttttatttttgactgttttgttttcttgttggccatttctgtattgctggcatctgtgctaagctttacagtggcaaaaataatgacatgtagcaaagattttcaaacaaaatattttttccttttgtaaaatttcttgtgttgtgtgatcttgattgcggctttatcattcctttccagttcataaacaacaggcacccacaaccagaggaatctatagtttaagctccagacatacaaacataaggcacattgtgtctttaatttcaggaatcagaaatcatagggttctgatcacattgcacgcctcccccctcacttgtcctcctgatcctgacacattctgagtaacatcagcaggaatgctctgaccatgaggtgggggttttggggtgggcgttgcctgggttcttgggagagaggggaagagtcgggacttgaaaaccactagggcacatctggatgccttcccccagtatgtccttttctggattaaaatgagtgaaatttaaactgaaaaaaaaaaaaaaaaaaaaaa

SEQ ID NO: 39 - DNA, 6576 bp, Homo sapiens
gcggccgcggcggcggggagagcggagggagcgccgcccgcccgcgccgtcctttgtgtggcggcggcggcgcctgggcctgaccgggtccccggggctgagcgccgggctccgcgccgcccctcccgcgcccctgccaagcgggcgcctatcctctccgagcaagatggcaaccccggcggcggtcaaccctccggaaatggcttcagacatacctggatctgtgacgttgcccgttgcccccatggcggccaccggacaggtgaggatggcgggggccatgcctgcccgtggaggaaagcggcgttccggaatggacttcgatgatgaagatggtgaaggccccagtaaattttcaagagagaatcatagtgaaatcgaaaggcgcagacggaacaagatgactcagtacatcacggagctctccgacatggtccccacatgcagcgcactggctcggaagccagacaagctcaccatcctccgcatggccgtctcgcacatgaagtccatgaggggtacagggaacaagtccaccgatggcgcgtacaagccttccttcctcacagagcaggaactgaagcatctcatccttgaagcagctgatggatttctgtttgtggtggctgctgagacagggcgagtgatttatgtgtctgactccgtcacccctgttctgaaccagccccagtcagagtggtttgggagcacactgtatgaacaggtgcatcctgatgacgtggagaagctgagagagcaactgtgcacctcagaaaactcaatgacaggccggatcttggacctgaagactgggacggtcaagaaagaagggcagcagtcatccatgaggatgtgcatgggctcgcggcggtctttcatctgcaggatgaggtgtggaaatgctcctttggaccaccttcctctaaacagaataaccaccatgaggaaaaggttcaggaatggccttggccctgtgaaagaaggagaagcccaatatgctgtggtccactgtacaggatacatcaaggcctggccaccagcaggaatgaccatacctgaagaagacgctgatgtgggacaaggcagtaaatattgcctcgtggcaattgggagactccaggtgaccagctctcctgtatgcatggacatgaatgggatgtcggtgcccacagagttcttatcccggcataactccgatggaatcatcacatttgtggatccaagatgtatcagtgtgattggctaccaaccccaggatcttctgggaaaggacattttggaattctgccaccctgaggatcaaagccatctgcgtgagagcttccagcaggtggttaagctgaaaggccaagtcctgtcggtcatgtatcgatttcgcaccaagaaccgggagtggatgttgatccgcaccagcagcttcacattccagaatccctattctgatgagattgagtacatcatctgcaccaacaccaacgtcaagcaacttcagcaacagcaggcagaattggaagtgcaccagagagatggattgtcatcgtatgacttatcccaggtccccgtccccaacctaccagccggtgttcatgaggccgggaagtccgtggaaaaggcggatgcaatcttctcccaggaaagagatcctcggtttgctgaaatgtttgcaggaattagtgcatcggagaagaagatgatgagctcagcctctgcagcaggaacccagcagatctactcccaaggaagcccatttccctctggacactccgggaaggccttcagctcttcagtggttcatgtgcctggagtgaatgatattcagtcctcttcttccacgggccagaacatgtcccaaatctcccggcagctaaaccagagtcaggtggcatggacagggagtcgtccgccctttccgggacagcaaatcccatctcagtccagcaagactcagtcatctccctttgggattggaacgagccacacctacccggcagacccctcttcctacagccccctctccagcccagctacctcctcgccaagtgggaatgcctactccagtcttgccaacaggactccagggttcgctgaaagtggacaaagtagcgggcagttccaagggcggccctcggaagtctggtcgcagtggcaaagccagcaccatggccagcagagcggtgagcagcactcccaccagcagcccggtcagactgaagtgttccaggacatgctgcccatgccaggagatccaacccaggggactggcaactataacatcgaagactttgccgacctgggcatgtttccaccgttttctgagtagctgcggccagagtgaggctcctgctgtacagtgccacccatactgtgatgtcgatgcccatgtgaatgaggcccaccctcgccctgcttgccctgccgcaggccccccaccagaagccatctcccccgctgtgtgtccccaggcgcatcattgctccactctcccctgcagccgcggctgctcggccactgaccaggggccctggcagacattaggggatcagttgtatttattgtattttatctgtgtgtgctcaggaggtgagcctagtgggtccttaagtttggttgtgaataatctcttgatagacaatttatacccatgaaagttcagccaatgcccagagtgaccaagcagcaccagcaggcctgcccaggatgctgaaagcagatttcttcttgatttcacttctgatggatgcatggggctctgggggaatgctgggaaaatgggcaagcagagtgcacagccctcgttctgccagctggagccaagaagcacagagacacagaggcgcctgcccctcagctccgctggtctgtctgtgcatccactgtgccgtgggacatatgtaatttgtgcagtgtgacatggacttgctgtcctaatggatgtgttgtgccttgtgtctgtcatgtgtggccagcgtgattgtatagaatccagagtatgtagagagccaaaatgtgtggccctgtccccaagctcagcaccaccggccatgaccagaggttgctcggcccagggtctgggagctgggctaacaggctgacacttcggcagggtcaccaggaggcacagctaggggcatgctcacatgggtaggtcagttctttggtccaagcctctggtgcagattcaagctcctcctcttagaggaagcagctccttcctcccacaggagccccaagggagcactcaccctcctcccaattggatctgaatagctgtgttcctgatcccacataagcatgtctcatccttgccccactggtgagaggaggaccttgtgcctgcccagagcctgcaggacagcacgccttgaggtcagaggcctggcccttctttacagatgtagatagcagggtaggacgcccaggccttctcacatgggcaccatgaaacactttcttccaggccacctgagccttcgttcttcagcccgactggaggaacagcagctctgggaggcacagagtgcaggtctcaggggcagaagacatgggttccagttctggttctgccacacacccaccggccttgaatttctctggtggtctcaagacaagaacaagagctgactctagaatcttctgcctggctgacctctgagcccatgatccctggcttgctgtgcttctcttggatttgaggagagtttatgaatccatccccctgttttcagggacctctgccttctcccacaccccttacactagtgaggactccttcggcctcttgtgtttccttccttttgtgaccattacgccccctccctgtttcttatcaccagcccatcagcccactgactcccatatggtagaaaaggtaccgtggctgctgcagggcacatggagggacctaccctctgggaaagcccttgtgtccctcccagagtccttcaggtaggccctcgcagatgctgcttgctcagaaacaacccgtgcatccctgcccatggattctgcaggacctagaagagtggcattggttctaggaacctgagagtggagtgaggccagcatgcaggaaggagtttggagagagtgtttgctgtgatccattgaaagctccacattaaaccccagccctgtctggccagggagatccatgtgctcaatgttgctgggggacctacaaaagtcaaacattgctcagtaaaatgcctttggctggtcgccagctgtgcatgactgcagttcctagactctaacttaaccccaactttgcagtttctagagctttttgtctgtaatggtgattgggtctccactgtagatgcatgcagtgttcactccaacctcagaggctttcttgcttctggggaaatggcaggtggttgaaaccctgcacatcctcccagggccagccccagaatgggcctttctctgcctgccctgcccttggggccacctctgcctccagcaggcttgagcttgccccaggccttgggcataattatttccccccaaaaaaggcacaaaaataggttttggatcaaagaagtgtttctcagtgaaatgaaaacagtctttttatagcctttagcttgtgagtttggaagtttggggggtcttatgtttgttttgcctcttctgtttcttggaggagagttgaggcttttcttaggtgcatacacagacccaggtgaacacgctgactgtgaacctgccctgtatccggagctgtgctgggcactgaggggatgcaacaaaattaggagaggatccttgctcccaacgtctacttctcctacctcaacaggggtccagggtgcagtgaactcagttcttggcccttgggtgaggattcatggatgaatgaaagctagacctgatggggaggcattatgactaaataggcccagcctccttcccttccagctctgtcctaggagcataggcgggaaatctgagtagagtctgactgcagtttttgcttatgatttgtaaaagccgtcatggggtcaataagaaaataggggtgatggagggggagaagcccaggactgggagaatcgcacatgccccaggggttttcaccaaggattttcaagacaaactggagtaagaattaaagccccagaggatttaattatcctggtttgcaaaagagcctcccatgccagtaccgcccagccttggaggccggaatgctcatggcccctgtggtctgcttgtccttcagcccatgcccagcagatacctctctgactggagacgggctcaaagctggattagaaaggggagaggcacttgtgactttgtttgactctgtgactcacttcctcgctcacaccttgtttgaactactggactttcaactggctttccttaggtcaggcaagcagacagctccccactgaagaggtctgtacagtgacaacccgggccggcagcaaggacacagatgcagccacagtaaggctccatcaggactgggtcagtgatggcaacaggatggccaaggatggctctagaacactctgtccatgcgtcactccccccagttttatttttagctttggcttcagggagtgacagccatcacaaatagccacattctgctctactctccaacataccagattctacactgttgttatttcatgagacgtgaatgttgcagagagtggggggattctggttgttaaggaacttacactggggagctttactcttccgtgtcaacaatgtgactacatgttctccagattagccacacatgcaaacatcagtgtccttctagctttagccgagaaagaaaccagtcccagggaatgaatggtggtctccccactcccggcagcactttaggcagcccataagctatgcgagaatgtgaacgctcaccttgctccgtcacggttctgacctaccacataaacaggaagaagccagtgaccggaacagctctaggaataacaagtcagaatagaagtgtcctttatattaccagaaaatatgggcttggcctaagtcgctgtctcctaacctgccggggtcattccccaccaaacaccccatactaaggagccatgagccacctggacattcaccttttctttgaccatctggagtctggggcaacttaaggaggcaccacacagtggtgcaggcacatttccaagcgtaggtgtccctggcttttgtggccaaagctagtgttatggtcaacaacaggccagggtctgtggggcactgaccttgaaagtggcaaaatggaggtttcacaggctgtgcgggagcaggacggcttgcttcatctaacaatctcagtttcctttaaaaaaagaaagaaaggaaaagatttcataagcaggtgtcagtggacagtttaagtacttaaccatttctctttcttcttatggatgtgaactgtgctgtggataaatcatttgtatttcttgaatgttctctatgactaacagttattaagtcggttgtgtatatgtgtaactaatgtaactgccttttaaaatttcattacaataaaaatgactttgctctgaacaacaaaaaaaaaaaaaaaaaaaa

SEQ ID NO: 40 - DNA, 2812 bp, Homo sapiens
ggaaagtaggttagtggtgcgacatttagggaaggcagaaagtaggtcagggacggaggtgcctgtttacccgcgccggactcaccgccgccgccgccgcgggatccgagtgcgggcgcgggcgcgggcgctcccggcgagccacggtggtgctggctagagtgtatacgtttggacccaagcttaacttttccaatgtggaatcctgggccttcattggttccgatgtcataggaatctacgctagagggcttcctgtgtgccgggcactgtggtttttggaagaagctgaccgcctgaaaagaaattataaaacatgaaaatcgctttgaggtgaccaagtccagaggcccctaactcctcccaagctggatctggggtgtaagaactgtgacttcagatcatccaatggcagaccagagaatggacatttcttcaaccatcagtgatttcatgtccccgggccccaccgacctgctttccagctctcttggtaccagtggtgtggattgcaaccgcaaacggaaaggcagctccactgactaccaagaaagcatggacacagacaaagatgaccctcatggaaggttagaatatacagaacaccaaggaaggataaaaaatgcaagggaagctcacagtcagattgaaaagcggcgtcgggataaaatgaacagttttatagatgaattggcttctttggtaccaacatgcaacgcaatgtccaggaaattagataaacttactgtgctaaggatggctgttcagcacatgaaaacattaagaggtgccaccaatccatacacagaagcaaactacaaaccaacttttctatcagacgatgaattgaaacacctcattctcagggcagcagatggatttttgtttgtcgtaggatgtgaccgagggaagatactctttgtctcagagtctgtcttcaagatcctcaactacagccagaatgatctgattggtcagagtttgtttgactacctgcatcctaaagatattgccaaagtcaaggagcagctctcctcctctgacaccgcaccccgggagcggctcatagatgcaaaaactggacttccagttaaaacagatataacccctgggccatctcgattatgttctggagcacgacgttctttcttctgtaggatgaagtgtaacaggccttcagtaaaggttgaagacaaggacttcccctctacctgctcaaagaaaaaagatcgaaaaagcttctgcacaatccacagcacaggctatttgaaaagctggccacccacaaagatggggctggatgaagacaacgaaccagacaatgaggggtgtaacctcagctgcctcgtcgcaattggacgactgcattctcatgtagttccacaaccagtgaacggggaaatcagggtgaaatctatggaatatgtttctcggcacgcgatagatggaaagtttgtttttgtagaccagagggcaacagctattttggcatatttaccacaagaacttctaggcacatcgtgttatgaatattttcaccaagatgacataggacatcttgcagaatgtcataggcaagttttacagacgagagaaaaaattacaactaattgctataaatttaaaatcaaagatggttcttttatcacactacggagtcgatggttcagtttcatgaacccttggaccaaggaagtagaatatattgtctcaactaacactgttgttttagccaacgtcctggaaggcggggacccaaccttcccacagctcacagcatccccccacagcatggacagcatgctgccctctggagaaggtggcccaaagaggacccaccccactgttccagggattccagggggaacccgggctggggcaggaaaaataggccgaatgattgctgaggaaatcatggaaatccacaggataagagggtcatcgccttctagctgtggctccagcccattgaacatcacgagtacgcctccccctgatgcctcttctccaggaggcaagaagattttaaatggagggactccagacattccttccagtggcctactatcaggccaggctcaggagaacccaggttatccatattctgatagttcttctattcttggtgagaacccccacataggtatagacatgattgacaacgaccaaggatcaagtagtcccagtaatgatgaggcagcaatggctgtcatcatgagcctcttggaagcagatgctggactgggtggccctgttgactttagtgacttgccatggccgctgtaaacactacatgttgctttggcaacagctatagtatcaaagtgcattactggtggagttttacagtctgtgaagcttactggataaggagagaatagcttttatgtactgacttcataaaagccatctcagagccattgatacaagtcaatcttactatatgtaacttcagacaaagtggaactaagcctgctccagtgtttcctcatcattgattattgggctagctgtggatagcttgcattaattgtatattttggattctgtttgtgttgaattttttaatcattgtgcacagaagcatcattggtagcttttatatgcaaatggtcatttcagatgtatggtgtttttacactacaaagaagtcccccatgtggatatttcttatactaattgtatcataaagccgtttattcttccttgtaagaatcctttactataaatatgggttaaagtataatgtactagacagttaaatatttttaataaatgtttcccttgttctataaaaaaaaaaaaaaaaaaa

SEQ ID NO: 41 - DNA, 1930 bp, Homo sapiens
gaccaagtggctcctgcgatggcggcggaagaggaggctgcggcgggaggtaaagtgttgagagaggagaaccagtgcattgctcctgtggtttccagccgcgtgagtccagggacaagaccaacagctatggggtctttcagctcacacatgacagagtttccacgaaaacgcaaaggaagtgattcagacccatcccagtcaggaatcatgacagaaaaagtggtggaaaagctttctcagaatccccttacctatcttctttcaacaaggatagaaatatcagcctccagtggcagcagagtggaagatggtgaacaccaagttaaaatgaaggccttcagagaagctcatagccaaactgaaaagcggaggagagataaaatgaataacctgattgaagaactgtctgcaatgatccctcagtgcaaccccatggcgcgtaaactggacaaacttacagttttaagaatggctgttcaacacttgagatctttaaaaggcttgacaaattcttatgtgggaagtaattatagaccatcatttcttcaggataatgagctcagacatttaatccttaagactgcagaaggcttcttatttgtggttggatgtgaaagaggaaaaattctcttcgtttctaagtcagtctccaaaatacttaattatgatcaggctagtttgactggacaaagcttatttgacttcttacatccaaaagatgttgccaaagtaaaggaacaactttcttcttttgatatttcaccaagagaaaagctaatagatgccaaaactggtttgcaagttcacagtaatctccacgctggaaggacacgtgtgtattctggctcaagacgatcttttttctgtcggataaagagttgtaaaatctctgtcaaagaagagcatggatgcttacccaactcaaagaagaaagagcacagaaaattctatactatccattgcactggttacttgagaagctggcctccaaatattgttggaatggaagaagaaaggaacagtaagaaagacaacagtaattttacctgccttgtggccattggaagattacagccatatattgttccacagaacagtggagagattaatgtgaaaccaactgaatttataacccggtttgcagtgaatggaaaatttgtctatgtagatcaaagggcaacagcgattttaggatatctgcctcaggaacttttgggaacttcttgttatgaatattttcatcaagatgaccacaataatttgactgacaagcacaaagcagttctacagagtaaggagaaaatacttacagattcctacaaattcagagcaaaagatggctcttttgtaactttaaaaagccaatggtttagtttcacaaatccttggacaaaagaactggaatatattgtatctgtcaacactttagttttgggacatagtgagcctggagaagcatcatttttaccttgtagctctcaatcatcagaagaatcctctagacagtcctgtatgagtgtacctggaatgtctactggaacagtacttggtgctggtagtattggaacagatattgcaaatgaaattctggatttacagaggttacagtcttcttcataccttgatgattcgagtccaacaggtttaatgaaagatactcatactgtaaactgcaggagtatgtcaaataaggagttgtttccaccaagtccttctgaaatgggggagctagaggctaccaggcaaaaccagagtactgttgctgtccacagccatgagccactcctcagtgatggtgcacagttggatttcgatgccctatgtgacaatgatgacacagccatggctgcatttatgaattacttagaagcagaggggggcctgggagaccctggggacttcagtgacatccagtggaccctctagc

SEQ ID NO: 42 - DNA, 2885 bp, Homo sapiens
ttgtcctgagcgcggagagggcgagctcgggccgcgggcagggcgggagccggcagccggcaaccaagggaggcagaaaggcacaaagatcgcaataatatccgttataacccgctatctaaccccacccccaacacacacccatccatcccaccctccgggagaggcagccggcgatccgctctctgcgccctgggaaaaagccccagccatgagcaatcagtaccaggaggagggctgctccgagaggcccgagtgcaaaagtaaatctccaactttgctctcctcctactgcatcgacagcatcctgggccggaggagcccgtgcaaaatgcggttgctgggagccgcgcagagcttgcctgctccgctgaccagccgcgccgacccggaaaaggccgtgcaaggctcccctaagagcagcagcgccccgttcgaggccgagctgcacctgccgcccaagctgcggcgcctgtacggcccgggcgggggccgcctccttcagggtgcggcagcggcggcggcggcggcggcggcggcggcggcagcggccgccacggccacggcgggtccacgcggggaggcccctccgccgccaccgccaaccgcgcggcccggggaacggccggacggcgcaggggccgccgcggcagccgcggccgcggccgccgcggcctgggacacgctcaagatcagccaggcgccgcaggtgagcatcagccgcagcaagtcgtaccgcgagaacggggcgcccttcgtgccgccgccgcccgcgctggacgagctgggcggcccggggggcgtcacgcacccggaggagcgcctcggcgtggccggcggcccgggcagcgccccggctgcgggtggtggcaccggcaccgaggacgacgaggaggagctgctggaggacgaagaagatgaggacgaggaagaggaactgctggaggacgacgaggaggagctgctggaggacgacgcccgcgcgctgctcaaggagccccggcgctgtcctgtggccgccactggcgccgtggccgcagcagctgccgctgcagtggccacagagggcggggagctgtcacccaaggaggagctgctgctgcacccggaagacgctgagggcaaggacggcgaggacagcgtgtgcctctctgcgggcagcgactcggaggaggggctgctgaaacgcaaacagaggcgctaccgcaccacgttcaccagctaccagctggaggaactggagcgggccttccagaagacgcactacccggacgtcttcaccagggaggaactggccatgaggctggacttgaccgaggcccgagtccaggtctggttccagaaccgtcgggccaagtggcgcaagcgggagaaggcaggcgcgcagacccacccccctgggctgcccttcccggggccgctctccgccacccacccgctcagcccctacctggacgccagccccttccctccgcaccacccggcgctcgactccgcttggactgccgctgccgccgccgccgccgccgccttcccgagcctacctccgcctccgggctcggccagcctgccgcccagcggggcgccgctgggcctgagcactttcctcggagcggcagtgttccgacacccagctttcatcagcccggcattcggcaggctcttttccacaatggcccccctgaccagcgcgtcgaccgcggccgcgctcctgagacagcccacacccgccgtggagggcgcagtggcatcgggcgccctggccgacccggccacggcggccgcagacagacgcgcctctagcatagccgcgctgaggctcaaggccaaggagcacgcggcgcagctcacgcagctcaacatcctgccgggcaccagcacgggcaaggaggtgtgctaaaggctgccctccacacccgcgccccgcgcgcgccccgaaaggtcacctcactcagcaccactcaagaccaaatggaaacagaggaccagcacactcccgagacggcactgagagagcgcagccgccttcacagcagtctggatgcgggcatggcagccctcggcgctccgggacgtggcacctcctcggctggctgtccacccgcccctgcccctgcccctgctactgccaacctcgctccaactccaacatccactctctcttgttcttactttcctgaaaatatcggggaggttttctcccccagacgcctgatattgaagtaaaaaatttaaaaagcccaacctcttcctcctgacaccccacttagcctttcttttctttctttctttctttcttttttttttttaaatagcattttggcgctcgaagttgatctccccagcgagggccccagcgtgaagccagggcccgggaagcaaatgcgagcctgtaagatagctaacagtgcacttaaaggaaaggggcgtcttgttcttgttctcttctttatcatacaccaaccaaggtttttatatcaaaccaaagggaaataatactctgctagaatatggactgttgaagtcaccaaactgtgattattgattctgtacataccattgttattaaaaaaaaaaaaaaaagaacagagctttgtatatttgaaatgttataacgcaattgcactcagcgtggtatggtaaaagtttgtcctcccgtagattcttactgtgttgtagatacggtagggttcctagacaaatatttatgtactcaagccctttatttaacttattaactgtagaggcttccgaaaccttcaagataaaggcaatggtacagtacttttgtgtaatgtgtaattgttaccacttttccttgctatctagtggagaagtgtcacgctcaaaataaaaaaattatatgtttaacaaaaaaaaaaaaa

SEQ ID NO: 43 - DNA, 2490 bp, Homo sapiens
agcactctctcacttctggccagggaacgtggaaggcgcaccgacagggatccggccagggagggcgagtgaaagaaggaaatcagaaaggaagggagttaacaaaataataaaaacagcctgagccacggctggagagaccgagacccggcgcaagagagcgcagccttagtaggagaggaacgcgagacgcggcagagcgcgttcagcactgacttttgctgctgcttctgcttttttttttcttagaaacaagaaggcgccagcggcagcctcacacgcgagcgccacgcgaggctcccgaagccaacccgcgaagggaggaggggagggaggaggaggcggcgtgcagggaggagaaaaagcattttcactttttttgctcccactctaagaagtctcccggggattttgtatatattttttaacttccgtcagggctcccgcttcatatttccttttctttccctctctgttcctgcacccaagttctctctgtgtccccctcgcgggccccgcacctcgcgtcccggatcgctctgattccgcgactccttggccgccgctgcgcatggaaagctctgccaagatggagagcggcggcgccggccagcagccccagccgcagccccagcagcccttcctgccgcccgcagcctgtttctttgccacggccgcagccgcggcggccgcagccgccgcagcggcagcgcagagcgcgcagcagcagcagcagcagcagcagcagcagcagcaggcgccgcagctgagaccggcggccgacggccagccctcagggggcggtcacaagtcagcgcccaagcaagtcaagcgacagcgctcgtcttcgcccgaactgatgcgctgcaaacgccggctcaacttcagcggctttggctacagcctgccgcagcagcagccggccgccgtggcgcgccgcaacgagcgcgagcgcaaccgcgtcaagttggtcaacctgggctttgccacccttcgggagcacgtccccaacggcgcggccaacaagaagatgagtaaggtggagacactgcgctcggcggtcgagtacatccgcgcgctgcagcagctgctggacgagcatgacgcggtgagcgccgccttccaggcaggcgtcctgtcgcccaccatctcccccaactactccaacgacttgaactccatggccggctcgccggtctcatcctactcgtcggacgagggctcttacgacccgctcagccccgaggagcaggagcttctcgacttcaccaactggttctgaggggctcggcctggtcaggccctggtgcgaatggactttggaagcagggtgatcgcacaacctgcatctttagtgctttcttgtcagtggcgttgggagggggagaaaaggaaaagaaaaaaaaaagaagaagaagaagaaaagagaagaagaaaaaaacgaaaacagtcaaccaaccccatcgccaactaagcgaggcatgcctgagagacatggctttcagaaaacgggaagcgctcagaacagtatctttgcactccaatcattcacggagatatgaagagcaactgggacctgagtcaatgcgcaaaatgcagcttgtgtgcaaaagcagtgggctcctggcagaagggagcagcacacgcgttatagtaactcccatcacctctaacacgcacagctgaaagttcttgctcgggtcccttcacctcctcgccctttcttaaagtgcagttcttagccctctagaaacgagttggtgtctttcgtctcagtagcccccaccccaataagctgtagacattggtttacagtgaaactatgctattctcagccctttgaaactctgcttctcctccagggcccgattcccaaaccccatggcttccctcacactgtcttttctaccattttcattatagaatgcttccaatcttttgtgaattttttattataaaaaatctatttgtatctatcctaaccagttcggggatatattaagatatttttgtacataagagagaaagagagagaaaaatttatagaagttttgtacaaatggtttaaaatgtgtatatcttgatactttaacatgtaatgctattacctctgcatattttagatgtgtagttcaccttacaactgcaattttccctatgtggttttgtaaagaactctcctcataggtgagatcaagaggccaccagttgtacttcagcaccaatgtgtcttactttatagaaatgttgttaatgtattaatgatgttattaaatactgttcaagaagaacaaagtttatgcagctactgtccaaactcaaagtggcagccagttggttttgataggttgccttttggagatttctattactgcctttttttttcttactgttttattacaaacttacaaaaatatgtataaccctgttttatacaaactagtttcgtaataaaactttttcctttttttaaaatgaaaataaaaaaaa

SEQ ID NO: 44 - DNA, 1864 bp, Homo sapiens
ctggcggctcttgggactggcggggctgcgcgcggggttagggtgggggtacgggaaggctcaacccaggacctgcgtaccttgctttgggggcgcactaagcacctgccgggagcagggggcgcaccgggaactcgcagatttcgccagttgggcgcactggggatctgtggactgcgtccgggggatgggctagggggacatgcgcacgctttgggccttacagaatgtgatcgcgcgagggggagggcgaagcgtggcgggagggcgaggcgaaggaaggagggcgtgagaaaggcgacggcggcggcgcggaggagggttatctatacatttaaaaaccagccgcctgcgccgcgcctgcggagacctgggagagtccggccgcacgcgcgggacacgagcgtcccacgctccctggcgcgtacggcctgccaccactaggcctcctatccccgggctccagacgacctaggacgcgtgccctggggagttgcctggcggcgccgtgccagaagcccccttggggcgccacagttttccccgtcgcctccggttcctctgcctgcaccttcctgcggcgcgccgggacctggagcgggcgggtggatgcaggcgcgatggacggcggcacactgcccaggtccgcgccccctgcgccccccgtccctgtcggctgcgctgcccggcggagacccgcgtccccggaactgttgcgctgcagccggcggcggcgaccggccaccgcagagaccggaggcggcgcagcggccgtagcgcggcgcaatgagcgcgagcgcaaccgcgtgaagctggtgaacttgggcttccaggcgctgcggcagcacgtgccgcacggcggcgccagcaagaagctgagcaaggtggagacgctgcgctcagccgtggagtacatccgcgcgctgcagcgcctgctggccgagcacgacgccgtgcgcaacgcgctggcgggagggctgaggccgcaggccgtgcggccgtctgcgccccgcgggccgccagggaccaccccggtcgccgcctcgccctcccgcgcttcttcgtccccgggccgcgggggcagctcggagcccggctccccgcgttccgcctactcgtcggacgacagcggctgcgaaggcgcgctgagtcctgcggagcgcgagctactcgacttctccagctggttagggggctactgagcgccctcgacctatgagcctcagccccggaagccgagcgagcggccggcgcgctcatcgccggggagcccgccaggtggaccggcccgcgctccgcccccagcgagccggggacccacccaccaccccccgcaccgccgacgccgcctcgttcgtccggcccagcctgaccaatgccgcggtggaaacgggcttggagctggccccataagggctggcggcttcctccgacgccgcccctccccacagcttctcgactgcagtggggcggggggcaccaacacttggagatttttccggaggggagaggattttctaagggcacagagaatccattttctacacattaacttgagctgctggagggacactgctggcaaacggagacctatttttgtacaaagaacccttgacctggggcgtaataaagatgacctggacccctgcccccactatctggagttttccatgctggccaagatctggacacgagcagtccctgaggggcggggtccctggcgtgaggcccccgtgacagcccaccctggggtgggtttgtgggcactgctgctctgctagggagaagcctgtgtggggcacacctcttcaagggagcgtgaactttataaataaatcagttctgtttaaaaaaaaaaaaaaaa

SEQ ID NO: 45 - DNA, 650 bp, Homo sapiens
ttaagtccaactcagcccaaaatacagcatcctgacgacaaaactcaggttaaagaggaaatgatggacaacagaggcaactctagtctacctgacaaacttcctatcttccctgattctgcccgcttgccactgaccaggtccttctatctggagcccatggtcactttccacgtgcacccagaggccccggtgtcatccccttactctgaggagctgccacggctgccttttcccagcgactctcttatcctgggaaattacagtgaaccctgccccttctctttcccgatgccttatccaaattacagagggtgcgagtactcctacgggccagccttcacccggaaaaggaatgagcgggaaaggcagcgggtgaaatgtgtcaatgaaggctatgcccagctccgccatcatctgccagaggagtatttggagaagcgactcagcaaagtggaaaccctcagagctgcgatcaagtacattaactacctgcagtctcttctgtaccctgataaagctgagaccaagaataaccctggaaaagtttcctccatgatagcaaccaccagccaccatgctgaccctatgttcagaattgtttgagttgctgtttccaaatagaaatgaataatatcacaaaatggggt

SEQ ID NO: 46 - DNA, 11784 bp, Homo sapiens
aggagtggaaggttgaggggggcgctaggcgcccttcgctccctccctctggaggagctgccgccgccaccgccgccactctgctgctgccgccgccgccgccgccgctcccgccgccattttgggttcgctttgcggaggggagacgatcccagtctcggttgcgggacccgcctcccctcagtttgccccctttagccttccacctttcccttctcctctctcgcatttccgccagtcagcttacccgctggccgcctcctgacaagcgggagggatccgccgtggacccagggaagcggaggagcctggcggccaccccctcttccccacttccctgcactctcatcgctctcggcctcggcctcggcctccgacacgagaaagatgctggtttcgagttttggagatccttgttttttatggaacacagttctgtaaaattttcataagattccttggcaataacatacgcttgtgatggaccctagaaatactgctatgttaggattgggttctgattccgaaggtttttcaagaaagagtccttctgccatcagtactggcacattggtcagtaagagagaagtagagctagaaaaaaacacaaaggaggaagaggaccttcgcaaacggaatcgagaaagaaacatcgaagctgggaaagatgatggtttgactgatgcacagcaacagttttcagtgaaagaaacaaacttttcagagggaaatttaaaattgaaaattggcctccaggctaagagaactaaaaaacctccaaagaacttggagaactatgtatgtcgacctgccataaaaacaactattaagcacccaaggaaagcacttaaaagtggaaagatgacggatgaaaagaatgaacactgtccttcaaaacgagacccttcaaagttgtacaagaaagcagatgatgttgcagccattgaatgccagtctgaagaagtcatccgtcttcattcacagggagaaaacaatcctttgtctaagaagctgtctccagtacactcagaaatggcagattatattaatgcaacgccatctactcttcttggtagccgggatcctgatttaaaggacagagcattacttaatggaggaactagtgtaacagaaaagttggcacagctgattgctacctgtcctccttccaagtcttccaagacaaaaccgaagaagttaggaactggcactacagcaggattggttagcaaggatttgatcaggaaagcaggtgttggctctgtagctggaataatacataaggacttaataaaaaagccaaccatcagcacagcagttggattggtaactaaagatcctgggaaaaagccagtgtttaatgcagcagtaggattggtcaataaggactctgtgaaaaaactgggaactggcactacagcggtattcattaataaaaacttaggcaaaaagccaggaactatcactacagtaggactgctaagcaaagattcaggaaagaagctaggaattggtattgttccaggtttagtgcataaagagtctggcaagaagttaggacttggcactgtggttggactggttaataaagatttgggaaagaaattgggttctactgttggcctagtggccaaggactgtgcaaagaagattgtagcaagttcagcaatgggattggttaataaggacattggaaagaaactaatgagttgtcctttggcaggtctgatcagtaaagatgccataaaccttaaagccgaagcactgctccccactcaggaaccgcttaaggcttcttgtagtacaaacatcaataatcaggaaagtcaggaactttctgaatccctgaaagatagtgccaccagcaaaacttttgaaaagaatgttgtacggcagaataaagaaagcatattggaaaagttctcagtacgaaaagaaatcattaatttggagaaagaaatgtttaatgaaggaacatgcattcagcaagacagtttctcatccagtgaaaagggatcttatgaaacctcaaagcatgaaaagcagcctcctgtatattgcacttctccggactttaaaatgggaggtgcttctgatgtatctaccgctaaatccccattcagtgcagtaggagaaagcaatctcccttccccatcacctactgtatctgttaatcctttaaccagaagtccccctgaaacttcttcacagttggctcctaatccattacttttaagttctactacagaactaatcgaagaaatttctgaatctgttggaaagaaccagtttacttctgaaagtacccacttgaacgttggtcataggtcagttggtcatagtataagtattgaatgtaaagggattgataaagaggtaaatgattcaaaaactacccatatagatattccaagaataagctcttcccttggaaaaaagccaagtttgacttctgaatccagcattcatactattactccttcagttgttaacttcactagtttatttagtaataagccttttttaaaactgggtgcagtatctgcatcagacaaacactgccaagttgctgaaagcctaagtactagtttgcagtccaaaccattaaaaaaaagaaaaggaagaaaacctcggtggactaaagtggtggcaagaagcacatgccggtctccaaaagggctagaattagaaagatcagagctttttaaaaacgtttcatgtagctcactatcaaatagtaattctgagccagccaagtttatgaaaaacattggacccccttcatttgtagatcatgacttccttaaacgccgattgccaaagttgagcaaatccacagctccatctcttgctctcttagctgatagtgaaaaaccatctcataagtcttttgctactcacaaactatcctccagtatgtgtgtctctagtgaccttttgtctgatatttataagcccaaaagaggaaggcctaaatctaaggagatgcctcaactggaagggccacctaaaaggactttaaaaatccctgcttctaaagtgttttctttacagtctaaggaagaacaagaacccccaattttacagccagaaattgaaatcccttccttcaaacaaggtctgtctgtgtctccttttccaaaaaagagaggcaggcctaagaggcaaatgaggtcaccagtcaagatgaagccacctgtactgtcagtggctccatttgttgccactgaaagtccaagcaagctagaatctgaaagtgacaaccatagaagtagcagtgatttctttgagagcgaggatcaacttcaggatccagatgacctagatgacagtcataggccaagtgtctgtagtatgagtgaccttgagatggaaccagataaaaaaattaccaagagaaacaatggacaattaatgaaaacaattatccgcaaaataaataaaatgaagactttaaagagaaagaaactgttgaatcagattctttcaagttctgtagaatcaagtaataaagggaaagtgcaatccaaactccataatacggtatcaagtcttgctgccacatttggctctaaattgggccaacagataaatgtcagcaagaaaggaaccatttatataggaaagagaagaggtcgcaaaccaaaaactgtcttaaatggtattctttctggtagtcctactagccttgctgttcttgagcaaacagctcaacaggcagctgggtcagcattaggacagattcttcccccattactgccttcatctgctagtagttctgagattcttccatcacctatttgctctcagtcttctgggactagtggaggtcagagccctgtaagtagtgatgcaggttttgttgaacccagttcagtgccatatttgcatttacactccagacagggcagtatgattcagactcttgcaatgaagaaggcctcaaaggggaggaggcggttatctcctcctactttgttgccaaattctccttcgcacttgagtgaactcacatctctaaaagaagctactccttccccaatcagtgagtctcatagtgatgagaccattcccagtgatagtggaattggaacagataataacagcacatcagacagggcagagaaattttgtgggcaaaaaaagaggaggcattcttttgagcatgtttctctgattccccctgaaacctctacagtgctaagcagtcttaaagaaaaacataaacacaaatgtaagcgcaggaatcatgattacctcagctatgacaagatgaaaaggcagaaacgaaaacggaaaaagaaatatccccagcttcgaaatagacaggatccagactttattgcagagctggaggaactaataagtcgcctaagtgaaattcggatcactcatcgaagtcatcattttatcccccgagatcttctgccaactatctttcgaatcaactttaatagtttctatacacatccttctttccccttagaccctttgcactacattcgaaaacctgacttaaaaaagaaaagagggagaccccctaagatgagggaggcaatggctgaaatgccttttatgcacagccttagttttcctctttctagtactggattctatccatcttatggtatgccttactctccttcaccccttacagctgctcccataggattaggttactatggaaggtatcctcccactctttatccacctcctccatctccttctttcaccacgccacttccacctccttcctatatgcatgctggtcatttacttctcaatcctgccaaataccataagaaaaagcataagctacttcgacaggaggcctttcttacaaccagcaggactcccctcctttccatgagtacctaccccagtgttcctcctgagatggcctatggttggatggttgagcacaaacacaggcaccgtcacaaacacagagaacaccgttcttctgaacaaccccaggtttctatggacactggctcttcccgatctgtcctggaatctttgaagcgctatagatttggaaaggatgctgttggagagcgatataagcataaggaaaagcaccgttgtcacatgtcctgccctcatctctctccttcaaaaagcttaataaacagagaggaacagtgggtccaccgagagccttcagaatctagtccattggccttgggattgcagacacctttacagattgactgttcagaaagttctccaagcttatcccttggaggattcactcccaactctgagccagccagcagtgatgaacatacaaaccttttcacaagtgcaataggcagctgcagagtttcaaaccctaactccagtggccggaagaaattaactgacagccctggactcttttctgcacaggacacttcactaaatcggcttcacagaaaggagtcactgccttctaacgaaagggcagtacagactttggcaggctcccagccaacctctgataaaccctcccagcggccatcagagagcacaaattgtagccctacccggaaaaggtcttcatctgagagtacttcttcaacagtaaacggagttccctctcgaagtccaagattagttgcttctggggatgactctgtggatagtctgctgcagcggatggtacaaaatgaggaccaagagcccatggagaaaagtattgatgctgtgattgcaactgcctctgcaccaccttcttccagtccaggccgtagccacagcaaggaccgaaccctgggaaaaccagacagccttttagtgcctgcagtcacaagtgactcttgcaataatagcatctcactcctatctgaaaagttgacaagcagctgttccccccatcatatcaagagaagtgtagtggaagctatgcaacgccaagctcggaaaatgtgcaattacgacaaaatcttggccacaaagaaaaacctagaccatgtcaataaaatcttaaaagccaaaaaacttcaaaggcaggccaggacagggaataactttgtgaaacgtaggccaggtcgacctcggaaatgtccccttcaggctgtcgtatcaatgcaagcattccaggctgctcagtttgtcaacccagaattgaacagagacgaggaaggagcagcactgcacctcagtcctgacacagttacagatgtaattgaggctgttgttcagagtgtaaatctgaacccagaacataaaaaggggttgaagagaaaaggttggctattggaagaacagaccagaaaaaagcagaagccattaccagaggaagaagagcaagagaataataaaagctttaatgaagcaccagttgagattcccagtccttctgaaaccccagctaaaccttctgaacctgaaagtaccttgcagcctgtgctttctctcatcccaagggaaaagaagcccccacgtcccccaaagaagaagtatcagaaagcagggctgtattctgacgtttacaaaactacagacccaaagagtcgattgatccaattaaagaaagagaagctggagtatactccaggagagcatgaatatggattatttccagcgcccattcatgttggaaagtatctaagacaaaagagaattgacttccagcttccttatgatatcctttggcagtggaaacacaatcagctatacaaaaagccagatgtcccactatataagaaaattcgttcaaatgtctacgttgatgtcaaacccctttctggttacgaagctaccacctgtaactgtaagaagccagatgatgacaccaggaagggctgtgttgatgactgcctcaatagaatgatctttgctgagtgttcccccaacacttgcccatgtggcgagcaatgctgtaaccagaggatacagaggcatgaatgggtgcaatgtctagaacgatttcgagctgaggaaaaaggttggggaatcagaaccaaagagcccctaaaagctgggcagttcatcattgaatacctaggggaggtcgtcagtgaacaggagttcaggaacaggatgattgagcagtatcataatcacagtgaccactactgcctgaacctggatagtgggatggtgattgacagttaccgcatgggaaatgaggcccgattcatcaaccatagctgtgacccaaattgtgaaatgcagaaatggtctgttaatggagtataccggattggactctatgctcttaaagacatgccagctgggactgaactcacttatgattataactttcattccttcaatgtggaaaaacagcaactttgtaagtgtggctttgagaaatgtcgaggaatcatcggaggcaagagtcagcgtgtgaatggactcaccagcagcaaaaacagccagcccatggccacacacaaaaaatctggacggtcaaaagagaagagaaagtctaagcacaagctgaagaaaaggagaggccatctctctgaggaacccagtgaaaatatcaacaccccaactagattgaccccccaattacagatgaagccaatgtccaatcgtgaaaggaactttgtgttaaagcatcatgtattcttggtccgaaactgggagaagattcgtcaaaaacaggaggaagtaaagcacaccagtgataatattcactcagcatcattatatacccgttggaatgggatctgccgagatgatgggaatatcaagtctgatgtcttcatgacccagttctctgccctgcagacagctcgatctgttcgaacaagacggttggcagctgcagaggaaaatattgaagtggctcgggcagcccgcctagcccagatcttcaaagaaatttgtgatggtatcatctcttataaagattcttcccggcaagcactggcagctccacttttgaaccttcccccaaagaaaaagaatgctgattattatgagaagatctctgatcccctagatcttatcaccatagagaagcagatcctcactggttactataagacagtggaagcttttgatgctgacatgctcaaagtctttcggaatgctgagaagtactatgggcgtaaatccccagttgggagagatgtttgtcgtctacgaaaggcctattacaatgcccggcatgaggcatcagcccagattgatgagattgtgggagagacagcaagtgaggcagacagcagtgagacctcagtctctgaaaaggagaatgggcatgagaaggacgacgatgttattcgctgtatctgtggcctctacaaggatgaaggtctcatgatccagtgtgacaagtgcatggtatggcagcactgtgattgtatgggagtgaactcagatgtggagcactacctttgtgagcagtgtgacccaaggcctgtggacagggaggttcccatgatccctcggccccactatgcccaacctggctgtgtctacttcatctgtttgctccgagatgacttgctgcttcgtcagggtgactgtgtgtatctgatgagggatagtcggcgcacccctgatggccacccggtccgtcagtcctatcgactgttatctcacattaaccgagataaacttgacatctttcgcattgagaagctttggaagaatgaaaaagaggaacggtttgcctttggtcaccattatttccgtccccacgaaacacaccactctccatcccgtcggttctatcataatgaactatttcgggtgccactctatgagatcattcccttggaggctgtagtggggacctgctgtgtgttggacctttatacgtattgtaaagggagacccaaaggagtaaaggagcaagatgtgtacatctgtgattatcggcttgacaagtcagcacacctgttttacaagatccaccggaaccgctatcctgtctgcaccaaaccctatgcttttgatcacttccccaagaagctcactcccaaaaaagatttctcgcctcattacgtcccagacaactacaagaggaatggaggacgatcatcctggaagtctgagcgctcaaagccacccctaaaagacttgggccaggaggatgatgctctacccttgattgaagaggttctagccagtcaagagcaagcagccaatgagatacccagcctggaggagccagaacgggaaggggccactgctaacgtcagtgagggtgaaaaaaaaacagaggaaagtagtcaagaaccccagtcaacctgtacccctgaggaacgacggcataaccaacgggaacgactcaaccagatcttgctcaatctccttgaaaaaatccctggaaaaaatgccattgatgtgacctacttgctggaggaaggatcaggcaggaaactgcgaaggcgtactttgtttatcccagaaaacagctttcgaaagtgaccctcaaagaatgagaacctcaagcatctgggatccagtggagctaatcagtcctgcctcctgctctctgggtatagacaggggtgggaagggtccatctgggcaaggggaatggggccatgttgttgacattaggtacttaataagccttggagctagtggagagggagaggaaagggttctgtccaagacagttcaggttaattaattttcttctccattgcttcaccttaagggttaataatgtagagaggagggaggaccacattgatgaccagaacctactggtactttatagcatttgccccaccccacagcttaggtttttctgtcatcctcagatcccacaggcattgcgaagaagctgcttcctatacccaggtataactcaaaatccaaagggatagggccaggatccctattcctaccccatctattctctgttggctccaagagctaccccagagaccttaaacagaaacagtagctgaggcttcttcctagatacctgactagggaagtttgtctctcctttcttgcccaaccaggtcaaagtaaaatgtgagttgacagctcaaagcacttgtaactgctgccccctccctacctctactccccaaaatggaatcatgggatagggaaggcccccatggggtcagaagggcacggtagttcttgcaattatttttgttttacccttcataacctgtcaaacatatttttttctaatgagaaagccaggcccccgccagcacacatgctgtttttaatgcgctgtagttcttgtgtgtctgctgtgctgtgcaaatggagattcagttcaaaataaaatcatttaaaaacctacataaaaagaactctaaacccacccctgcaacaaaagtcactacataaactgttcagcagtattcacctatcagagtatttgttgtgagtatagattatcaattgaaaacactactcttgttttcttaattgtacagttttcaatgtccctttcttaaagagacagtatatttctcttcacccctagcccatcttccctcaccctcctgaatgacatcaggaggtatatccagggtgtctccttccttcctactctcttgaccagaagttaacagactatactgtctctttaaaaataaaatttaaaaagctttgttgtcttttcagacatacatatgcatatatgttttagatgttcttataagagaaaagatggtttttaaatgtgccaagttgtgtgtgtgtgtgtatatatatgtgtgtatgtgtgtgtatatatatatgtgtgtgtgtatatatatacacacacacacacacacctgctgtgtgattggtaagcaatacaatagtaaacatgtccccattacttttttctaatattggaccaatgctgtcctaattgtacatttccccttatggtgacgatgctctgactcgtttaggtagacacattgaccaccttccattccattaaatattttttcctttttcccctttctgtgtcattcttgaggaaaaaacaaaagagagaggggatgccaatgatccccttgagcagagaaaaagcaaaataaatattttattaaagaaaaaagagaattaagaaaatagtttggagtattttcttactgtagagaagcactgtacattactaagagacctgggtataagatactcacatgtggagctggaaaaatcgcatgtccaagcccgtttgagtggtttcttttgtttttcattgcagggagtgggtgggagggaggtgggactaggggcactttgggggtctccttttagtcaaaagcgagaaaatgacaagaaagagattaaaattcaatgtttcctttatagtgttaaacactaaaattttaaaaaagatgaaaaagaaaaaaaaactttgtaaaatgcgagaacagaagcaaaagacactacgctctgtcattttatctttcttttgttgaaagactaaaaaaaaactgaaatgttttttagacaatcaaatgttaggtaagtgcaaaaacttgttttttcttactggtgtagaaattaatgcctttttttatttttcagttattttataataacgaaataaaaagaaccccccagctgccaggcgggttttggtgtttgaaatgcggggcaaagcactacatcactgcaaatagatacagagttagtctgcatgtctgtaggctgtgtgattgcggaaaatataaatgctgctaatatatttcctttttacaaaagcatatctaaatagatgattgttttgatgttaatctttgtaaattatgtattaccaattttaacattggatgtaattgcatacaaagcttgcatctcaatccttgaaagtctagtattaaatggaaaaaacttttcctaactgtggaaaaaaaaaaa

SEQ ID NO: 47 - DNA, 2599 bp, Homo sapiens
cacagcaacgcgcgcgagagaagagagtattctcgcgagaagtccaggggtggccgtgatggcggcggcaggagcaggacctggccaggaagcgggtgccgggcctggcccaggagcggtcgcaaatgcaacaggggcagaagagggggagatgaagccggtggcagcgggagcagccgctcctcctggagaggggatctctgctgctccgacagttgagcccagttccggggaggctgaaggcggggaggcaaacttggtcgatgtaagcggtggcttggagacagaatcatctaatggaaaagatacactagaaggtgctggggatacatcagaggtgatggatactcaggcgggctccgtggatgaagagaatggccgacagttgggtgaggtagagctgcaatgtgggatttgtacaaaatggttcacggctgacacatttggcatagatacctcatcctgtctacctttcatgaccaactacagttttcattgcaacgtctgccatcacagtgggaatacctatttcctccggaagcaagcaaacttgaaggaaatgtgccttagtgctttggccaacctgacatggcagtcccgaacacaggatgaacatccgaagacaatgttctccaaagataaggatattataccatttattgataaatactgggagtgcatgacaaccagacagagacctgggaaaatgacttggccaaataacattgttaaaacaatgagtaaagaaagagatgtattcttggtaaaggaacacccagatccaggcagtaaagatccagaagaagattaccccaaatttggacttttggatcaggaccttagtaacattggtcctgcttatgacaaccaaaaacagagcagtgctgtgtctactagtgggaatttaaatgggggaattgcagcaggaagcagcggaaaaggacgaggagccaagcgcaaacagcaggatggagggaccacagggaccaccaagaaggcccggagtgaccctttgttttctgctcagcgccttccccctcatggctacccattggaacacccgtttaacaaagatggctatcggtatattctagctgagcctgatccgcacgcccctgaccccgagaagctggaacttgactgctgggcaggaaaacctattcctggagacctctacagagcctgcttgtatgaacgggttttgttagccctacatgatcgagctccccagttaaagatctcagatgaccggctgactgtggttggagagaagggctactctatggtgagggcctctcatggagtacggaaaggtgcctggtattttgaaatcactgtggatgagatgccaccagataccgctgccagactgggttggtcccagcccctaggaaaccttcaagctcctttaggttatgataaatttagctattcttggcggagcaaaaagggaaccaagttccaccagtccattggcaaacactactcttctggctatggacagggagacgtcctgggattttatattaatcttcctgaagacacagagacagccaagtcattgccagacacatacaaagataaggctttgataaaattcaagagttatttgtattttgaggaaaaagactttgtggataaagcagagaagagcctgaagcagactccccatagtgagataatattttataaaaatggtgtcaatcaaggtgtggcttacaaagatatttttgagggggtttacttcccagccatctcactgtacaagagctgcacggtttccattaactttggaccatgcttcaagtatcctccgaaggatctcacttaccgccctatgagtgacatgggctggggcgccgtggtagagcacaccctggctgacgtcttgtatcacgtggagacagaagtggatgggaggcgcagtcccccatgggaaccctgaccaggtccctcttttctgtcaaggactttctgggaataatactgggggttttgtttttgtttttgaactgtctcaaatgttctcccaaagatgctaaaaacacagcctctccttttagcaagttaaaaggctgggtaggactgcgggagactgcctgcctttcaccattttctccccacttccagtgactgctcttattttgtgtaccataagccaacaaccgctgactccaggattgcataagccccctgtgaaatcggtgctgtactgcataccctgccagctgtgacttgttatcctactatattttctaaggagtgaataatattgtccgagtaactaacttatttaaaagacatttccttctgtgggcattgactgtatcccacctgttttccaaggaaatggtaacctgtttctgagaacacctgaaatcaatggctatacattccaaaccaatctaaacgctatttccttttggtgtgggtttggttttgttcattttgaaatacacttttgaacactgagatccgtaaaactactagatctctggaagtgtaattgtgaaagaaacttgcttgcagctttaacaaaatgagaaacttcccaaataaaacttgttttgaagtttatgtgacaaaaaaaaaaaaaaaa

SEQ ID NO: 48 - DNA, 16064 bp, Homo sapiens
ccgcgcgtccctgtgcgtccccgggtccctgcgggcgggcgggcgcggtcgccgccgagcaacccggcctgcgcccggcacgactgtagatgtcaggctttgcccggggagccgagcggcagcggggctgtgagtttcaaattaaccttccgctttgttgctgtgtaatgtggatccccgaaggccccccgccccgcccgccccccttccccgggcggtgcgcgctgcaaactgcgagttgggcttcatttacataaagcgattccgggcgggcggcggcagaggaggaggcggcggcggcgggcaggccggggacccggacgccagcgccgcgccccgtgggtgaatccccgccgcgtcccggggacctccctccggggacgggccgaccgccagccctgccgccaccatgagctcccctcccctgtctccgggccccctgctcctgaccagagccacctccgagtcctggggccagcgggaggtggggagcatgccgcctggggtgggtgagctcggggctcgggtgccactggaatttcccgttgttgcgcatggcggcgcggcccccggacctgcaagtgccgcctccctccggaggtgcgcggaggcttggtgtgccaggtccgagcctccgtactgggtgcaatgaaagctccacgcaggccttaccatggaaggctgtgactcgcccgtcgtctcggggaaggacaatgggtgcggtatccctcagcaccagcaatggactgaactcaacagcacccacctccctgacaaacccagtagcatggagcagtccacaggcgagagccacgggcccttggacagcctgagggcccccttcaatgagcgcctcgcggagagcaccgcgtcggccgggcccccctccgagcccgccagcaaggaggtcacctgcaacgaatgttcggcctcctttgccagcctccagacctacatggagcaccactgccccagcgcgcgccccccgccacccctgagagaggagagcgccagcgacaccggtgaggagggggacgaggagagtgacgtggagaacctggccggggagatcgtctaccagccggacggctccgcgtacattgtggagagcctgagccagctgacccagggcgggggcgcctgtgggagtggcagtggcagtgggcctctcccctcgcttttcctgaactctctccctggcgcggggggcaagcaaggggacccttcgtgtgctgcacccgtgtacccgcagatcatcaacactttccacatagcctcatccttcgggaaatggtttgagggcccagaccaggctttcccgaatacctcagccctggcggggctcagccccgtcctgcacagcttccgcgtgtttgacgtgcgacacaaaagcaacaaggattacctgaacagcgacggttctgccaaaagctcctgcgtatccaaagatgttcccaacaatgtggacctgtccaaattcgatggctttgtgctctatggcaagaggaagcccatcctgatgtgtttcttgtgcaaactctcctttgggtacgtccgttcgtttgtgacccacgcggtgcatgaccatcgaatgaccctgagcgaagacgagcggaaaattcttagcaataagaacatctccgctatcatccaagggatcggcaaagacaaggaaccccttgtaagttttctggaaccaaaaaacaaaaactttcaacaccctttagtttccacagctaacctcataggccccggacacagtttttatggtaaatttagtggcattcgaatggaaggggaggaagctctcccagcgggctccgccgctggccccgagcagccccaggctggtctcttgacccccagcaccctgttgaaccttggcgggctcaccagctcggtactgaagacccccattacctcagtccccctggggcctctggcttccagtcctaccaaatcctcagagggcaaggactctggggcggcagaaggagagaagcaggaagtgggcgacggggattgcttctctgagaaggtagagccagccgaagaggaggcggaggaggaagaggaggaggaagaggcggaggaggaggaggaagaagaggaggaggaagaagaggaggaggaagacgagggttgcaaaggactctttccaagcgagttggatgaggaactggaggacaggccccatgaggagcctggggccgcagcaggtagtagcagcaaaaaggaccttgctctctcaaaccaaagcatttctaactcccccttaatgcctaacgtgctccagaccctgtcgaggggcacagcttctactagttctaattctgcttcttcctttgttgtctttgatggtgcgaacaggaggaatcgtttaagctttaacagtgagggcgtcagggccaatgtggcagagggcggcaggaggctggacttcgctgacgaaagtgccaataaagacaatgccacagcaccagaaccaaatgaaagcacagagggtgacgatgggggcttcgttccccatcaccagcacgctggctccctctgcgagcttggggttggggagtgcccctcggggagtggcgtggagtgccccaaatgcgacacggtcctgggctcctcccgctcgctgggcggccacatgaccatgatgcattctcgtaactcgtgtaagacactcaagtgccccaagtgcaactggcactataagtaccagcagaccctggaggcacacatgaaggagaagcacccggagccggggggctcctgtgtctactgcaaaagcgggcagccccacccccggctggcacgaggcgagagctacacgtgtggttacaagcctttccgctgcgaggtgtgtaactactccacaactaccaaaggcaacctcagtattcatatgcagtctgacaagcatctcaacaacatgcagaacctgcagaatggagggggggagcaggtcttcagccacactgccggggcggcggcggcggcggtggctgcggcggcggcggcagccaatatcagtagctcctgcggggccccctcgccgaccaaaccaaaaaccaaacccacctggcggtgcgaggtgtgtgattatgagaccaacgtggccaggaacctccgcattcacatgaccagtgagaagcacatgcataacatgatgttactgcaacagaacatgacccagatccaacacaaccgccacctgggcctcggcagcctgccctcacccgccgaggccgagctctaccaatactacctggcccagaacatgaacctgcccaacctgaagatggacagtgctgcctcggacgcccagttcatgatgagcggattccagctggatcccgccgggcccatggccgccatgacgcctgctctagtgggcggtgagatccccctagacatgcggctcgggggcgggcagctggtgtcagaggagctgatgaacctgggcgagagcttcatccagaccaacgacccgtcgctgaagctcttccagtgcgccgtctgcaacaagttcacgacggacaacctggacatgctgggcctgcacatgaacgtggagcgcagcctgtcggaggacgagtggaaggcggtgatgggggactcataccagtgcaagctctgccgctacaacacccagctcaaggccaacttccagctgcactgcaagacagacaagcacgtgcagaagtaccagctggtggcccacatcaaggagggcggcaaggccaacgagtggaggctcaagtgtgtggccatcggcaaccccgtgcacctcaagtgcaacgcctgtgactactacaccaacagcctggagaagctgcggctgcacacggtcaactccaggcacgaggccagcctgaagttgtacaagcacctgcagcagcatgagagtggtgtagaaggtgagagctgctactaccactgcgttctgtgcaactactccaccaaggccaagctcaacctcatccagcatgtgcgctccatgaagcaccagcgaagcgagagcctgcgaaagctgcagcggctgcagaagggccttccagaggaggacgaggacctggggcagatcttcaccatccgcaggtgcccctccacggacccagaagaagccattgaagatgttgaaggacccagtgaaacagctgctgatccagaggagcttgctaaggaccaagagggcggagcatcgtccagccaagcagagaaggagctgacagattctcctgcaacctccaaacgcatctccttcccaggtagctcagagtctcccctctcttcgaagcgaccaaaaacagctgaggagatcaaaccggagcagatgtaccagtgtccctactgcaagtacagtaatgccgatgtcaaccggctccgggtgcatgccatgacgcagcactcggtgcaacccatgcttcgctgccccctgtgccaggacatgctcaacaacaagatccacctccagctgcacctcacccacctccacagcgtggcacctgactgcgtggagaagctcattatgacggtgaccacccctgagatggtgatgccaagcagcatgttcctcccagcagctgttccagatcgagatgggaattccaatttggaagaggcaggaaagcagcctgaaacctcagaggatctgggaaagaacatcttgccatccgcaagcacagagcaaagcggagatttgaaaccatcccctgctgacccaggctctgtgagagaagactcaggcttcatctgctggaagaaggggtgcaaccaggttttcaaaacttctgctgcccttcagacgcattttaatgaagtgcatgccaagaggcctcagctgccggtgtcagatcgccatgtgtacaagtaccgctgtaatcagtgtagcctggccttcaagaccattgaaaagttgcagctccattctcagtaccatgtgatcagagctgccaccatgtgctgtctttgtcagcgcagtttccgaactttccaggctctgaagaagcaccttgagacaagccacctggagctgagtgaggctgacatccaacagctttatggtggcctgctggccaatggggacctcctggcaatgggagaccccactctggcagaggaccataccataattgttgaggaagacaaggaggaagagagtgacttggaagataaacagagcccaacgggcagtgactctgggtcagtacaagaagactcgggctcagagccaaagagagctctgcctttcagaaaaggtcccaattttactatggaaaagttcctagacccttctcgcccttacaagtgtaccgtctgcaaggaatctttcactcaaaagaatatcctgctagtacactacaattctgtctcccacctgcataagttaaagagagcccttcaagaatcagcaaccggtcagccagaacccaccagcagcccagacaacaaaccttttaagtgtaacacttgtaatgtggcctacagccagagttccactctggagatccatatgaggtctgtgttacatcaaaccaaggcccgggcagccaagctggaggctgcaagtggcagcagcaatgggactgggaacagcagcagtatttccttgagctcctccacgccaagtcctgtgagcaccagtggcagtaacacctttaccacctccaatccaagcagtgctggcattgctccaagctctaacttactaagccaagtgcccactgagagtgtagggatgccacccctggggaatcctattggtgccaacattgcttccccttcagagcccaaagaggccaatcggaagaaactggcagatatgattgcatccaggcagcagcaacaacagcagcagcaacagcaacaacaacaacaacaacaacaacaacaagcacaaacgctggcccaggcccaggctcaagttcaagctcacctgcagcaggagctgcagcaacaggctgccctgatccagtctcagctgtttaaccccaccctccttcctcacttccccatgacaactgagaccctgctgcaactacagcagcagcagcacctcctcttccctttctacatccccagtgctgagttccagcttaaccccgaggtgagcttgccagtgaccagtggggcactgacactgactgggacaggcccaggcctgctggaagatctgaaggctcaggttcaggtcccacagcagagccatcagcagatcttgccgcagcagcagcagaaccaactctctatagcccagagtcactctgccctccttcagccaagccagcaccccgaaaagaagaacaaattggtcatcaaagaaaaggaaaaagaaagccagagagagagggacagcgccgaggggggagagggcaacaccggtccgaaggaaacactgccagatgccttgaaggccaaagagaagaaagagttggcaccagggggtggttctgagccttccatgctccctccacgcattgcttcagatgccagagggaacgccaccaaggccctgctggagaactttggctttgagttggtcatccagtataatgagaacaagcagaaggtgcagaaaaagaatgggaagactgaccagggagagaacctggaaaagctcgagtgtgactcctgcggcaagttgttttccaacatcttgattttaaagagtcatcaagagcacgttcatcagaattactttcctttcaaacagctcgagaggtttgccaaacagtacagagaccactacgataaactgtacccactgaggccccagaccccagagccaccaccacctccccctccaccccctccacccccacttccggcagcgccgcctcagccggcgtccacaccagccatccccgcatcagccccacccatcacctcacctacaattgcaccggcccagccatcagtgccgctcacccagctctccatgccgatggagctgcccatcttctcgccgctgatgatgcagacgatgccgctgcagaccttgccggctcagctacccccgcagctgggacctgtggagcctctgcctgcggacctggcccaactctaccagcatcagctcaatccaaccctgctccagcagcagaacaagaggcctcgcaccaggatcacagatgatcagctccgagtcttgcggcaatattttgacattaacaactcccccagtgaagagcaaataaaagagatggcagacaagtccgggttgccccagaaagtgatcaagcactggttcaggaacactctcttcaaagagaggcagcgtaacaaggactccccttacaacttcagtaatcctcctatcaccagcctggaggagctcaagattgactcccggcccccttcgccggaacctccaaagcaggagtactggggaagcaagaggtcttcaagaacaaggtttacggactaccagctgagggtcttacaggacttcttcgatgccaatgcttacccaaaggatgatgaatttgagcaactctctaatttactgaaccttccaacccgagtgatagtggtgtggtttcagaatgcccgacagaaggccaggaagaattatgagaatcagggagagggcaaagatggagagcggcgtgagcttacaaatgatagatacattcgaacaagcaacttgaactaccagtgcaaaaaatgtagcctggtgtttcagcgcatctttgatctcatcaagcaccagaagaagctgtgttacaaggatgaggatgaggaggggcaggacgacagccaaaatgaggattccatggatgccatggaaatcctgacgcctaccagctcatcctgcagtaccccgatgccctcacaggcttacagcgccccagcaccatcagccaataatacagcttcctccgctttcttgcagcttacagcggaggctgaggaactggccaccttcaattcaaaaacagaggcaggcgatgagaaaccaaagctggcggaagctcccagtgcacagccaaaccaaacccaagaaaagcaaggacaaccaaagccagagctgcagcagcaagagcagcccgagcagaagaccaacactccccagcagaagctcccccagctggtgtccctgccttcgttgccacagcctcctccacaagcgccccctccacagtgccccttaccccagtcgagccccagtccttcccagctctcccacctgcccctcaagcccctccacacatcaactcctcaacagctcgcaaacctacctcctcagctaatcccctaccagtgtgaccagtgtaagttggcatttccgtcatttgagcactggcaggagcatcagcagctccacttcctgagcgcgcagaaccagttcatccacccccagtttttggacaggtccctggatatgcctttcatgctctttgatcccagtaacccactcctggccagccagctgctctctggggccatacctcagattccagcaagctcagccacttctccttcaactccaacctccacaatgaacactctcaagaggaagctggaggaaaaggccagtgcaagccctggcgaaaacgacagtgggacaggaggagaagagcctcagagagacaagcgtttgagaacaaccatcacaccggaacaactagaaattctctaccagaagtatctactggattccaatccgactcgaaagatgttggatcacattgcacacgaggtgggcttgaagaaacgtgtggtacaagtctggtttcagaacacccgagctcgggaaaggaaaggacagttccgggctgtaggcccagcgcaggcccacaggagatgccctttttgcagagcgctcttcaaagccaagactgctcttgaggctcatatccggtcccgtcactggcatgaagccaagagagctggctacaacctaactctgtctgcgatgctcttagactgtgatgggggactccagatgaaaggagatatttttgacggaactagcttttcccacctacccccaagcagtagtgatggtcagggtgtccccctctcacctgtgagtaaaaccatggaattgtcacccagaactcttctaagcccttcctccattaaggtggaagggattgaagactttgaaagcccctccatgtcctcagttaatctaaactttgaccaaactaagctggacaacgatgactgttcctctgtcaacacagcaatcacagataccacaactggagacgagggcaacgcagataacgacagtgcaacgggaatagcaactgaaaccaaatcctcttctgcacccaacgaagggttgaccaaagcggccatgatggcaatgtctgagtatgaagatcggttgtcatctggtctggtcagcccggccccgagcttttatagcaaggaatatgacaatgaaggtacagtggactacagtgaaacctcaagccttgcagatccctgctccccgagtcctggtgcgagtggatctgcaggcaaatctggtgacagcggagatcggcctgggcagaaacgttttcgcactcaaatgaccaatctgcagctgaaggtcctcaagtcatgctttaatgactacaggacacccactatgctagaatgtgaggtcctgggcaatgacattggactgccaaagagagtcgttcaggtctggttccagaatgcccgggcaaaagaaaagaagtccaagttaagcatggccaagcattttggtataaaccaaacgagttatgagggacccaaaacagagtgcactttgtgtggcatcaagtacagcgctcggctgtctgtacgtgaccatatcttttcccaacagcatatctccaaagttaaagacaccattggaagccagctggacaaggagaaagaatactttgacccagccaccgtacgtcagttgatggctcaacaagagttggaccggattaaaaaggccaacgaggtccttggactggcagctcagcagcaagggatgtttgacaacacccctcttcaggcccttaaccttcctacagcatatccagcgctccagggcattcctcctgtgttgctcccgggcctcaacagcccctccttgccaggctttactccatccaacacagctttaacgtctcctaagccgaacttgatgggtctgcccagcacaactgttccttcccctggcctccccacttctggattaccaaataaaccgtcctcagcgtcgctgagctccccaaccccagcacaagccacgatggcgatgggccctcagcaacccccccagcagcagcagcagcagcagcaaccacaggtgcagcagcctcccccgccgccagcagcccagccgccacccacaccacagctcccactgcaacagcagcagcaacgcaaggacaaagacagtgagaaagtaaaggagaaggaaaaggcacacaaagggaaaggggaacccctgcctgtccccaagaaggagaaaggagaggcccccacggcaactgcagccacgatctcagccccgctgcccaccatggagtatgcggtagaccctgcacagctgcaggccctgcaggccgcgttgacttcggaccccacagcattgctcacaagccagttccttccttactttgtaccaggcttttctccttattatgctccccagatccctggcgccctgcagagcgggtacctgcagcctatgtatggcatggaaggcctgttcccctacagccctgcactgtcgcaggccctgatggggctgtccccaggctccctactgcagcagtaccagcaataccagcagagtctgcaggaggcaattcagcagcagcagcagcggcaactacagcagcagcagcagcaaaaagtgcagcagcagcagcccaaagcaagccaaaccccagtcccccccggggctccttccccagacaaagaccctgccaaagaatcccccaaaccagaagaacagaaaaacaccccccgtgaggtgtcccccctcctgccgaaactccctgaagagccagaagcagaaagcaaaagtgcggactccctctacgaccccttcattgttccaaaggtgcagtacaagttggtctgccgcaagtgccaggcgggcttcagcgacgaggaggcagcgaggagccacctgaagtccctctgcttcttcggccagtctgtggtgaacctgcaagagatggtgcttcacgtccccaccggcggcggcggcggtggcagtggcggcggcggcggcggtggcggcggcggcggcggcggcggctcgtaccactgcctggcgtgcgagagcgcgctctgtggggaggaagctctgagtcaacatctcgagtcggccttgcacaaacacagaacaatcacgagagcagcaagaaacgccaaagagcaccctagtttattacctcactctgcctgcttccccgatcctagcaccgcatctacctcgcagtctgccgctcactcaaacgacagcccccctcccccgtcggccgccgccccctcctccgcttccccccacgcctccaggaagtcttggccgcaagtggtctcccgggcttcggcagcgaagcccccttcttttcctcctctctcctcatcttcaacggttacctcaagttcatgcagcacctcaggggttcagccctcgatgccaacagacgactattcggaggagtctgacacggatctcagccaaaagtccgacggaccggcgagcccggtggagggtcccaaagaccccagctgccccaaggacagtggtctgaccagtgtaggaacggacaccttcagattgtaagctttgaagatgaacaatacaaacaaatgaatttaaatacaaaaattaataacaaaccaatttcaaaaatagactaactgcaattccaaagcttctaaccaaaaaacaaaaaaaaaaaaaaaaagaaaaaaaagaaaaagcgtgggttgttttcccatatacctatctatgccggtgattttacattcttgtctttttcttttcttttaatattaaaaaaaaaaaaaaagccctaaccctgttacattgtgtccttttgaaggtactattggtctgggaaacagaagtccgcagggcctccctaatgtctttggagcttaaaccccttgtatatttgccccttttcaataaacgccccacgctgatagcacagaggagcccggcatgcactgtatgggaaagcagtccaccttgttacagttttaaatttcttgctatcttagcattcagataccaatggcttgctaaaagaaaaaaagaaatgtaatgtctttttattctcaggtcaatcgctcacactttgttttcagaatcattgttttatatattattgttttttcagtttttttttttttttttgttccagaaaagattttttgttttgttaacttaaaaatgggcagaaagtattcaagaaaaacaatgtgaactgctttagctttctggggatttttaaggatagcttttctgctgaagccaatttcaaggggaaaagttaagcactcccactttcaaaaaaaaaaaaaaataataacccacacacacaaagagtgttgaggacttgtagcttaaaaaaaataagttttaaaaactgactttctgtatttatgatagatatgaccatttttggtgttgagtagattgttgcattggaaatgaactgaagcagtatggtagatttaaaaggaaaaaaaaaaaaaaaccttttgtgtacatttagctttttgtatggtccagctgacagctcctcatttgatgttgtcttgttcattcctagcagatgatagattgcaatccgttgattcgcctaagcttttctccccttgtcccttaattccactttctctttcttgtcccttaattccactttctctttccttctcccacctcccgtcctataatctcccacttaaggtagctgccttcatttcttagagggagctgcagaattattttataaaactaaagaaagaatttcaagggattctaggggtcattaggatcctcacagattatttttggttggggagttgaaactttttaaaggcatataattctagttacctgtgtctgttagctttgtgcatttattttttatttatccttcttttggcttttttttctttgtaccccttcttttcctccttgtttggtaggagcttcaaatattctttttttttctatactaaaggatttgtttccatttgtgtaattggctgtgtacttttcttttctaaaaaaagtttttggttagggatttggtttttggttttgtgtttgttttttctttcctctctcagaaaaaaaaatttcatgctttaaataaaatccaaagacacaccctttcactgctgatgcagaaaaaagggaaagggttcttgttacttgagaatttgtttctgatttaaacaaacaagacttagtttaataaaagaaagagaaaaacaaaagattcccaggttgttatgtgcttcttctgcaagcagagaggcaaatgttaatgacaattccatataccaaaagacacattttttacttcaaagttttgtccttgtgttaggcagtctgagcagcgagtgatccagagcgcagccaacaaagcagcagatagcagtgtacagaaagcaaaaaaggaactgtatgtgaggcacttgtttctgttaatatccatattcctgttaacacacaccctttctcatgtaaaaagaaaaataaataaatggtctgaactttgaaaactttgtgctgctaaaacatagattttggagacaaataaatagatgctttgctgtttcactttcatagctaaacatcaacagaaaccatctccccttgcccccaaagtgtgaaatccttcttcccttcgttttcttccttatgtttcaaaagggaactttgaagactgtgaatacaggttccattggtcacctttcgggcttctttccccagtgctgaagccactcatcgactttgcaaaagactggagcattccaagatctgaaaatggattttttttctttttttcttttttagccgggactattttatttttatgaatttgtttttagtttaatgaaatagtagatcctgaaatgttgtacatatttctaactaggctgatgcacagtgcaaattccttttttaattgttttttttaagtagaaatactaaagaaagaataccatctaactattcataccagtatccagttgtagcataaggtgtcaaaagcaagtacgcaaaacatttactgttttaacaagctatttccttttaacaagaaatcttgtatttcttcctgtgtttgagatgaacatttttaaattttaaagttgtacagttttttgttttccattattttatcttgtttgtaactctatgaaatatatatatatatattttttgccatttaactgttgtatgttactctgtgtctgtaccatatagaaaaaaaattgtttttgtttttggttctctatgtgatatcagttaacaatgtaacactagctttacctgtcaaattctgctaggtcttctctgaaaacgttgtttttaaaaatgatattgcttggtaatagtgcaatttctatccttttccctcccccctcaacttttaagttcttttctttataattttgctgccccctccctgatggtttgggtttttgtttttgtttttgtttttttttttcatggagctactatgccatcctccctctgtgaggcagagtgactgtcagtgttttgttatgccatgccttgagctgtgggtgtttggcgacaataaggtggttgaatagattggctgagcacacttccacccacctagtgttctcagaggggttatgtgattgtttcaacctggagtgggttgcacccttaatgctttcctctgcaactaaaccgcccacatatatgttcattgaaaaaagtaagaataattctcagcactaacccagaagtagcaaagcagtcagtgatggtgaacattagaggtcaaacatgagttagatgtttgtgggctgacagccatcgtggctatgaccagtactatttacaaagcatgaattcactacaatgctcaactgtttgtttagctttatctcacttggggaatttattcctgtctgctgcattgtaggtagctgggtaggatatatttccacttgctttttaaattagttcttcacctccattgacactcgttttttggttttctccctatagtgtgggttggtgctagacaccagtctgacccacagaatgggagttatttcatccatctttcctccatccttccaaaaaccacatatctacacaaggaaaaatttaatacatctaggaattttttttttaattacaagctatttaaagagatgaatgtggccaaagttttacacaattgaaaataaagtaaaacagacggcatgtgtttaaacctgagtttatcaggcatggcaggaagttgcaggagagagaggcagtgacccaagccagtgcacttgatgttcatggacatatattttttttaaataataaattaaaacattttaaatagaagcataaattgagttgtttgttggcgctgagatactgcccactgtgaaacaaagctttgactagttttttgtttgtttactttcttcaggggggaggggggcaagtttgggtaggaaagaaagcataaatgaacgtgaccctgaggtgaagaggtatatgaacagcctttgcaatgtacaaaaagaaaaaaaaacaaaaaacaacaaaaaaaatagagcaagtgaaaccaaaaatgatgttcttggtgtttttctataatgtagtcttgttagcttttttgttactgtaacaatgctgatctcgaactgtaccaaaatacatggagactaacaaacagaaccacatggaactttcaaactgaaaaaaaaatttgtcacaaaaactttgttgtcatagttaagttgattgtagatggtaattgaatatactcctttgaaaatatttcatcaagtatgtttcctgctcattgtgatacattaaaaaaaaaatatgagcaaaa

SEQ ID NO: 49 - DNA, 2439 bp, Homo sapiens
agttttgcccccctcccctcccccgcccccgcccccgcccccaggcttgtgtagatcatgccgccagtagcggccctgactgccgaggaaacggtagcttaggacagttggctgttaagtgacactgattctccccgccccgcctgacccccgagaaggaggcttgtcccccgctgcgtgagggggtggggaagtgggtagtgaattcggatctacctgggaggggggagtggaagttcccgccccggagagcggcgaggcggcagccacagttgattatggaagattcccacaagagtaccacgtcagagacagcacctcaacctggttcagcagttcagggagctcacatttctcatattgctcaacaggtatcatctttatcagaaagtgaggagtcccaggactcatccgacagcataggctcctcacagaaagcccacgggatcctagcacggcgcccatcttacagaaaaattttgaaagacttatcttctgaagatacacggggcagaaaaggagacggagaaaattctggagtttctgctgctgtcacttctatgtctgttccaactcccatctatcagactagcagcggacagtacattgccattgccccaaatggagccttacagttggcaagtccaggcacagatggagtacagggacttcagacattaaccatgacaaattcaggcagtactcagcaaggtacaactattcttcagtatgcacagacctctgatggacagcagatacttgtgcccagcaatcaggtggtcgtacaaactgcatcaggagatatgcaaacatatcagatccgaactacaccttcagctacttctctgccacaaactgtggtgatgacatctcctgtgactctcacctctcagacaactaagacagatgacccccaattgaaaagagaaataaggttaatgaaaaacagagaagctgctcgagaatgtcgcagaaagaagaaagaatatgtgaaatgcctggaaaaccgagttgcagtcctggaaaatcaaaataaaactctaatagaagagttaaaaactttgaaggatctttattccaataaaagtgtttgattcctaagaaagaaaatatttttgtggacatgcataaaaattaaatggatttcctagtggagttttataaattaaaaggtcaaaactgaagctttttatttaggcttttccaaatcaaggataaatatcttacgcacgatatctagtgacagaggagaaagtggaaaatgacctcaaggaagctacgggcacaactggaagctttgtagaaattaaacatattcaaggagcaagaaatgaactttcagcagtctaaattttctaaataaccaatagttgccaatctaaaatggcagagaagatgaaatttgataaactgaattttttttaaaaatccatttaccctacaggtttgcatttgtttgctgaaatttacctttttttagttatatatatgtgtgtgtgtgtgtgtaatttctgccaataaattctaaattacaaaggtaagagaaaacctagtacattactaaatatataaagtatatgttctgattatgtatacttgttctagtgtcaagtctttttaagtgggtttttaaaagtttgttattggacttgaatggatttttgagactaggttaattatttttgaggtcttatcctaaaaggcatctaaggtacatgaatggagtatggtgattttataacattttttatcagaatggaaaaagaactgtttaaaagtttgatacttttaaatagttggtttttttgcttactctggtaatgattttctacaaatacataataaattgtttttttgagtctatattctgtatgcagttgaatatccattacttattctgctgtgctttaatagaatggaatgtttacaggcccttaaaatattatttttaaaaaaccttctgaagatacataccaaagtttttccaagaagattttataatcaatttaataatgtaaggtttatcagattctataatagtatagttattaaggcaattttatgttagagactattttgtaatgtagtgagtggtacctttataagaaaagtgactgccaatatatttttatagctgatctttataaattctaatgttgagtttttaatgattattttaaatgtttatatagtttagtaaaatttgcatctcaaagtatcatttttatattatgggacgttttcagattggctaatatttgcattgtaaattttgtatgcagtttatctaaaattcaaaaatactgtcagtacaccagcgtttaacatctatattccaatttgtatacagtttaaaattgtactgcaaaactattgtgtgctcttacacagtatgcatcatattgttgtctgtgaaattaaaggacatttgatagtcta

SEQ ID NO: 50 - DNA, 2117 bp, Homo sapiens
gtgggagcccgtggcctttaaagtgccgttcagccttttcctccaggggtgctttgtaaacacggctgtgctcagggctcgcgggtgaccgaaaggatcatgaactagtgacctggaaagggtactagatggaaacttgagaaaggactgcttattgataacagctaaggtattcctggaagcagagtaaataaagctcatggcccaccagctagaaagtattcttgccatgagaaaaagaatgtgataagttattcaacttatgaaattcaagttacatgtgaattctgccaggcaatacaaggacctgtggaatatgagtgatgacaaaccctttctatgtactgcgcctggatgtggccagcgttttaccaacgaggatcatttggctgtccataaacataaacatgagatgacactgaaatttggtccagcacgtaatgacagtgtcattgtggctgatcagaccccaacaccaacaagattcttgaaaaactgtgaagaagtgggtttgtttaatgagttggcgagtccatttgagaatgaattcaagaaagcttcagaagatgacattaaaaaaatgcctctagatttatcccctcttgcaacacctatcataagaagcaaaattgaggagccttctgttgtagaaacaactcaccaggatagtcctttacctcacccagagtctactaccagtgatgagaaggaagtaccattggcacaaactgcacagcccacatcagctattgttcgtccagcatcattacaggttcccaatgtgctgcttacaagttctgactcaagtgtaattattcagcaggcagtaccttcaccaacctcaagtactgtaatcacccaggcaccatcctctaacaggccaattgtccctgtaccaggcccatttcctcttctgttacatcttcctaatggacaaaccatgcctgttgctattcctgcatcaattacaagttctaatgtgcatgttccagctgcagtcccactcgttcgaccagtcaccatggtgcctagtgttccaggaatcccaggtccttcctctccccaaccagtacagtcagaagcaaaaatgagattaaaagctgctttgacccagcaacatcctccagttaccaatggtgatactgtcaaaggtcatggtagcggattggttaggactcagtcagaggaatctcgaccgcagtcattacaacagccagccacatccactacagaaactccggcttctccagctcacacaactccacagacccaaagtacaagtggtcgtcggagaagagcagctaacgaagatcctgatgaaaaaaggagaaagtttttagagcgaaatagagcagcagcttcaagatgccgacaaaaaaggaaagtctgggttcagtctttagagaagaaagctgaagacttgagttcattaaatggtcagctgcagagtgaagtcaccctgctgagaaatgaagtggcacagctgaaacagcttcttctggctcataaagattgccctgtaaccgccatgcagaagaaatctggctatcatactgctgataaagatgatagttcagaagacatttcagtgccgagtagtccacatacagaagctatacagcatagttcggtcagcacatccaatggagtcagttcaacctccaaggcagaagctgtagccacttcagtcctcacccagatggcggaccagagtacagagcctgctctttcacagatcgttatggctccttcctcccagtcacagccctcaggaagttgattaaaaacctgcagtacaacagttttagatactcattagtgacttcaaagggaaatcaaggaaagaccagtttccatttatgcgaaatctgtggttgtaaattttttttttttacttgaaattaaatttggctctaaagttggtgtagcagcagttgatcagactgaaaaacggtttttagtctctggaaaaagactgattttgctttttttataaatattattagatttattaatttttctgtgctcaatgtgtaaattgtattataattcattgtgatttatttcacttttaatttgctggtgttttaataaatgggggtgttactgaaaaaaaa

SEQ ID NO: 51 - DNA, 2049 bp, Homo sapiens
cgggaagctattaatagcattacgtcagcctgggactggcaacacggagtaaacgaccgcgccgccagcctgagggctataaaaggggtgatgcaacgctctccaagccacagtcgcacgcagccaggcgcgcactgcacagctctcttctctcgccgccgcccgagcgcacccttcagcccgcgcgccggccgtgagtcctcggtgctcgcccgccggccagacaaacagcccgcccgaccccgtcccgaccctggccgccccgagcggagcctggagcaaaatgatgcttcaacacccaggccaggtctctgcctcggaagtgagtgcttctgccatcgtcccctgcctgtcccctcctgggtcactggtgtttgaggattttgctaacctgacgccctttgtcaaggaagagctgaggtttgccatccagaacaagcacctctgccaccggatgtcctctgcgctggaatcagtcactgtcagcgacagacccctcggggtgtccatcacaaaagccgaggtagcccctgaagaagatgaaaggaaaaagaggcgacgagaaagaaataagattgcagctgcaaagtgccgaaacaagaagaaggagaagacggagtgcctgcagaaagagtcggagaagctggaaagtgtgaatgctgaactgaaggctcagattgaggagctcaagaacgagaagcagcatttgatatacatgctcaaccttcatcggcccacgtgtattgtccgggctcagaatgggaggactccagaagatgagagaaacctctttatccaacagataaaagaaggaacattgcagagctaagcagtcgtggtatgggggcgactggggagtcctcattgaatcctcattttatacccaaaaccctgaagccattggagagctgtcttcctgtgtacctctagaatcccagcagcagagaaccatcaaggcgggagggcctgcagtgattcagcaggcccttcccattctgccccagagtgggtcttggaccagggcaagtgcatctttgcctcaactccaggatttaggccttaacacactggccattcttatgttccagatggcccccagctggtgtcctgcccgcctttcatctggattctacaaaaaaccaggatgcccaccgttaggattcaggcagcagtgtctgtacctcgggtgggagggatggggccatctccttcaccgtggctaccattgtcactcgtaggggatgtggagtgagaacagcatttagtgaagttgtgcaacggccagggttgtgctttctagcaaatatgctgttatgtccagaaattgtgtgtgcaagaaaactaggcaatgtactcttccgatgtttgtgtcacacaacactgatgtgacttttatatgctttttctcagatctggtttctaagagttttggggggcggggctgtcaccacgtgcagtatctcaagatattcaggtggccagaagagcttgtcagcaagaggaggacagaattctcccagcgttaacacaaaatccatgggcagtatgatggcaggtcctctgttgcaaactcagttccaaagtcacaggaagaaagcagaaagttcaacttccaaagggttaggactctccactcaatgtcttaggtcaggagttgtgtctaggctggaagagccaaagaatattccattttcctttccttgtggttgaaaaccacagtcagtggagagatgtttggaaaccacagtcagtggagcctgggtggtacccaggctttagcattattggatgtcaatagcattgtttttgtcatgtagctgttttaagaaatctggcccagggtgtttgcagctgtgagaagtcactcacactggccacaaggacgctggctactgtctattaaaattctgatgtttctgtgaaattctcagagtgtttaattgtactcaatggtatcattacaattttctgtaagagaaaatattacttatttatcctagtattcctaacctgtcagaataataaatattggaaccaagacatggtaaa

SEQ ID NO: 52 - DNA, 2022 bp, Homo sapiens
tttctactttgcccgcccacagatgtagttttctctgcgcgtgtgcgttttccctcctccccgccctcagggtccacggccaccatggcgtattaggggcagcagtgcctgcggcagcattggcctttgcagcggcggcagcagcaccaggctctgcagcggcaacccccagcggcttaagccatggcgtgagtaccggggcgggtcgtccagctgtgctcctggggccggcgcgggttttggattggtggggtgcggcctggggccagggcggtgccgccaagggggaagcgatttaacgagcgcccgggacgcgtggtctttgcttgggtgtccccgagacgctcgcgtgcctgggatcgggaaagcgtagtcgggtgcccggactgcttccccaggagccctacagccctcggaccccgagccccgcaagggtcccaggggtcttggctgttgccccacgaaacgtggcaggaaccaagatggcggcggcagggcggcggcgcgggcgtgagtcaagggcgggcggtgggcggggcgcggccgccctggccgtatttggacgtggggacggagcgctttcctcttggcggccggtggaagaatcccctggtctccgtgagcgtccattttgtggaacctgagttgcaagcagggaggggcaaatacaactgccctgttcccgattctctagatggccgatctagagaagtcccgcctcataagtggaaggatgaaattctcagaacagctaacctctaatgggagttggcttctgattctcattcaggcttctcacggcattcagcagcagcgttgctgtaaccgacaaagacaccttcgaattaagcacattcctcgattccagcaaagcaccgcaacatgaccgaaatgagcttcctgagcagcgaggtgttggtgggggacttgatgtcccccttcgaccagtcgggtttgggggctgaagaaagcctaggtctcttagatgattacctggaggtggccaagcacttcaaacctcatgggttctccagcgacaaggctaaggcgggctcctccgaatggctggctgtggatgggttggtcagtccctccaacaacagcaaggaggatgccttctccgggacagattggatgttggagaaaatggatttgaaggagttcgacttggatgccctgttgggtatagatgacctggaaaccatgccagatgaccttctgaccacgttggatgacacttgtgatctctttgcccccctagtccaggagactaataagcagcccccccagacggtgaacccaattggccatctcccagaaagtttaacaaaacccgaccaggttgcccccttcaccttcttacaacctcttcccctttccccaggggtcctgtcctccactccagatcattcctttagtttagagctgggcagtgaagtggatatcactgaaggagataggaagccagactacactgcttacgttgccatgatccctcagtgcataaaggaggaagacaccccttcagataatgatagtggcatctgtatgagcccagagtcctatctggggtctcctcagcacagcccctctaccaggggctctccaaataggagcctcccatctccaggtgttctctgtgggtctgcccgtcccaaaccttacgatcctcctggagagaagatggtagcagcaaaagtaaagggtgagaaactggataagaagctgaaaaaaatggagcaaaacaagacagcagccactaggtaccgccagaagaagagggcggagcaggaggctcttactggtgagtgcaaagagctggaaaagaagaacgaggctctaaaagagagggcggattccctggccaaggagatccagtacctgaaagatttgatagaagaggtccgcaaggcaagggggaagaaaagggtcccctagttgaggatagtcaggagcgtcaatgtgcttgtacatagagtgctgtagctgtgtgttccaataaattattttgtagggaaagta

SEQ ID NO: 53 - DNA, 2268 bp, Homo sapiens
gtgactcatgctggactctaacccacgagggtttctcagagtcagcagctgggggatgaagaagtgaaaagtgactggcaggaaattctgcaagcaaggaaagggaaagagaaatgaactggtgcaggtctgcgggaagagaatgaggctggatcctcaaaatcacaggaggaagcaggcccagacctcagaggcagaaagagaaagaaaccagagcttagagtcaggaggaggaaaccagaccccggagccacaaggagagggctggatccccggctcagagggaagagtgtcgccgcctctgcctgcgtagccccggccatggctctgtagcctcgacccctttgtgcccccggcccgtctccgcgctcaccacgcctgcgctctccgctcccaccttctttcttcagccgaggccgccgccgcctctccttgctgcagccatggagtcttccactttcgccttggtgcctgtcttcgcccacctgagcatcctccagagcctcgtgccagctgctggtgcagcctctcctgttgccatcagtgcccagcacctgtgctacagccatgtcactcctggcgaccctggggctggagctggacagggccctgctcccagctagtgggctgggatggctcgtagactatgggaaactccccccggcccctgcccccctggctccctatgaggtccttgggggagccctggagggcgggcttccagtggggggagagcccctggcaggtgatggcttctctgactggatgactgagcgagttgatttcacagctctcctccctctggagcctcccttaccccccggcaccctcccccaaccttccccaaccccacctgacctggaagctatggcctccctcctcaagaaggagctggaacagatggaagacttcttcctagatgccccgcccctcccaccaccctccccgccgccactaccaccaccaccactaccaccagccccctccctccccctgtccctcccctcctttgacctcccccagccccctgtcttggatactctggacttgctggccatctactgccgcaacgaggccgggcaggaggaagtggggatgccgcctctgcccccgccacagcagccccctcctccttctccacctcaaccttctcgcctggccccctacccacatcctgccaccacccgaggggaccgcaagcaaaagaagagagaccagaacaagtcggcggctctgaggtaccgccagcggaagcgggcagagggtgaggccctggagggcgagtgccaggggctggaggcacggaatcgcgagctgaaggaacgggcagagtccgtggagcgcgagatccagtacgtcaaggacctgctcatcgaggtttacaaggcccggagccagaggacccgtagctgctagaagggcaggggtgtggcttctgggggctggtcttcagctctggcgccttcatccccctgcctctaccttcattccaaacccctctcggccgggtgcagtggcttatgcttgtaatcccagcactttgggaggccaaggcaggaggatcgtttgaggccaggaggtcaataccagcctgggcaacatagtaagaccctgtctctattaaaaaaaaaaaatcaacccttcttccccaccaaaccacccaactcctctctactcttatccttttatcctctgtctctgcttatcacctctcttgcgtatttctggatctccttccctcctttctcgtccaaatcatgaaatgtttggccttagtcaatgtctatgcccgtcacataacagccgaggcaccgaggcccacagggaagcagctgggagcttggaaacctggtctcttgaatttcaaacctggtttcttacaggtggttgtctggggtgggtggagtggcgacaggatagagctgaaggactatgcaaatgaggaagtaagtcagggcgggctttgagaaggggacccatatcctacaggcaaaaagcaggctaggtgaccttgggacactacgctaagggagggaggctaaaggcggccaggtttgcagtgcgggaagatgagcaggccagtgggaggaggggcagggcagggctgtagttggtgactgggtgttcattttagctctaagaaaaaaaatcagtgtttcgtgaaggtgttggagaggggctgtgtctgggtgagggatggcggggtactgatttttttgggaggttatgagcaaaaataaaacgaaacatttcctctggaaaaaaaaa

SEQ ID NO: 54 - DNA, 2488 bp, Homo sapiens
ttttgtccgcctgccgccgccgtcccagatattaatcacggagttccagggagaaggaacttgtgaaatgggggagccggctggggttgccggcaccatggagtcaccttttagcccgggactctttcacaggctggatgaagattgggattctgctctctttgctgaactcggttatttcacagacactgatgagctgcaattggaagcagcaaatgagacgtatgaaaacaattttgataatcttgattttgatttggatttgatgccttgggagtcagacatttgggacatcaacaaccaaatctgtacagttaaagatattaaggcagaacctcagccactttctccagcctcctcaagttattcagtctcgtctcctcggtcagtggactcttattcttcaactcagcatgttcctgaggagttggatttgtcttctagttctcagatgtctcccctttccttatatggtgaaaactctaatagtctctcttcagcggagccactgaaggaagataagcctgtcactggtcctaggaacaagactgaaaatggactgactccaaagaaaaaaattcaggtgaattcaaaaccttcaattcagcccaagcctttattgcttccagcagcacccaagactcaaacaaactccagtgttccagcaaaaaccatcattattcagacagtaccaacgcttatgccattggcaaagcagcaaccaattatcagtttacaacctgcacccactaaaggccagacggttttgctgtctcagcctactgtggtacaacttcaagcacctggagttctgccctctgctcagccagtccttgctgttgctgggggagtcacacagctccctaatcacgtggtgaatgtggtaccagccccttcagcgaatagcccagtgaatggaaaactttccgtgactaaacctgtcctacaaagtaccatgagaaatgtcggttcagatattgctgtgctaaggagacagcaacgtatgataaaaaatcgagaatccgcttgtcagtctcgcaagaagaagaaagaatatatgctagggttagaggcgagattaaaggctgccctctcagaaaacgagcaactgaagaaagaaaatggaacactgaagcggcagctggatgaagttgtgtcagagaaccagaggcttaaagtccctagtccaaagcgaagagttgtctgtgtgatgatagtattggcatttataatactgaactatggacctatgagcatgttggaacaggattccaggagaatgaaccctagtgtgagccctgcaaatcaaaggaggcaccttctaggattttctgctaaagaggcacaggacacatcagatggtattatccagaaaaacagctacagatatgatcattctgtttcaaatgacaaagccctgatggtgctaactgaagaaccattgctttacattcctccacctccttgtcagcccctaattaacacaacagagtctctcaggttaaatcatgaacttcgaggatgggttcatagacatgaagtagaaaggaccaagtcaagaagaatgacaaataatcaacagaaaacccgtattcttcagggtgctctggaacagggctcaaattctcagctgatggctgttcaatacacagaaaccactagtagtatcagcaggaactcagggagtgagctacaagtgtattatgcttcacccagaagttatcaagacttttttgaagccatccgcagaaggggagacacattttatgttgtgtcatttcgaagggatcacctgctgttaccagctaccacccataacaagaccacaagaccaaaaatgtcaattgtgttaccagcaataaacataaatgagaatgtgatcaatgggcaggactacgaagtgatgatgcagattgactgtcaggtgatggacaccaggatcctccatatcaaaagttcgtcagttcctccttacctccgagatcagcagaggaatcaaaccaacaccttctttggctcccctcccgcagccacagaggcaacccacgttgtcagcaccatccctgagtcattacaatagcaccctgcagctatgctggaaaactgagcgtgggaccctgccagactgaagagcaggtgagcaaaatgctgctttctgccttggtggcaggcagagaactgtctcgtactagaattcaaggaggaaagaagaagaaataaaagaagctgctccatttttcatcatctacccatctatttggaaagcactggaattcagatgcaagagaacaatgtttcttcagtggcaaatgtagccctgcatcctccagtgttacctggtgtagatttttttttctgtacctttctaaacctctcttccctctgtgatggttttgtgtttaaacagtcatcttcttttaaataatatccacctctcctttttgccatttcacttattgattcataaagtgaattttatttaaagcta

SEQ ID NO: 55 - DNA, 405 bp, Homo sapiens
ctgtgtcaggatgctgttgggtagctggctctgtggacaagtggctgtgagtggaactctctctgagagtagctggaaaaaacccaggctccagctccctgaggagacagcgggaagtctcctgactttgtgggccccagctttctgtaggagagggtattaattctgtctctacctgtgagcagcgagggagggtatgtgccagcaccgtgtacagtacagagctgcatcgtgcaaggagtgtgcctccagttgccaggctccacactgcgggctcagcttgcgtggtagcatctccatcttcatcgccagcctggcgacagagcgagactgtctcaaaaaaaaaaaaattctctgtaatagctccaggccaagagttgttgcctcacgccacctaccagattc

SEQ ID NO: 56 - DNA, 1709 bp, Homo sapiens
aaacagcggacggaggggccggcggtggcggagccggagcaagcaggggttcggcggcattacctgtacccattcaccggcggctaccggcggcggcgcgcagcgtgtcaggcggagagacccgccgccaggaatgaatctgaagtctgctgcagtaaaacacagaaggctttaaaatgttttcttgcataaaattcaaaacttttaagtagctgcttatgagaatagggaaggcagaaagctaatgtctgtctcaagatacaggacagctgtttgctcatcaacctcaactgtgtgtgcaactgaggaacatggctcaagaaactaatcacagccaagtgcctatgctttgttccactggctgtggattttatggaaaccctcgtacaaatggcatgtgttcagtatgctataaagaacatcttcaaagacagaatagtagtaatggtagaataagcccacctgcaacctctgtcagtagtctgtctgaatctttaccagttcaatgcacagatggcagtgtgccagaagcccagtcagcattagactctacatcttcatctatgcagcccagccctgtatcaaatcagtcacttttatcagaatctgtagcatcttctcaattggacagtacatctgtggacaaagcagtacctgaaacagaagatgtgcaggcttcagtatcagacacagcacagcagccatctgaagagcaaagcaagtctcttgaaaaaccgaaacaaaaaaagaatcgctgtttcatgtgcaggaagaaagtgggacttactgggtttgaatgccggtgtggaaatgtttactgtggtgtacaccgttactcagatgtacacaattgctcttacaattacaaagccgatgctgctgagaaaatcagaaaagaaaatccagtagttgttggtgaaaagatccaaaagatttgaactcctgctggaatacaaaattcttgagcatctgcaaactaaaaattgacttgaggttttttttttcctagtcattgggaatgtagagcagtgtatcttgcatgtcatcggaagaatagatttttgttttggttttgttttgaaaatgactctgaacatttatttccattgcaatttctgtggctgaggagacttaaactttacaagtattatccttttaagatcattttaattttagttgagtgcagagggcttttataacaaacgtgcagaaattttggagggctgtgatttttccagtattaaacatgcatgcattaatcttgcagtttattttctcattgtgtatgtatatatcgcttttctctgcagcacgatttctcttttgataatgccctttagggcacaactagttatcagtaactgaatgtatcttaatcattatggctgcttctgttttttcattaacaaaggttattcatatgttagcatatagtttctttgcacccactatttatgtctgaatcatttgtcacaagagagtgtgtgctgatgagattgtaagtttgtgtgtttaaacttttttttgagcgagggaagaaaaagctgtatgcatttcattgctgtctacaggtttctttcagattatgttcatgggtttgtgtgtatacaatatgaagaatgatctgaagtaattgtgctgtatttatgtttattcaccagtctttgattaaattaaatgaaaaaaaaaaaaaaaaaaaaaaaaaaaaa

SEQ ID NO: 57 - DNA, 1381 bp, Homo sapiens
tactgaagcagcatttgaagctgcagtcttgaaacacatgcaggctggaaaagtcgctaaagaattacttatttgagatggcacatgtttctgcagaaactcaagatgtttctcctaaagatgaatcaactggttcaaaagcctcctctgggtctccattgtgtgaacacataatccctggggattcagacttaaggtcaatgactgaatcaatgattttcaggttttgccacaaggatccttgataaaaaggccacattatactttatgtctctgagccagataaagataatgattttccttctctgacctttcccagtaaactttggaaaatagctgaaagtgaccaattcaagtctaattcataggataagaatgaaacttgcatagtgactaatgaagaactcttcaagaaagaaaatttggaaataaaggctccttacagaatatttcaaactgacagtatgaaaatcttaatttgacagctcaacctttatggatttagtaaaattcaacagaattttcacagatctgcttttctagccaactttctggcagaagaaaaagaaatttctgttttaagcaagttaaagttgtattatcatccgaatttcaaacgtggctgtccccaacttttaataagaacgaaaagaagaattaagattaaaaacacttctcttgtatctacttcactgaatatttcaagaaacactttagagcaggggctaacacagataaacataattctgtcttagctgctgaaactagtgaagaaagttcattttcaacatctacaaatttaaatatgactctaacaaggaaatcttctgtcagccagggcattgctggttcacctgacccaattagaagtggtttccctcctcttccatttcaacctcagttggacaatcagaacaaattacaacaaatcaacatgctattttaaatcaattgacaaatattcatatgcactctcatagcaccgacatgtaagcaaatggccacgttgtgaattttgttacaaccacagcttctcaatactacatcatatctccctcctttggggctgatagtgaaaccacctactttttcccaccagatatcctgaggtattagccaatgaggctcctcattctaacctgctaccagcaggcaacctgtggttgtaaatgactgcgacagctgatacatcagttgcctttcgttacaggccagctcttcaaccatctttactggaaaaatatcaccctagttacaactgatcttccaccaaaagagtaccagattatgcatgacaacagagactgaaatttatgttgacaagaacattaaaaattcctgcaataatcttactgaacaataaaattacatgttgaccttt

SEQ ID NO: 58 - DNA, 5642 bp, Homo sapiens
cgcccgccgggcgctctcgcttcagtcagtcgggccgcgccgcgcctcagctctggttgatgataattagaagcatgctttccactgaacttcccgacaacatttgttatgcagaatgtctctgagtgagaactcggtttttgcctatgaatcttctgtgcatagcaccaatgttttactcagccttaatgaccagcggaagaaagatgtgctgtgcgatgtcaccatctttgtggagggacagcggttccgcgctcaccggtccgtgctggcggcatgcagcagttacttccactcaagaatcgtaggccaggctgatggagagctgaacattactcttccagaagaggtgacagttaaaggatttgaacctttaattcagtttgcctacactgctaaactgattttaagtaaagagaatgtggatgaagtgtgcaaatgtgtggagtttttaagtgtacataatattgaggaatcctgctttcagtttctgaaatttaagtttttggactccactgcagaccagcaagaatgcccaagaaaaaaatgcttttcatcacactgtcagaaaacagaccttaaactttcacttttggaccagagggatctagaaactgatgaagtggaggaatttctggaaaataaaaatgttcagactcctcagtgtaaactccgcaggtatcaaggaaatgcaaaagcctcacctcctctacaagacagtgccagtcagacatatgagtccatgtgcttagagaaggatgctgctctggccttgccttctttatgccccaaatacagaaaattccaaaaagcatttggaactgacagagtccgtactggggaatctagtgtcaaagacattcatgcttctgttcagccaaatgaaaggtctgaaaatgaatgcctgggaggagtcccggagtgtagagatttgcaggtgatgttaaaatgtgacgaaagtaaattagcaatggaacctgaagaaacgaagaaagatcctgcttctcagtgcccaactgaaaaatcagaagtgactcctttcccccacaattcttccatagaccctcatggactttattctttgtctcttttacacacatatgaccaatatggtgacttgaattttgctggtatgcaaaacacaacagtgttaacagaaaagcctttgtcaggtacagacgtccaagaaaaaacatttggtgaaagtcaggatttacctttgaaatccgacttgggcaccagggaagatagtagtgttgcatctagtgataggagtagtgtggagcgagaagtggcagaacacctagcaaaaggcttctggagtgacatttgcagcacggacactccttgccaaatgcagttatcacctgctgtggccaaagatggctcagaacagatctcacagaaacggtctgagtgtccgtggttaggtatcaggattagtgagagcccagaaccaggtcaaaggactttcacaacattaagttctgtcaactgcccttttataagtactctgagtactgaaggctgttcaagcaatttggaaattggaaacgatgattatgtttcagaaccccagcaagaaccttgcccatatgcttgtgtcattagcttgggagacgactctgagacggacaccgaaggagacagtgaatcctgttcagccagagaacaagaatgtgaggtaaaactgccattcaatgcacaacggataatttcactgtctcgaaatgattttcagtccttgttgaaaatgcacaagcttactccagaacagctggattgtatccatgatattcgaagaagaagtaaaaacagaattgctgcacagcgctgtcgcaagagaaaacttgactgtatacagaatcttgaatcagaaattgagaagctgcaaagtgaaaaggagagcttgttgaaggaaagagatcacattttgtcaactctgggtgagacaaagcagaacctaactggactttgccagaaagtttgtaaagaagcagctctgagtcaagaacaaatacagatactcgccaagtactcagctgcagattgcccactttcatttttaatttctgaaaaagataaaagtactcctgatggtgaactggcgttaccatcaattttcagtttatctgaccggcctccagcagtgctgcctccctgtgccagaggaaacagtgagcctggctacgcgcgagggcaggagtcccagcagatgtccacagccacctctgagcaagctgggcctgcggaacagtgtcgtcagagtggtgggatctcagatttctgtcagcagatgactgataaatgtactactgatgagtaaacttgcattcacttccttcaaaccatctaattttctcctgaagttttggcagcgtcttgaaagcctaatatgaccatctgttgctcaacaatactgtttttttcctttagtagtttaccataagggaatttcctttaagtcaaccatgatttctccttgatttctacaagagacaaagaaatgattttgcctcctggatatcagaaaaatccatgtgaaaatgtagtaaacctttaaaactcatgttttaaagaataataactctagtaataactcttcctgctattcagaataagtaggagaatgaaaactgcagcatatcagacagcaatttaacagcttgaaacatctacagatagttcctactaaaagaagtggcctgcagaagtttaataatttgacttttttctaatattttagtttgaaagaaaatttcttcccaagcaatgctaatagagttctattcttagaagcagggtgtcagctactgggaatatttttgtagagctgcattgtgaaaaaaagatggtcttacctgaatcttagggctttgttcttcggctcctaaaatcaggctttaagctacattgggaagatttagtaaataggcaagtggttggcctaagacgggggctgcttctcctcttcagtatggactctagaaagtctggctacatgaatagatttaagtgtcactttccctccctgccccccgcttcagtctctaccatatctggtcccatcatggacttcctatttcctggcatttttgtccctttggaagaagaaataggactcagaatacagtggcatgagtgattacactggcagcattatctcaggctccctagaatctggagagcttaccaacatgtaaagctgttcatttttccaccgtgggtcaccaatgccagaaaaccagacatcacggggaaagaatgttgcttactttttaccaggagtgcagttcatttttttcaccctgtttttgaagtcgtattattcacttgtaaaaatgattgtaacagataaaaaatgtatctgcagcaactctgcaggtttgtgaaataggatgaaactcaatctttttctattgtgggtttgcatttgaaaagcaggttgaatccttgctctcttctccaaatttggtgtggtataaagacacacaaatcattttaacttggacatttaaagatcagtcttagtgtttgttcagtcctgttacaaaatagataactgagcacctatcgcataacattttgcggtggcttttagccatgctggggttagatgtgtttgagagtcaaatgaaagctatggatcttctcagcaattaaaaaaaatgcatatattcacattcacagaaacattggcagaacccagttttaatggtacagaggagtagtttatagtgttgatttcaccaaaatcagagggctgaaagagacacttctatagactgcatcctgagcctagtgcagggcttgtctagctaatgtgggcagccaccacccactgtgtatgaacaagtctgaagcaagttggccttgcccttgagagtatatggggaccagtcttcatgtcttggagtaatttgtcaaatgttaccctttttgatcagggtgtagggggaggatattgctagtatattttcagtggtttgtatgttctctctgtcactgacttatttgtaagagaaaattagttggacttgtttattttctagtagcttttataagtacactcaagaatttgtcagggagaataattctgatagtgcatcccatactgcaaaagaatttgtgtgtgtgtgtgtgtgtgtgtgtgtgtgtgtgtatgtgtatgtatacatatatatctctccatataggtatttctttgatacttgtaattttaaatttcagcttcacgatataaaataatataagaacttctggtttacaaaatgtaaaatcttaagccaatggaacccttgatttcctacctcagtgtacacccaactattggttgtatcagtttgtgtatgtgcaaatgtcaaataatcttttgctttaattgctactgtacttgctttgaaagattacctactattttatgataaaatgtagttgtctccagagcttaaatataatttgtaaagcacttggtttaaatttctctctacctataaacagtttagcattaagggtttctattaatgacacagaattattggccaagtgtaatttcttaaaatttagcattactttaaatagccagcatgtaatacaagtaactacactacctcatatctacatgattttcaagttgtaatgcagatggacagataaaaaagattttacgtttgtcttttggccataagtgggaaagttttctgtatattgcatagcattacacatttatgcctattttaacattaacttctaaagaagttttttctaagaaaatgtttcaaggcaatattttttttgaggctgccgaagacaaatgacaggattatgagtatacagtgtatgccttttccttcatgcagaattttgaaatgttttcagtttgtatattgcatattcacatgatcattgttcactattttatgaactggccttctcaatgtttgatgattttttaaaagctgttatgttgaattcagtaaaataacattaccttattttttttcttattcaaattctggaactatagcaaataattcgttaaattgtcatattcaaaacaaatgtggatacagtcttggttctccatctgtaattttttttaacagtttgctatagcttactgcttaactaattttaaataaggaaataagtatgttagatgcagtagacgatacaggttgcatgtggacactcagtcacattaacaacttgggaaaaaaatggcaatgttacggtgaattctcaggtgaacttttttcagttataaaacatctattttgaatctgtaaatattttaaatgttttattaaggcatgtaataaactattctttgaaacttgttgggtagaatgaaaattaaagccataatggtagaagatggcatactgattataaaagaagcagaaaaacattgatttttttatatctttcataatataattttctaacaatgcaataaaaccactaaacttttgtgtccatattttactgagaccatgtttcattaaaagcatagtttcatagtatttaatttacatttctccctaatgttcttacccaaatgtacctgaactaaaaaatgttagatgttggtgataagttgacagttaaataaaattctctaaaattgcttctaattgaaa

SEQ ID NO: 59 - DNA, 9215 bp, Homo sapiens
aaacagcgccgagccgccgccgcctcagcagcagcagcagcagcagcagcggcagcagcggccgtgcacgcccgggctgcggtcgcacagcgctaacgtgagcggccgccgccctcgccaccccgcctgcccactcccgccgccgccccgctctcgctttccccccggcctcccctcgccccttcccctcccccttcccggcgcactcggggggctgggaacgagctgccatgtgatgcgcgtcccctccgcgagctttcggtgacccacgaactgcccacctcgccggctgccgggagggggctgcgagccgggaagacgcggggaagaggaggcggaaaaggacgcaaagttctccggcgagcgcgttcgttcacatagctcccagttttaacatttcgccacctactgaagacatcatttgggaccaagctgatgagcccttgaagcacagcagataagagtgttgctgttgatcatctttgcctgggaagttgaatgataaagccagaagaaagcatgctttctgatcatttgcagctgtctgcttcagaaagtgagggctccaggaatgaggagaatcttcaagaacttcctcgcactgtgacatgtctgatcccttgctcccatccctgcagcatgaacaaggtggacactcactgacctgtcacaaggttgccccacaaaactttggggtccatgtctgaatggattgccagagccttctcatctctcccttcgcccagttccctgcatcctaagactcgaaggcagcacaggacctggaaaaattacatggtgtgaacggcatgtctgtggatgagaagcctgactcccccatgtatgtgtatgagtccacagtccactgcaccaacatcctcctgggcctcaatgaccagcggaaaaaggatattctctgtgacgtgactttgatcgtggagaggaaggagttccgggcccaccgggctgtgctggccgcatgcagtgaatatttttggcaggcgctggttggacagacaaaaaatgatttggtggtcagcttgcctgaggaggtcacagccaggggctttgggccgctgttacagtttgcctacactgccaagctgttactcagcagagaaaacatccgcgaggtcatccgctgtgctgagttcctgcgcatgcacaacctggaggactcctgcttcagcttcctgcagacccagctcctgaacagtgaggatggcctgtttgtgtgccggaaggatgctgcgtgccagcgcccacacgaggactgcgagaactctgcaggagaggaggaggatgaagaggaggagacgatggattcagagacggccaagatggcttgccccagggaccagatgcttccagagcccatcagctttgaggccgccgccatccccgtagcagagaaggaagaagccctgctgcccgagcctgacgtgcccacagacaccaaggagagctcagaaaaggacgcgttaacgcagtaccccagatacaagaaataccagcttgcatgtaccaagaatgtctataatgcatcatcacacagtacctcaggttttgcaagcacattccgggaagataactctagcaacagcctcaagccggggcttgccagggggcagattaaaagtgagccgcccagtgaagagaatgaggaagagagcatcacgctctgcctgtctggagatgagcctgacgccaaggacagagcgggggatgtcgagatggaccggaaacagcccagccctgcccctacccccacggccccagctggggccgcctgcctggagagatccaggagcgtggcctcgccctcctgcttaaggtctctgttcagcataacgaaaagtgtggagctgtctggcctgcccagtacatctcagcagcactttgccaggagtccagcctgcccttttgacaaggggatcactcagggtgaccttaaaactgactacacccctttcacagggaattatggacagccccacgtgggccagaaggaggtgtccaacttcaccatggggtcgcccctcagggggcctgggttggaggctctctgtaaacaggagggagagctggaccggaggagcgtgatcttctcctccagcgcttgtgaccaagtgagcacctcggtgcattcttattctggggtgagcagtttggacaaagacctctctgagccggtgccaaagggtctgtgggtgggagccggccagtccctccccagctcgcaggcctactcccacggtgggctgatggccgaccacttgccaggaaggatgcggcccaacaccagctgcccggtaccaatcaaagtctgccctcgctcaccccccttggagaccaggaccaggacttccagctcctgctcttcctattcctacgcggaggacgggagcgggggctcaccctgcagcctccctctctgtgagttctcctcctcgccctgttcccagggagccagattccttgccacagaacatcaggaaccaggcctgatgggagatggaatgtacaaccaagtgcggccccaaattaaatgtgagcagtcttatggaaccaactccagtgacgaatccggatcgttctcggaagcagacagtgagtcgtgtcctgtgcaggacaggggccaggaggtaaaacttccttttcctgtagatcaaatcacagatcttccaaggaacgatttccagatgatgattaaaatgcacaagctaacctcagaacagttagagtttattcatgatgtccgacggcgcagcaagaaccgcatcgcggcccagcgctgccgcaaaaggaaactggactgtattcagaatttagaatgtgaaatccgcaaattggtgtgtgagaaagagaaactgttgtcagagaggaatcaactgaaagcatgcatgggggaactgttggacaacttctcctgcctttcccaggaagtttgccgagacatccagagccccgagcagatccaggccctgcatcggtattgccctgtcctcagacccatggacttgcccacggcctccagtattaaccctgcgcccttgggtgctgagcagaacattgcggcctcccaatgcgcagtgggggaaaacgtgccctgctgcttggagccaggcgcggctccccccggacccccctgggcacccagcaacacctccgagaattgtacctctgggaggagactagaaggcactgacccgggaaccttctcagagagaggacctcctcttgaacccaggagccaaacagtgaccgtggacttctgccaggaaatgactgataagtgtacaactgacgaacagcccaggaaagattatacctagtgactcggctctgcctcccagtccgcacacctctcccatccaggcgttcttcagtcagcctgtggcactgttcatctgctgtcccgaagaaaccgagaacacatttggtgcacactacagcggtcttagcagcaatactgttccgaagtatcctctcctcttctcgagcaggagtgatagttaccttcacaatggtgctaccccttgcccaggcaaggaaagacagcagtgatgacactgtctgtctgtggctcaatttcagtcttcacagggatagactacaacacctctaggccccaaccacggattttttttctcagtggcccatgtcacaaaccctatctcaggaatttcttctgaatgttcaatttttttcattgaagacagcttctatacacatcaaagttttatagctagactgtacatattatatataatatatatataaaatatatatatatatatatatatatccatatgcaaaagtcctgcatgcctcaactttctcatcctaaaactggaaacttatttctcatttagaaacaggttccaacattcctcttcttttgtctctgatgctagaactagtttggtaactgttaacatggtcatttttcttgcttcacagttcaattttcaattcgtacttatttatggacaaaattcagtgttggaagctttttcccaaggttttatttcagatttctttttcgtttggtttggttttggcacctccaagtggtgtcatttgagcattgtaggtttgttttttgtttgtttggggggttttgtttgtttttgtttttgtttttgttttccttgcagatactgtacagtaatggtcaactttgccacttgcactgagttttgggtcaaacctattttcttaaatgaagttgtaacttcggtataactcaagtatactgtatattctttgcttttagttaaaaaagtaaaacattttagctaattaaaaagcactcaggtgataattatgtaggaaaaacaatcttgccaaataatgaattcatcctaggatgtgtagacaataatctgcttgaatatttttatatttcacctcctccccacctttccctaagcaaagtttaaacgcagatagagagttcagagttgatgctggatgttcagattcctaagtggggagagagtttggacatctcactcaaaagtacatcagaaaaacaggaatccgtgattttataccagaactcagcaggcattggctcctagaaatcaagttagaaagttttcacccagggagtaagtcccattcatttcaacacgtcctgaggcctcggcttgctcttggaagtgttgtgcagtaggacctgctcccctgaaggacggggccaaccagccactggctttcctgcccaggcttggcctcccaggacatctggcctgaggggatttgaatcacagccccgaaggtcctgccttcaccccattgggagagagcagggcatcctggcatctgcgatccatccctgacacaggctgacacattctttctcctttccttctccaaaggcttggagttttcttctgaggtttttctgccagtgtcttgtctgaaggcagacttcattctgaggctttggacaagctatcaccgggaaccctccctgtccccttcccgaatcacacacataccctaccctcacctgatgataattttctcttcttgctgcaaaactggttggcttgcaacccagagagagcagcttcccttggctctggggccgtgttggccccagccacgtttacaggaaggtgtgccccagaggaggaggaatcagctccctcgctccagtggccttgggtccgggtctcactgagcagcccgagggccactccagcccggctggggaagagagtcctgaacggtttgatgtggggatggggtggtgggcagtggggaatagatggttgactttgtttctttatttgtgccattgtttggacaatattaaagctgcatgtaaaaggggaaattagtatatgatgtaggctaaaagtgaaatcatagtaacatatgttttagtattattaacttttttctgtacaaatattagcactaaatgtttaaatatgtatgaatgccagaaatttgtcagttcatgcagtaggataaaaaaaaaaaaaaaaaaaaaaaaaaggcttttctttttaaacagttccacttttaaaacctgcctctgggtttttgttttttcttgtttgtgtgtgtgtgtgtgtgtgtgtgtgtgtgtgtgtgtgtgtgtgtgtgtgtctgaaacagatcttgataaagctctgtgttggagctgctggtttttgttatggttgttggaatttcttggcctactaggacagttctgtgcttcaccatgaggtttgcctttgtggaaaactggtgacagtgagaatataaactcaatgtgaatcacgtgatacttcgcaggcgtgtgttacagtggagtcagctgacagtattttgctttttaactctattgttgcctttccaagtgacctctcctcttcttttaaaaaaagaacactttctgctcatatcataaccaggtccaacccagcttcttggcatgaggtttaccctggtaacaactcatgtgcaactggtagtcttgaccacattccatccatttcctcaggtttctgtggttcagtagcccagacctgtttggcagccatttctagcaggggcggggcctctttatttctctccaccctaactcagacctcaccttcctcccacccacccctgccttgcttttcttcctcttcccccaacctaacttctgccatgggaactggttaaaaacactgctctaaaaaccatcttccaatttcatagagatttctcacaagttatttcattcataatccaccatgaacagtgactagcttcgtgcagttgttcatgtgatgtgtgtgtgtcttttcctattcagaactatgtgcttgtcaaaattatttctgggttgattcaaagggaggacttgctggggaccagaatccaaacggcctcaagtggaattttaaaacctagcctgtctcttttccctgggatccctctgtcaaccccacgccttttaggaaaaagaaaagtgagtgaacagcaaggaagagtgtttgcacagtacagtaacatttggttgttcttaaggctcttttcttacaaaaataagagaccctccaaccacgggctgtttaggaggatgcctgcttgggtctccaaatggctggggtaggaatggttgttggggcagagccagtggaggtgagtgaccctgagactaatgaacatcccacctaaatccagtcctccccttggatctgcctttgtcctgcttgtgtatccaggcaacctcttttcaagttggtcaggctttggacaggtgagtgatttgctgtatgtgtttgtttctctgcgttacctgggggtgccttgattaaaatcgaactttattacatactgattctggaacaaaacagttagaaaaactttaaaaaaaaaaaaaccgacaaagttacgaggccatcctgctatttatcttctgagttcccagcaatgactcaggcatcagagatgatgctgcagtggaaaacctgactctgtgtgtctgcaactgaatgttgtgcgagtaatttattaactgtctttctaaaggtttgctgcttttaagatgcactataattcgggatgtaatccttacattgcttttccaaggaagggaacaaaagtctagtgattagtatgccaactgccactactccttcaaaaggagccaggaccagcgacaagactcatgagaggactggctaaagtgaagtgtgcacagtgtgaagtttaatgctgttgtcaagaggcctaaacccacattttctcttttaatattttatgattgccatcaaagaagaagaaaaagaaggaacagacaaaggtttgaaaatgataagcctgttaagacaccaaaaactcctgtcccgtgaagctgcttgacatcctgtggagtagcataatcctctcaaaatgaggaagagctgcctgcaaagctttctcaagtccctatttggctacctacttctctacattatgccccatttaaactaggagctgtcttagaaatgacttcaaactgcttcactattgcttacagtttaggaggagtctcagatccagaaggagcaagaatcaagtttggtcctcaaatgactgtaaatagactaaagaacaaggtgttttttgtttttgtttttgttttctaagaataaagctgttcgttgtatcatgagttagtgtttcttccccaaactgaagactgtgttggaagtgcaatttctggtgagtcagtccacaatacaatgccctgtgtggagttggtattcatacaggaaatctgtgtgcacgaggcattgtgtgttgaaagtgtatgtttatagtactgcctgagccatctcatgaccccagcgtccaaaaccgatgctgtagaacagaacatatctgtacacaaatagtgtgtgcaaatagcatttgtacatagaaaagtctcattgtggcagattgagcataaattattcaactgacggtgcaaaaacattacttgcaaagaaaagtttatagtattttcctacactccaccctgggagatgatatttctatcaaatgaatatcagtgcattttaaatgtaatatgaaaacgatgctgccattttgtgaagaatacccacttggttgcagaggccaactttcatagctttgatttaatgttgtgacacggtgtatgcattttgctgtcaagcaatggataaacagctctgactttcattctcattccagtttattgacctcagataaaacactggcccttcttagaagcagaagtgtgcaccaagaccattcatttcaggtagactcacattcagtgccaagtgctcccatgggaataatcagacgcatatgttgcgaaagagtgaagggacttggacaaagaggggttttcctacagatggatgctcagtcttctaccaaaacatgtttggaggcagaactatgacctccccttaagtcctaacaatgtattttgtgtgtgcaaatcctgggatgcccgtttcacgctctgacataaagacatggcacctctagtgagtgatcaggaagattccatatgcatttgggagcttcaggtgcttgttagacacagtgagccattcaaggcaagcaccacctttgctagtgaggccaagagagcctgtgacaatttgacaatttgttccagaaccagtctgatgcaagtgcacctctaatatatgccttacaaactccagaggccatattcaaaacagggtcttctcagtgtatgcaaggggctgcagcccctcttctcttcctccccaggttgaacaatacggacagttttcacacatatctacctgtataaccctctgtacctctcataactggtcaacgactgtaacaggttacatcaggtgtttttctacatactttttacacagattctatgcgattaatgtaatttaattcaatgcatcattttattgtactagttcttaggcttgtccttatttttttctaagtgattgtggtttttctcgtggtttttattgtaaaaaatgaaaggctgttgatgcttattctctgtaactaagaatttttaccttttgggggaaaaaagcattgctatgaactaatgaattgaaacttcatttactcattgtaaatacactattgtgcaaaaaaagttttcactcaattgaattgctagtgttaactgaattttgtctagacaccatttctgttgatgaaataaagacatatcattatgcattgtaaactga

SEQ ID NO: 60 - DNA, 1891 bp, Homo sapiens
gtctctggtatctcccgctgagctgctctgttcccggcttagaggaccaggagaagggggagttggaggctggagcctgtaacaccgtggctcgtctcgctctggatggtggtggcaacagagatggcagcgcagctggagtgttaggagggcggcctgagcggtaggagtggggctggagcagtaagatggcggccggagcagtaagatggcggctggagtggtttttctggcattgtctgcccagctgctccaagccaggctgatgaaggaggagtcccctgtggtgagctggaggttggagcctgaagatggcacagctctcgatgtgcattttgtaagcactttggagccactatcaaatgctgtgaagagaaatgtacccagatgtatcattatccttgtgctgcaggagccgacacctttcaggatttcagtcacatcttcctgctttgtccagaacacattgaccaagctcctgaaagatcgaaggaagatgcaaactgtgcagtgtgcgacagcccgggagacctcttagatcagttcttttgtactacttgtggtcagcactatcatggaatgtgcctggatacagcggttactccattaaaacgtgcaggttggcaatgtcctgagtgcaaagtgtgccagaactgcaaacaatcgggagaagatagcaagatgctagtgtgtgatacgtgtgacaaagggtatcatactttttgtcttcaacgaattatgaaatctgtaccaaccaacggctggaaatgcaaatgaataccgaattggaaaaacagatttctaatgaggctgatagtgaagaaatgaaaatgtcttctgaagtgaagcatatttgtggcgaagatcaaattgaagataaaatggaagtgacagaaaacattgaagtcgttacacaccagatcactgtgcagcaagagcaactgcagttgttagaggaacctaaaacagtggtatccaaagaagaatcaaggcctccaaaatttgtcattgaatctgtcactcttccactagaaaccttagtgtccccacatgaggaaagcacttcattatgtcctgaggaacagttggttatagaaaggctacaaggagaaaaggaacagaaagaagattctgaactttctactggattgatggactctgaaatgactcctacaattgagggttgtgtgaaagatgtttcataccaaggaggcaaatctataaagttatcatctgagacagagtcatcattttcattatcagcagacataagcaaggcagatgtgtcttcctccccaacaccttcttcagacttgccttcgcatgacatgctgcgtaattacccttcagctcttagttcctctgctggaaacatcatgccaacaacttacatctcagtcactccaaaaaactggcatgggtaaaccagctattactaagagaaaattttctcctggtagacctcggtccaaacaggaggcttggagtacccataatacagtgagcccaccctcgtggtccccagacatttcaggaggtcgggaaatttttaaacccaggcagcttcctggcagtgccatttggagcatcaaagtgggccatgggtctggatttccaagaaagcggagacctcgaggtgcaggactgtcggggcgaggtggccgaggcaggtcaaagctgaaaagtggaatcggagctgttgtattgcctggggtgtctactgcagatatttcatcaaataaggatgatgaagaaaactctatgcacactacggttgtgttgttttctagcagtgacaagttcactttgaatcaggatatgtgtgtagtttgtggcagttttggccaaggagcagaaggaagactacttgcctgttctcagtgtggtcagt

SEQ ID NO: 61 - DNA, 2230 bp, Homo sapiens
gcagagcggcggcttctctcgcgaggacggacgccattatcgcatctccccgacaaacaccacgagaattccgcagcccacacggtgaccaaaagccagccccactgtgagttgaactctttcgtgttgaccggccactctccgtgctctggatgatgtcggaacacgacctggccgatgtggttcagattgcagtggaagacctgagccctgaccacccagttgttttggagaatcatgtagtgacagatgaagacgaacctgctttgaaacgccagcgactagaaatcaattgccaggatccatctataaagtcattcctgtattccatcaaccagacaatctgcttgcggttggatagcattgaagccaaattgcaagccctggaggctacttgtaaatccttagaagaaaagctggatctggtcacgaacaagcagcacagccccatccaggtccccatggtggccggctcccctctcggggcaacccagacgtgcaacaaagtgcgatgcgctgtgcctgggcgtcggcagaacaccattgtggtgaaggtgccgggccaagaagacagccaccacgaggacggggagagcggctcggaggccagcgactctgtgtccagctgtgggcaggcgggcagtcagagcatcgggagcaacgtcacgctcatcaccctgaactcggaagaggactaccccaatggcacctggctgggcgacgagaacaaccccgagatgcgggtacgctgcgccatcatcccctccgacatgctgcacatcagcaccaactgccgcacggccgagaagatggcgctcacgctgctggactacctcttccaccgcgaggtgcaggctgtgtccaacctctcggggcagggcaagcacgggaagaagcagctggacccgctcaccatctacggcatccggtgtcaccttttctataaatttggcatcacagaatccgactggtaccgaatcaagcagagcatcgactccaagtgccgcacggcgtggcggcgcaagcagcggggccagagcctggcggtcaagagcttctcgcggagaacgcccaactcgtcctcctactgcccttcagagccgatgatgagcaccccacctcctgccagcgagctcccgcagccacagccgcagccgcaggccctgcactacgcgctggccaacgcacagcaggtgcagatccaccagatcggagaagacggacaggtgcaagtaatcccacagggacacctccacatcgcccaggtgccgcagggggagcaagtccagatcacgcaggacagcgagggcaacctccagatccatcacgtggggcaggacggtcaggtgctgcagggtgcacagctgatcgccgtggcctcctcggaccccgcggcggcgggcgtggatgggtcgccactccagggcagcgacatccaggttcagtacgtgcagctggcgccagtgagtgaccacacggccggggcacagacggccgaagccctgcagcccacgctacagccggagatgcagctcgagcacggggccatccagattcagtgagcggtgcccatggcaccaggagcccctcgccggctccgcctacggcccggcccccacgcgccctgctctcacggcctcggcacaggcagcggctgcacgtgttctgctgaagtgcgtctgaaggccgctgcctccgcggggaacagcatcctatcaactgaaagagcagccgccgccgcccccagccggagacccctttcgtttgagtcctgctgttggtgtcggagcacgaggggaggcacggtgcggagagcgtcgcatatgcgcgggaaatcaagaactatgatatttttctgtttaaacagctttttttaatttgctatggtgtttataacaaaaaagaaaatttgaaaaaaaaaatcccaggggagtagcaggagccctttgctgtgtgctctgtccagtgtcatgagacgggagccctttgctgtgtgctctgtccagtgtcatgagacgggagccctttgctgtgtgctctgtccagtgtcatgagacgggagccctttgctgtgtgctctgtccagtgtcatgaggcaggtgtttgcaaagccagctctcggttccgatggggtattgctgacctacttttctaggggaaatgctcttaaacactgtaattatgcatttctaatgaaataaaatgtatttatgaccacaaaaaaaaaaaa

SEQ ID NO: 62 - DNA, 2241 bp, Homo sapiens
ggcgctctctgtcccgctcggagctgctcggcgccccagctgcccgccccgccggccgctcctgcccgcggcgcagatggctgtgcgcggcgccaacaccttgacgtccttctccatccaggcgatcctcaacaagaaagaggagcgcggcgggctggccgcgccagaggggcgcccggcgcccgggggcacagcggcatcggtggccgcggctcccgctgtctgctgttggcggctctttggggagagggacgcgggcgcgttggggggcgccgaggactctctgctggcgtctcctgccggtaccagaacagctgcggggcggactgcggagagcccggaaggctgggactcggactccgcgctcagcgaggagaacgagagcaggcggcgctgcgcggacgcgcggggggccagcggggccggccttgcggggggatccttgagcctcggccagccggtctgtgagctggccgcttccaaagacctagaggaggaagccgcgggccggagcgacagcgagatgtccgccagcgtctcaggcgaccgcagcccaaggaccgaggacgacggtgttggccccagaggtgcacacgtgtccgcgctgtgcagcggggccggcggcgggggcggcagcgggccggcaggcgtcgcggaggaggaggaggagccggcggcgcccaagccacgcaagaagcgctcgcgggccgctttctcccacgcgcaggtcttcgagctggagcgccgctttaaccaccagcgctacctgtccgggcccgagcgcgcagacctggccgcgtcgctgaagctcaccgagacgcaggtgaaaatctggttccagaaccgtcgctacaagacaaagcgccggcagatggcagccgacctgctggcctcggcgcccgccgccaagaaggtggccgtaaaggtgctggtgcgcgacgaccagagacaatacctgcccggcgaagtgctgcggccaccctcgcttctgccactgcagccctcctactattacccgtactactgcctcccaggctgggcgctctccacctgcgcagctgccgcaggcacccagtgaacccgcttgggctgaggcagcgagtgattcccgcgctccggctccggaccggcgctgacagctgtaggctgtagcctgcacggggcgccccgccaaggaggcacctggaggtgaaacccagctccagctcccgttagccaggacttgtcccctggcagctgggctgagtctgccctgagggggcgcctttttctaatttgaacagaggcaccctatggcctaggggccctgatcgcccacctgcctggaagcccctgggctctatttattatcatgacaatgttggaattaaattttgattcgaatatgtctgcctgggggtggggttttccctgagcggcaactcctggagaccacatagcctgaatcctcagaatttcaggcctgctgggagctttctgcactaggccacactagttcatggtatccatgctaccaatctatgtgtatctacatatcttttatttttggaaattgcatttgtaaccaaggggtgcgaaaccctggcagtcccaggcagcaccaggccaggggttgatttgaaacgtgaaggattgggttttcaggccctctgctccacccctcctgtgtgtcagagctagggtgggggtgcccgattcgggtgctgaatgtaaggaggggagcctccaagtgtggtgcaagccgggggtctccacatcttccttctctgaagtccaggtacctgcacaagcaggaagcgcctgggagtcccggaaggaggagagcgcacacccaggcagccctctgcggaaactttccttggtttctttttatttgtgtaaaggaggttaagacgtgtcgcacttttcagttgtttgtattcaaatgacgattatttttctactcaatgtgaatatccctggccagcctttccacggcgcccaccgcagtgccgctgcctggccctcagtgtctaccttctgccctctgcgactccagtgctctggcccgggactcccctatccgcccctcacttacccttaaacaggtgatcccacctgtcttgtcaacctcgccgcttttcgcctccttaatggcactgtgcactcaactagagtattaactgtaaaaagatttgtgaagtttggaagctctattcgctgtattttttctttaatttataaacttttagtttaacatgc

SEQ ID NO: 63 - DNA, 1907 bp, Homo sapiens
cttttggatctaatgcgcagaggaggttggcccagagctcccgggctcccccaaggctgaactccgtccaaggtgcccgcaggctccctgcccgccttccccatgccagcccgcagctaggggcaggggcagcggcggctggggttgggggtgggtggggagcttttggggaggacaggtcgcagcttggctatggaaggctccaatggctttgggatcgactccattctctcccaccgcgcgggcagccccgcccttcccaagggggaccccttgctcggggactgccgttcgcccctggagctgagtccacgctcagagagcagcagcgactgctcttcgccagcctctccaggaagggactgtttggagacggggaccccacggcctggcggggcatccggcccaggtttggactcccacctgcagcccgggcagctctcagccccggcccagtcgcgcaccgtcacctcctcctttctgatcagggacatccttgccgactgcaaaccactcgcggcctgtgcaccctactctagcagcgggcagccggcagcccctgagcctgggggccgccttgcggccaaggccgcggaggactttagagacaagctggacaaaagtggcagcaacgcctcatcggactctgagtataaagtgaaggaggagggcgaccgcgagatctccagctccagggacagtcccccggtgcgcctgaaaaagccacgcaaggcgcgcacggccttcaccgaccatcagctggcgcagctggagcgcagcttcgagcggcagaagtacctgagcgtgcaggaccgcatggagctcgccgcctcgctcaacctcaccgacacgcaggtcaagacctggtaccagaaccgcaggactaaatggaagcgacagacggccgtcgggttggagctgctggcggaggcaggcaattactcagcgctccagcggatgttcccgtcgccttatttctacccgcagagtctggtttccaacctggaccccggcgcggcgctctacctgtaccgcggccccagcgcgccgccgcctgctctccagagacctctggtgccccgcatcctcatccacggactccagggcgccagcgagccgcccccgccgctgccccccctggccggcgtcctcccacgcgccgcgcagcctcggtgaggcgcccgtcggctccggggcctcctcccgcgggctcggcgtggccccttccgcccgcctttctgagggcgcaggttcgacgccctttcccgggagggggccctgcccggccctccctggcgccccagcccagtgccccccgaagggccaaatgccaagtccactgaggcccggaccccggactgcgtctccccagcccccctcggcgtcctctctcgcggccgctctgtccgggagccatccccacccgccgggtgtacatacgcgtctctgccactccccacccccagcctctgccggctcccctaggcaacccctttctccccaggagcgggtgcggctgattcccaggcttcgctctctcccacgccccttctacgctccaggtggagaacagcccctctccccgcgcccccgccagggagagaaggggagtgcggagccccgtctccctacccctcgagcacctgggccagcggctgagctgtacataccgtgtgcaaagtgtatatgaagttatttattcgtgacccatgagcccgtgaccgtgtccgtggattagtgagtctgtggcctgtgccctccccactcccaggcggggcaggaaggggccaagggggcttgcccacccaccccgaccccagcccccagcctcagccccggtccgggggcagccaggcctctcgggttctctcttttttaaatgtcgaaataaacttcttacaaatgac

SEQ ID NO: 64 - DNA, 208 bp, Homo sapiens
agttgctggccgaggcagggaactactcggcgctgcagaggatgtttccatcgccttatttctatcacccaagcctgctgggcagcatggacagcactacggcggcggcggctgccgctgccatgtacagcagcatgtaccggactcctccagcaccccatccccagctgcagcggcccctggtgccccgtgtgctcatccacggcct

SEQ ID NO: 65 - DNA, 1498 bp, Homo sapiens
gcgcgccccgcccgcgccctgcgcctccgcccggccggccggcgggggagggggcatgagccggcgcccgcgcgccgccccgagctgcgggccggcctagagccccgcgcgggccccgcgccggagccaagccgtcgccgccgccgccgccaaaccgcgggcgcagcagtgggcgccgcgatgcagcggccgggggagccgggcgccgcgcgcttcggcccgcccgagggctgcgcggaccaccggccgcaccgctatcgcagcttcatgattgaggagatcctcacggagccacccgggcccaagggcgccgcgcccgcagccgccgctgccgcggcgggcgagctgctgaagttcggcgtgcaggcgctgctggcggcgcggcccttccacagccacctggccgtgctgaaggccgagcaggcggcggtgttcaagttcccactggcgccgctgggctgttcagggctgagctctgcgttgctggcggcagggcccgggctgcccggcgccgcgggtgcgccacacctgccgctcgagttgcagctccgcgggaagctggaggcggcaggccctggggagccaggcaccaaagccaagaaggggcgtcggagccgcactgtgttcaccgagctgcagctgatgggcctggagaaacgcttcgagaagcagaagtacctttccacgccggacagaatagatcttgctgagtccctgggcctgagccagttgcaggtgaagacgtggtaccagaatcggaggatgaagtggaagaaaatagtgctgcagggcggcggcctggagtctcccaccaagcccaaggggcggcccaagaagaactcaattccaacgagcgagcagcttactgagcaggagcgcgccaaggatgcagagaaaccggcggaggtgccgggcgagcccagcgacaggagccgcgaggactgagggcggtatacggtgcggggcctgggatgcccgcgccacccgcagccccctcactcggcggaaacccgcgagccggcccttccgcgtccaagaagtttacttcctaagcctttttattatgatcttgaatgcggacaattggggccaaacgaggaaggacacagacccaaaagccagacccaggtcccagcgcgcttctgggctctaacctgggagactcgcatccagcccggcggaagctacagtctctaccctgagctccgtggcgcagagcgctccacgcgtattcacgccccgctcctcgcctgcacccccaccccgtctggggcctgccctcccggccggggagcctccaggcacacacccgcttctggacgtcggggacccagcggttgggctcaggccacaacggcctgagattgccccggggcaacccgtcggctcggcctggaggccgggtccccgatgtcgctggggcccctaccccctcttgcgaagacggtgactttttttccaataaaatattttatgacacaaaaaaaaaaaaaaaaaa

SEQ ID NO: 66 - DNA, 1767 bp, Homo sapiens
cgggcactcgcagccgcgctcgggccggcggacgctcgcgccggctcaccatgcactgccacgccgagctgaggctgagctcgcccggccagctcaaagcagccaggcggcgctacaagactttcatgatcgacgagatcctctccaaggagacctgcgattactttgagaaactttccctctactccgtgtgcccgtcgctggtcgtgcgacccaagcccctgcattcctgtacgggctccccttccctgcgggcatatccgctcctctcggtgatcacccgccagcccactgtcatctcccacctggtccctgccaccccgggaatcgcccaggcactgtcctgccaccaggtcaccgaggcggtctctgctgaggccccagggggcgaggccctagccagcagcgagtcagagacggaacagcccacgccccgacagaagaagccccgccggagtcgcaccatcttcaccgagctgcagctcatgggcctggagaagaaattccagaagcagaagtatttgtcaaccccagacaggttggacttggctcagtctctgggactcactcagctgcaggtgaagacctggtatcagaatcgcaggatgaaatggaagaaaatggttcttaaaggtggacaggaagcacccacaaaacccaaaggtcgccccaagaagaactccatccccacatcagaagagattgaagctgaagagaagatgaacagccaggcccagggtcaggagcagctggagccctctcaggggcaggaggagctctgtgaagcacaggaaccgaaagcacgtgatgtccccttagagatggcagagccaccagacccgccccaggagttgccaataccctcttcggaacccccaccattaagctaaagtaaaacccttttgagggaagagggagactggggagaagggaaaagagagaaggcagggagagtagggagagaaaaccttccagcagcccagtaaactgcgggcgaagagatctacccgtctccctccctcccacagttaccattggccttgtcatcgcaagcatttgacaaagacttgcttgtcttgggcctgtcacctcctgaaaggctgctttagctgtggatgcccttgattaagggagagagcgcctaggagctgcctgccccagctggggtgacggctgtagggctgggtctatgttgcaagccctatatcctagcatgcagtggaaagtgcttagctctctccctcctgacctctgggcagccagtcatcaaagcagagagacgtggcggcatgtgggcagcatgcccaggttccttgctgactcagcacttatttctgtagttttaaaaaagaatttaatgtttttggttgtatttttttgggggggtgagggtgggcaaaaacatgggggtagttctgagttgttagaaatgtttctgaatcaagtttgtttgaagacacgtgtgcctttgtacccattataagatggtcataagacccaagaactgataagctttggttttttttttgttttgttttgttttttgcttcatttacccattcatgcctagggttccattattggaaccctaagcttgtgggagttatttctatcctactgctcaaggtcatcaccaagatctgatttttcataaaaaacatttgtgaccttcggcataaatgggttaaggtgccatccctgaaactgcaatgcagatatgttcagataacttttattttttaattaaaaataaatctttcaaaagga

SEQ ID NO: 67 - DNA, 953 bp, Homo sapiens
caagagagagagagagcgtgcaagccccaaagcgagcgacatgtccctttggggagcagtccctctgcaccccagagtgaggaggacgcaggggtcagaggtggctacagggcaggcagaggaggcacctgtagggggtggtgggctggtggcccaggagaagtcaggaagggagcccagctggtgacaagagagcccagaggtgcctggggctgagtgtgagagcccggaagatttcagccatgcctcacagctccgacagcagtgactccagcttcagccgctctcctccccctggcaaacaggactcatctgatgatgtgagaagagttcagaggagggagaaaaatcgtattgccgcccagaagagccgacagaggcagacacagaaggccgacaccctgcacctggagagcgaagacctggagaaacagaacgcggctctacgcaaggagatcaagcagctcacagaggaactgaagtacttcacgtcggtgctgaacagccacgagcccctgtgctcggtgctggccgccagcacgccctcgccccccgaggtggtgtacagcgcccacgcattccaccaacctcatgtcagctccccgcgcttccagccctgagcttccgatgcggggagagcagagcctcgggaggggcacacagactgtggcagagctgcgcccatcccgcagaggcccctgtccacctggagacccggagacagaggcctggacaaggagtgaacacgggaactgtcacgactggaagggcgtgaggcctcccagcagtgccgcagcgtttcgaggggcgtgtgctggaccccaccactgtgggttgcaggcccaatgcagaagagtattaagaaagatgctcaagtcccatggcacagagcaaggcgggcagggaacggttatttttctaaataaatgctttaaaagaaaaaaaaaaaaaaa

SEQ ID NO: 68 - DNA, 6031 bp, Homo sapiens
cttttcccatcgtgtagtcaagagtctgtgccagacttgaaggctttactttgttagccatgtgtttatgaacccccagcgctttccctagatcttttggctgataatctcaaacatggaggatgcttctgaatcttcacgaggggttgctccattaattaataatgtagttctcccaggctctccgctgtctcttcctgtatcagtgacaggctgtaaaagtcatcgagtagccaataaaaaggtagaagcgaggagtgaaaagctcctcccaacagctcttcctccttcagagccgaaagtagatcagaaacttcccaggagctccgagaggcggggaagtggcggtgggacgcaattccccgcgcggagtcgggcagtggcagcgggagaagcggcagccaggggcgcggcggggccggagagaggcggtcccctgggaggacggggtctcccctcgttgcctttgtagtggagaaggtggacaagtggcagtcggcgtgatcgcagggaagcggggccggcgcgggcggccgagggtccaggcgagcccgcgggcggacgggagatgccgctgctacaccgaaagccgtttgtgagacagaagccgcccgcggacctgcggcccgacgaggaagttttctactgtaaagtcaccaacgagatcttccgccactacgatgacttttttgaacgaaccattctgtgcaacagccttgtgtggagttgtgctgtgacgggtagacctggactgacgtatcaggaagcacttgagtcagaaaaaaaagcaagacagaatcttcagagttttccagaaccactaattattccagttttatacttgaccagccttacccatcgttcgcgcttacatgaaatttgtgatgatatctttgcatatgtcaaggatcgatattttgtcgaagaaactgtggaagtcattaggaacaatggtgcaaggttgcagtgtaggattttggaagtcctccctccatcacatcaaaatggttttgctaatggacatgttaacagtgtggatggagaaactattatcatcagtgatagtgatgattcagaaacacaaagctgttcttttcaaaatgggaagaaaaaagatgcaattgatcccttactattcaagtataaagtgcaacccactaaaaaagaattacatgagtctgctattgttaaagcaacacaaatcagccggagaaaacacctattttctcgtgataaactaaagctttttctgaagcaacactgtgaaccacaagatggagtcattaaaataaaggcatcatctctttcaacgtataaaatagcagaacaagatttttcttatttcttccctgatgatccacccacatttatcttcagtcctgctaacagacgaagagggagacctcccaaacgaatacatattagtcaagaggacaatgttgctaataaacagactcttgcaagttataggagcaaagctactaaagaaagagataaacttttgaaacaagaagaaatgaagtcactggcttttgaaaaggctaaattaaaaagagaaaaagcagatgccctagaagcgaagaaaaaagaaaaagaagataaagagaaaaagagggaagaattgaaaaaaattgttgaagaagagagactaaagaaaaaagaagaaaaagagaggcttaaagtagaaagagaaaaggaaagagagaagttacgtgaagaaaagcgaaagtatgtggaatacttaaaacagtggagtaaacctagagaagatatggaatgtgatgaccttaaggaacttccagaaccaacaccagtgaaaactagactacctcctgaaatctttggtgatgctctgatggttttggagttccttaatgcatttggggaactttttgatcttcaagatgagtttcctgatggagtaaccctagaagtattagaggaagctcttgtaggaaatgacagtgaaggcccactgtgtgaattgctttttttcttcctgactgcaatcttccaggcaatagctgaagaagaagaggaagtagccaaagagcaactaactgatgctgacaccaaagatttaacagaggctttggatgaagatgcagaccccacaaaatctgcactgtctgcagttgcatctttggcagctgcatggccacagttacaccagggctgcagtttgaaaagtttggatcttgatagctgcactctttcagaaatcctcagactgcacatcttagcttcaggtgctgatgtaacatcagcaaatgcaaagtatagatatcaaaaacgaggaggatttgatgctacagatgatgcttgtatggagcttcgtttgagcaatcccagtctagtgaagaaactgtcaagcacctcagtgtatgatttgacaccaggagaaaaaatgaagatactccatgctctctgtggaaagctactgaccctagtttcaactagggattttattgaagattatgttgatatattacgacaggcaaagcaggagttccgggaattaaaagcagaacaacatcgaaaagagagggaagaagcagctgccagaattcgtaaaaggaaggaagaaaaacttaaggagcaagaacaaaaaatgaaagagaaacaagaaaaactgaaagaagatgagcaaagaaattcaacggcagatatatctattggggaggaagaaagggaagattttgatactagcattgagagcaaagacacagagcaaaaggaattagatcaagatatggtcactgaagatgaagatgacccaggatcacataaaagaggcagaagggggaaaagaggacaaaatggatttaaagaatttacaaggcaagaacagatcaactgtgtaacaagagagcctcttactgctgatgaggaagaagcattaaaacaggaacaccaacgaaaagagaaagagctcttagaaaaaatccaaagtgccatagcctgtaccaatatctttcccttgggtcgcgaccgcatgtatagacgatactggattttcccttctattcctggactctttattgaagaggattattctggtcttactgaagacatgctgttgcctagaccttcatcatttcagaataatgtacagtctcaagatcctcaggtatccactaaaactggagagcctttgatgtctgaatctacctccaacattgaccaaggtccacgtgaccattctgtgcagctgccaaaaccagtgcataagccaaatcggtggtgcttttacagttcttgtgaacagctagaccagcttattgaagctcttaattctagaggacatagagaaagtgccttaaaagaaactttgttacaagagaaaagcagaatatgtgcacagctagcccgtttttctgaagagaaatttcatttttcagacaaacctcagcctgatagcaaaccaacatatagtcggggaagatcttccaatgcatatgatccatctcagatgtgtgcagaaaagcaacttgaactaaggctgagagattttcttttagatattgaagatagaatctaccaaggaacattaggagccatcaaggttacagatcgacatatctggagatcagcattagaaagtggacggtatgagctgttaagtgaggaaaacaaggaaaatgggataattaaaactgtgaatgaagacgtagaagagatggaaattgatgaacaaacaaaggtcatagtaaaagacagacttttggggataaaaacagaaactccaagtactgtatcaacaaatgcaagtacaccacaatcagtgagcagtgtggttcattatctggcaatggcactctttcaaatagagcagggcattgagcggcgttttctgaaagctccacttgatgccagtgacagtgggcgttcttataaaacagttctggaccgttggagagagtctctcctttcttctgctagtctatcccaagtttttcttcacctatccaccttggatcgtagcgtgatatggtctaaatctatactgaatgcgcgttgcaagatatgtcgaaagaaaggcgatgctgaaaacatggttctttgtgatggctgtgataggggtcatcatacctactgtgttcgaccaaagctcaagactgtgcctgaaggagactggttttgtccagaatgtcgaccaaagcaacgttctagaagactctcctctagacagagaccatccttggaaagtgatgaagatgtggaagacagtatgggaggtgaggatgatgaagttgatggcgatgaagaagaaggtcaaagtgaggaggaagagtatgaggtagaacaagatgaagatgactctcaagaagaggaagaagtcagcctacccaaacgaggaagaccacaagttagattgccagttaaaacaagagggaaacttagctcttctttctcaagtcgtggccaacaacaagaacctggaagatacccttcaaggagtcagcagagcacacccaaaacaactgtttcttctaaaactggtagaagcctaagaaagataaactctgctcctcctacagaaacaaaatctttaagaattgccagtcgttctactcgccacagtcatggcccactgcaagcagatgtatttgtggaattgcttagtcctcgtagaaaacgcagaggcaggaaaagtgctaataatacaccagaaaatagtcccaacttccctaacttcagagtcattgccacaaagtcaagtgaacagtcaagatctgtaaatattgcttcaaaactttctctccaagagagtgaatccaaaagaagatgcagaaaaagacaatctccagagccatcgcctgtgacactgggtcgaaggagttctggccgacagggaggagttcatgaattgtctgcttttgaacaacttgttgtagaattggtacgacatgatgacagctggccttttttgaaacttgtttctaaaatccaggtcccagactactatgacatcatcaaaaagcccattgccttaaatataattcgtgaaaaagtgaataagtgtgaatataaattagcatctgagtttattgatgacattgagttaatgttttcgaactgctttgaatacaaccctcgtaacacaagtgaagcaaaagctggaactaggcttcaagcattttttcatattcaggctcaaaagcttggactccacgtcacacccagtaatgtggaccaagttagcacaccaccggctgcgaaaaagtcacgaatctgactttgtccttctaaaggatatatttgaagaaaaacaaattgttcatgaaaatggaacattaaatcatgctgtataaagcaataacaattgattgaccacatgaaagtgtggcctgcactatattctcaattttaatattaagcactcaggagaatgtaggaaagatatcctttgctacagttttgttcagtatctaataagtttgatagatgtattggatacagtactggtttacagaggtttttgtacatttttgagatcattcatgtgtccagagatcttggaaaatattttttcacccacgatttattttgttattgatgatttttttttaaagtggtggtattaagggagagttatctacatggatgagtcttccgctatagcacagtttagaaaaggtgtttatgtcttaattaattgtttgagtacattctttcaacactacacatgaatgaatccaatcttataaccttgaagtgctgtaccagtgctggctgcaggtattaagtccaagtttattaactagatatttatttagtattgagagtaatttgtgaatttgttttgtatttataaaatttatacctgaaaaatgttccttaatgttttaaaccttttactgtgtttttattcctctaacttccttaatgatcaatcaaaaaaagtaacaccctccctttttcctgacagttctttcagctttacagaactgtattataagtttctatgtataactttttaactgtacaaataaaataacattttttcaaataaaaaaaaaaaaaaaaa

SEQ ID NO: 69 - DNA, 6079 bp, Homo sapiens
cgttggccgggcccgggggaggaggggaatctcccgccatttttcaataatttcctccggtgctgctgaggagagtcgtgactgccggccgccgggacccgaagcggaggtcggcggggggctgctgggaggcgcggcggtgtgcgcgggagctctgcgccggtggcgttccgctccatgactgtcgcgcggccgcgccggcggtgagggagccggagttcgcgccgccctctcacccctcccttcacccaccccacccccgggcgcctggcgctcgctccgggccgcggggcctagtgctgcgccgcggggccggccccagcagccgccagtccccaccgccgccgccgcgatggcgccgctcctgggccgcaagcccttcccgctggtgaagccgttgcccggagaggagccgctcttcaccatcccgcacactcaggaggccttccgcacccgggaagagtatgaagcccgcttggaaaggtacagtgagcgcatttggacgtgcaagagtactggaagcagtcagctaacacacaaggaagcctgggaggaagaacaggaagttgctgagcttttgaaggaggagtttcctgcctggtatgagaagcttgttctggaaatggttcaccataacacagcctccttagagaagttagtagatactgcttggttggagatcatgaccaaatatgctgtgggagaagagtgtgacttcgaggttgggaaggagaaaatgctcaaggtgaagattgtgaagattcatcctttggagaaagtggatgaagaggccactgagaagaaatctgatggtgcctgtgattctccatcaagtgacaaagagaactccagtcagattgctcaggaccatcagaagaaggagacagttgtgaaagaggatgaaggaaggagagagagtattaatgacagagcacgtagatcgccacgaaaacttcctacttcattaaaaaaaggagaaaggaaatgggctcctccaaaatttctgcctcacaaatatgatgtgaaactacaaaatgaagataagatcatcagtaacgtgccagcagacagcttgattcgtacagagcgcccaccaaataaggagatagttcgatactttatacggcataatgcattacgagctggtactggtgaaaatgcaccttgggtcgtagaagatgaattggtgaagaaatactctctgcccagcaagttcagtgactttttacttgatccatacaagtatatgactctcaacccttctactaagaggaagaatactggatccccagacaggaagccctcaaagaaatccaagacagacaactcttctcttagttcaccactaaatcctaagttatggtgtcacgtacacttgaagaagtcattgagtggctcgccactcaaagtgaagaactcaaagaattccaaatctcctgaagaacatctagaagaaatgatgaagatgatgtcgcccaataagctgcacactaactttcacattcctaaaaaaggcccacctgccaagaaaccagggaagcacagtgacaagcctttgaaggcaaagggcagaagcaaaggcatcctgaatggacagaaatccacagggaattccaaatctcccaaaaaaggactgaagactcctaaaaccaaaatgaagcagatgactttgttggatatggccaaaggcacgcagaagatgacacgagccccacggaattctgggggtacacctaggacctctagtaaacctcataaacatctgcctcctgcagccctacacctcattgcatactacaaagaaaacaaagacagggaggacaagaggagcgccctgtcctgtgttatctccaaaacagctcgtcttctctctagtgaagatagagctcgtctcccagaagaattgcgaagtcttgttcaaaaacgctatgaacttctagagcacaaaaagaggtgggcttctatgtctgaagaacaacggaaagaatatttgaaaaagaaacgggaggagctgaaaaagaagttgaaggaaaaagccaaagaacgaagagagaaagaaatgcttgagagattagaaaaacagaagcggtatgaggaccaagagttaactggcaaaaaccttccagcattcagattggtggatacccctgaagggctgcccaacacgctgtttggggatgtggccatggtggtggaattcttgagctgttattctgggctacttttaccagatgctcagtatcctattactgctgtgtcccttatggaagccttgagtgcagataagggtggctttttataccttaacagggtgttggtcatcctcttacagaccctcctacaagatgagatagcagaagactatggtgaattgggaatgaagctgtcggaaatccccttgactctgcattctgtttcagagctggtgcggctctgcttgcgcagatctgatgttcaggaggaaagcgagggctcagacacagatgacaataaagattcagctgcatttgaggataatgaggtacaagatgagttcctagaaaagctggagacctctgaattttttgagctgacgtcagaggagaagctacagatcttgacagcactgtgccaccggatcctcatgacatactcagtgcaagaccacatggagaccagacagcagatgtctgcagagttgtggaaggaacggcttgctgtgttgaaggaagaaaatgataagaagagagcagagaaacagaaacggaaagaaatggaagccaaaaataaagaaaatggaaaagttgagaatgggttaggcaaaactgataggaaaaaagaaattgtgaagtttgagccccaagtagatacagaagctgaagacatgattagtgctgtgaagagcagaaggttgcttgccattcaagctaagaaggaacgggaaatccaggaaagagaaatgaaagtgaaactggaacgccaagctgaagaagaacgaatacggaagcacaaagcagctgctgagaaagctttccaggaagggattgccaaggccaaactagtcatgcgcaggactcctattggcacagatcgaaaccataatagatactggctcttctcagatgaagttccaggattattcattgaaaaaggctgggtacatgacagcattgactaccgattcaaccatcactgcaaagaccacacagtctctggtgatgaggattactgtcctcgcagtaagaaagcaaacttaggtaaaaatgcaagcatgaacacacaacatggaacagcaacagaagttgctgtagagacaaccacacccaaacaaggacagaacctatggtttttatgtgatagtcaaaaggagctggatgagttgctaaactgtcttcaccctcagggaataagagaaagtcaacttaaagagagactagagaagaggtaccaggacattattcactctattcatctagcacggaagccaaatttgggtctaaaatcttgtgatggcaaccaggagcttttaaacttccttcgtagtgatctcattgaagttgcaacaaggttacaaaaaggaggacttggatatgtggaagaaacatcagaatttgaagcccgggtcatttcattagagaaattgaaggattttggtgagtgtgtgattgcccttcaggccagtgtcataaagaaatttctccaaggcttcatggctcccaagcaaaagagaagaaaactccaaagtgaagattcagcaaaaactgaggaagtggatgaagagaagaaaatggtagaggaagcaaaggttgcatctgcactggagaaatggaagacagcaatccgggaagctcagactttctccaggatgcacgtgctgcttgggatgcttgatgcctgtatcaagtgggatatgtccgcagaaaatgctaggtgcaaagtttgtcgaaagaaaggtgaggatgacaaattgatcttgtgtgatgagtgtaataaagccttccacctgttttgtctgaggccggccctctatgaagtaccagatggtgagtggcagtgcccagcttgccagcccgctactgccaggcgcaactcccgtggcaggaactatactgaagagtctgcttctgaggacagtgaagatgatgagagtgatgaagaggaggaggaggaagaagaggaggaggaggaagaagattatgaggtggctggtttgcgattgagacctcgaaagaccatccggggcaagcacagcgtcatcccccctgcagcaaggtcaggccggcgcccgggtaagaagccacactctaccaggaggtctcagcccaaggcaccacctgtggatgatgctgaggtggatgagctggtgcttcagaccaagcggagctcccggaggcaaagcctggagctgcagaagtgtgaagagatcctccacatgatcgtgaagtaccgcttcagctggcccttcagggagcctgtgaccagagatgaggccgaggactactatgatgtgatcacgcaccccatggactttcagacagtgcagaacaaatgttcctgtgggagctaccgctctgtgcaggagtttcttactgacatgaagcaagtgtttaccaatgctgaggtttacaactgccgtggcagccatgtgctaagctgcatggtgaagacagaacagtgtctagtggctctgttgcataaacaccttcctggccacccatatgtccgcaggaagcgcaagaagtttcctgataggcttgctgaagatgaaggggacagtgagccagaggccgttggacagtccaggggacgaagacagaagaagtagagaggcagggccgtggtgacagtatcagtgagtgccatacagaattgtgtattcaccagcatcatgaaacagttgtggtcttttgagttgatcttggcagagtaaagggacgtgtcctggagccattcctgaatctccccttctttgtgacagctcctcccacccccccaaaaaataaaaaaaccacaaaaaacaaaaaaacaaaactaaggcacttcacttagagactggagtcctgcttataatcatgcatataacctttactttgatggatctggccagaggggtgttggagcccagcccacccacataccagtcaagctcttaggggagcagaagaaaagcaggaagaatttaaatgtttaattttttttttaaattgacttttctagttattaaaagttgcttgtttcagcagtgatattgtataaagaacatcttgtaagatactcctgacatcttgctttagcacatgtacagtacagtttctatgataatgtgtttgctctaacttccctggcttctccttcagcccatccactctcctctagagcagttgggttggaggctcattgaggcaagcagcaacattggagggggagcagggcagtgctgtgtctgctgcctcccatgcccgttctgacctcagccttggaactcctcaagaacctgaagattgagagcggcagagaagctctgagagccccttcccccacaacaaatctagctctagttgttatatttaggcaaaactttgtagtcttctttcccttttatgatggattttgataaaagtacaaaacagggtttttcttttttatcacctttgaatttggaaattttgagcacccaagctcttctgtacctatttaaagtccaccaaggggactgcagctcctagaacatgagaatcaagcctcttaattttaaactgcggaatgtggcctctgcttcctccgtcctcctgcccaaggacgacgaggattgctccagggctgctgggtagtttaccgtcccttctataggcatggagttggcactgacatcacagcttcataaccccaccaccgccagcttcccctgcctcctacatccagtctgttcttgttcatagtgagaatcctgtgttcccacttcagtgacacctgaattgtttgttgttgttttttttttttattgtcttcaaagaggaagggccccattaaagggtgaacttgtaataaattggaatttcaaataaacctcatgtacttgtgtttataaagaagaaaccaa

SEQ ID NO: 70 - DNA, 8934 bp, Homo sapiens
agtctgtcacacagggacatcaccctacagcagttcaggctgtgtggttcgcaggaagcatacactggctttttgattcttgctagttcccagctcacagtttgggaggatccaacaccaacctttacgtgaagtggaggcccaaggacagtgaggagctgggtggtcccagcctggagctgtgccagcctgacatggaaatggaggcaaacgaccattttaactttactggccttccccctgcacctgctgcctcaggactgaaaccctctccttcctcaggggagggcctctacactaacgggtctcccatgaacttcccccagcaagggaaaagtttgaatggggatgtgaatgttaatggcttatctactgtatctcacactactacttcagggattttgaactctgctccccactcctccagcacctcacacctccatcaccccagcgtggcctacgactgtctctggaactactcacagtacccatctgccaatcctggcagcaacctcaaggacccaccccttctctcccagttctcggggggacaatacccactcaacggcatccttgggggcagccggcaaccttcatccccaagtcataacactaaccttcgggctgggagccaagagttctgggccaacggtacccagagtcccatggggcttaactttgattcacaagaactgtatgattcctttcctgaccagaattttgaggtgatgcccaatggaccccctagttttttcacctccccacagacttctcctatgttgggatctagcattcaaacctttgcaccctcccaggaggtaggcagtggtatccatcctgatgaggcagcagaaaaggagatgacttcagttgtggcagagaatggcactggcttggtaggcagcttggagctggaagaagagcagccagaactgaagatgtgtggctacaatggctctgtcccttctgtggaatcgttacaccaagaggtctcagtcctggtccctgaccccacagtgagctgtttagatgatccttcacatcttcctgatcaactggaagacactccaatcctcagtgaagactctctggagcccttcaactctctggcaccagagccagtgagtggaggactatatggtattgatgacacggagctgatgggtgcagaggacaagctgcctcttgaggacagccctgtgatttctgcccttgattgcccttccctcaataatgctactgccttcagtctcctggcagatgatagtcaaacatcaacctctatctttgccagtcccacctctccacctgtcctaggggagtctgtcctgcaagataacagctttgacctgaataatggtagtgacgctgaacaggaagaaatggaaactcaatcttcagacttcccaccatccctgacccagccagctcctgatcagtcatccactattcagctacatccagcaacctcaccagcagtctcgccaacaacctccccagcagtctccctagtggtttctccagcagcctccccagaaatctctccagaagtttgtcccgcagcttctacagttgtctctccagcagtcttctcagtggtctctccagcttcctcagcagtcctcccagcagtctccttagaagtcccgttgacggcttcagtgacatccccaaaagcctctcccgtaacttccccagcagctgcctttccaacagcctccccagcaaataaggatgtcagcagctttctagaaaccactgctgacgtggaagagatcactggagaaggactcactgcttctggtagtggtgatgtcatgaggagacgtattgctaccccagaagaagttcgtcttcccctccaacatgggtggcggagagaggtgcgcatcaagaagggcagccaccgatggcagggggagacctggtattatggcccctgtgggaagaggatgaagcaatttccagaagtgatcaagtacctgagccgcaacgtggtacacagtgtccgccgagagcacttcagcttcagtccccgtatgcctgttggagatttctttgaagaaagagacacgccagagggcttgcagtgggtgcagctctcagcagaggagatcccgtcgaggattcaggcaattactggcaaacggggtcgacctcgaaacactgagaaggctaagactaaggaagtccccaaggtgaaacggggtcgaggtcggccacctaaggtcaaaatcactgagctattgaacaagacagacaaccgccccctaaagaaactggaggcccaagaaacattgaatgaggaggataaagcaaagattgctaaaagcaagaagaagatgaggcagaaggttcaacggggagagtgtcagactactatccaagggcaggccagaaataagcggaaacaagagaccaagagcttaaagcagaaggaagctaagaagaaatccaaggctgagaaagaaaaaggaaagacaaagcaggaaaaactgaaggaaaaagtcaagagggaaaagaaggagaaggtaaaaatgaaggaaaaggaggaggtgaccaaagccaagccagcctgtaaagcagataagaccctggccacacagaggcgcttggaggaacggcagaggcagcagatgatcttggaggaaatgaagaagccgacagaggatatgtgtctgactgaccaccagcccctgcctgacttctcacgagtccctggtctgacattgcccagtggagccttctcagactgcttgaccattgtggagttcctgcatagctttggcaaggtgctgggctttgatcctgccaaagatgtgcctagcctgggggtcctgcaggagggactcctgtgtcaaggtgacagcttgggtgaggtgcaagacctgctggtcaggctgctgaaggctgcactccatgatcctggctttccctcctactgtcagtccctaaagatcttgggggagaaggtgtctgagatcccactgacaagagacaatgtgtcagagatcctgcgctgcttccttatggcatatggagtagagccagccctctgtgaccgcctgcgcacccagccttttcaggcccagccaccccagcagaaggctgctgtcctggccttccttgtgcatgagctcaatggctccaccctcatcatcaatgagattgacaagactctggagagtatgtccagctacaggaaaaacaagtggattgttgaaggccggctccggaggctgaaaactgttctggccaagcgaactgggcggtctgaagtagagatggaagggccagaggaatgcctgggacggaggcgcagttctcggatcatggaggagaccagtggcatggaagaagaggaagaagaggagtctatagcagctgtccctggccgcaggggtcgaagagatggagaggttgatgccacagcatctagcatcccagagctagagcgccagatagaaaaactcagcaagcgtcagcttttctttcgcaaaaagctgcttcactcatcccagatgcttcgggcggtctccctgggtcaggaccgctacagacgtcgctactgggtattgccgtatttggctggtatctttgtagaaggaacagaggggaacttagttcctgaggaggtgataaagaaggaaactgactccttaaaagtggcagcccatgcgtcactcaaccctgccctcttctctatgaagatggagttagctggctccaacaccactgccagttctcctgcccgggcccgaggccgacctcgaaaaactaagcccgggtctatgcaacctaggcatcttaagtcccctgtcaggggtcaggattcagaacagccccaggcccagcttcagcctgaggctcagcttcatgctcctgcccagccccagcctcagcttcagcttcagcttcagtcccataaggggttcctggagcaagaaggctcccctttgtcactgggtcagagccagcatgacctcagccagtcagccttcctgtcttggctgagccagactcagagccatagctccctgttgagcagctcagtcctcacacctgatagcagtccgggaaaactagacccagctccatcacaacccccggaggagccagagcctgatgaggcagaatccagccctgatcctcaagcactctggtttaacatctcagcccagatgccctgcaatgctgcccccacaccgccccctgcagtttctgaggaccaacccactccctcccctcagcagcttgcctcctccaagccaatgaatagacctagtgctgccaacccttgttctccagtgcagttctcttccacgcccttggctgggttggcccctaagaggcgagcaggagaccctggagaaatgccacagagtcccacagggctgggacagcccaaacggagagggagacctcccagtaagttcttcaaacagatggaacagcgttacctaacccagctgacagcccagcctgtcccacctgagatgtgctcaggctggtggtggatacgagatcctgagatgttggatgccatgctcaaggccctacacccccgaggtatccgggagaaggcacttcacaaacaccttaacaagcacagggacttcttgcaggaagtctgcctgcggccctcagctgaccccatctttgagcccaggcaactacctgcctttcaagaagggattatgagctggtcccccaaagagaagacatacgagacagacctagcagtgcttcaatgggtagaggagctggagcagcgggttatcatgtctgatctgcagattcggggctggacatgtcctagcccagactctacccgtgaagacttggcctactgtgagcacctctccgactcccaggaggatatcacctggcgaggtcggggcagggagggactggcacctcagcgtaaaactaccaaccctttggacctggctgtgatgcggctggctgccctggaacagaatgtagaacggcggtacctgcgggagcccctctggccaactcatgaggttgtgctggagaaggccctgcttagcacacctaatggtgcccctgagggcaccactacagagatatcatatgagatcacccctcgcattcgtgtctggcgccagaccctcgagcggtgccggagcgcagcccaggtgtgcttgtgcctgggccagctggagaggtccattgcctgggagaagtctgtcaacaaagtgacatgtctagtctgccggaagggtgacaatgatgagtttcttctgctttgtgatgggtgtgaccgtggctgccacatttactgccatcgtcccaagatggaggctgtcccagaaggagattggttctgtactgtctgtttggctcagcaggtggagggagaattcactcagaagcctggtttcccaaagcgtggccagaagcggaaaagtggttattcgctgaacttctcagagggtgatggccgccgacgccgggtactgttgaggggccgagaaagcccagcagcagggcctcggtactcggaagaagggctctccccctccaagcggcggcgactctctatgcggaaccaccacagtgatctcacattttgcgagattatcctgatggagatggagtcccatgatgcagcctggcctttcctagagcctgtgaacccacgtttggtgagtgggtaccggcgcatcatcaaaaatcctatggatttttccaccatgcgggagcggctgctcaggggagggtacaccagctcagaggagtttgcggctgatgccctcctggtatttgacaactgccagactttcaacgaggatgactctgaagtaggcaaggctgggcacatcatgcgccgcttcttcgagagccgctgggaggagttttatcagggaaaacaggccaatctgtgaggcaagggaggtggggagtcaccttgtggcatctccccccaccttccaaacaaaaacctgccattttcacctgctgatgctgccctgggtccagactcaagtcagatacaaccctgatttttgaccttgcccttggcagtgccccacatcctcttattcctacatccctttctcccttccctcctcttgctcctcaagtaagaggtgcagagatgaggtccttctggactaaaagccaaaaaaagaaagaaaaaaataatttttcttttctgttttatttgctaattaaaaatggggagggggaaagtcgtccctacttcctcctccctgcttcctctcctcccctgtacgtgccccagcattctggggttatttaacaatagcaatagttctagtgaatgtgtgaaaccaagaaacactctgtactgtgtgcggacccgcagtgacggccagtaaagtggacttaactcccaagtgtgtcgcgccggacaccgggccctggacatgctgcttccatgttcagtcccttccctgcttctcgctgtctttcttttcccacctcccaccccccagttttcagattttctctcatccaataatgtaaaactatcgtgtacgggttcctccctccttttctcttctcccaaatcttttcccttcaaaggaaaaaaaaatgttcagaggtccctgtcttctgtccccatcttcctgccgatagctatcccctgtatgatgttggatgctcctcacatgctgagtttccagccttttctgaaactcagtagctggggagagggcagggaggcttcctgggccttccagcctccttccccacctccttcccaaaccctcttgggaactcctcagggacaactactgctgagtttgggtgcaccctaagatggaggccaggtagcaatggggccggcctcagagagagcgctgtgtgtgtgtgtgtgtgtgtgtgtgtgtgtgtgtgtcggcctcagagcgcgctgtgtgtgtgtgtgtgtgtgtcagcctcagagcgcgcgctgtgtgtgtgtgtgtgtgtgcgtgcttgtgaccctgtattgtttgataggatccattcagtttccccaagtacctgttttcattcccatttttcccattgtttaaaaccatcacttttttgtctttgggaaaccacaggaacaatttctctggagacaaggctgtgtctctctcctggtcatttttgttccagcctcttcagactgtgcaatctttcagcaggaactccctctcttctcggtagctttgaatcttaagcttctacgggagagtggtagaactggatcatttcctaatcccatttagttgtgcttttcttcatttacttcataccccaggaccccttccccagcagcagagaccctggagcacaggagagtagggaggaggggttctgggtccatcactgccctacatgtgactatgtccaagttaagcccccaacacgagaggaaagctgctgactcccagctatagccatgggcacttggccccctgcttttcctgctcagcagagcccctcccttcagagattacgggtacttgcactggggaggtggctgctggctggcccaagcagagagctgaggcatccaagaaatgttccattggggggtgggggtgccaggtgaggtggagcattccttgtattctggcagcactgaagagccactgaagggggtaggggcagtgtaggtcctggggcagcccctttattcctttatgccccttctccctcatagcctatttctaaagtcgccttttctgtcagataaacctcaaaacttttaattttatttgagatttttttttgcttttaagaggtggattgaagaatatttgaattgactttatattatgcataaatatttatattttatctaaataactgcgctgtaacaaactttgtgttagacagttgaaactgttagagttgggggctctgctttttccccctggcaattttcccctggtataagatgtgctagattaatttcattgtgaggtggatgggggagtgaaattgtgaggtggatgggggagtgaaatctccatggttcctgctttgtgttcctctcccagctccatctctttccctagggaccaggcactcatatggcggggtggggtcctagcctcagtttgaagaagtgggggctggagcggggttgggggtggtagggatagggcatgatcaaaggggccatttcttgcttttctttcctcatcttcactgcccccttgagctaggtggattttctcttcatgacaagagtatttggtagggaaagcaggtttaaaataaaaagacaacccaccccctgcccttttgcttccctcccatcagtctggttgacaggaagaaaccacaccatcaacaccaacaagtttctgtgttccttttacagcaaaagggactttttatataaccaaatgtggtgttttagtgactttttgataatgtacagttttttgtgaatttaaatttatttctttctatatttttaggaccaatctcatttttaataaggttaaaaagaaaaaaaaagtctagcgaaaaaactcctgtttttgccatgtgatgttccacaagtgcagctgtagaaaagtgcttgtcagttgttgaataaaaaaaaccacatttgatagagattcaaaagactctgtgtattcatcttcccttctacacacctgagggggagacggcgttgggataggtatgactggcttaagagaccacaggcaagggaacaacaggggctcctgttccataccctctgtgtggatggaaagggtcattagtgctcctgcctaaatgtctggctgagttgctggagcaaagggggattcagtgcatccaggtcctgccttgtgagatgtggccccagcttcctaagctgccacctctgtgttcctgtcatagcaaatatgggaccatcaccagcttaccacttcccactcacggataagacaccaagacgtagac

SEQ ID NO: 71 - DNA, 8145 bp, Homo sapiens
acttggttcatgaagccttcgcctagaagtgaagctgctgaacaaaccttgagaagaatcatctcctgcttcaatctgctgctggataggaactaatcagagagagagaggcggaagacggagaaggagggagtcgaaggctttcccgatcacaaatctcacctccactacaactctctttatacttttcttgcagaaataataatagaaataaggaggtggtggggtttccaaaaatcttaaccttcaaccatctggggaaaaggcaaaaatcccatctaccgcaactctcagttcgagagtaaaggtttcccaacagtgatgtcacaagattgaccacattgatcacaatatggagtctggagaacggttaccatcctcagcagcctcctctactacaccaacttcatcttcgacaccttctgtggcttcagtagtttcaaaaggtggcctttccactggagttgcttcacttagctctacaatcaacccatgtggacatttattcagaacagctggggatcaaccgtttaacctgtccacagtgtcgagtgccttcccaatggtcagccacccagtctttggtctacattcagccagctcagggcattcagaatttggtggtttggggacacttggtacacccacagccttagccgcacatccccaactagcatcttttccaggtgcagaatggtggcgaacaactgatgctcatactcgtacaggagcaaccttctttccaccattactgggaattccaccactatttgctcccccagcccagaatcatgattcttcttcattccattcaaggacttcgggaaaaagtaatcgaaatggtcccgaaaaaggtgtaaatgggtcaataaatggaagtaatacatcatctgtaattggtatcaacacatctgtactatccactactgcttcaagttccatgggacaaactaaaagtacaagctcaggtggaggaaatcgaaaatgtaatcaggaacaaagcaaaaaccagcctttggatgctagagttgacaaaatcaaagataagaaaccaaggaagaaagcaatggaaagttctagcaacagtgatagtgattcaggcacatcatcagacacctcaagtgaaggcattagtagcagtgattcagatgatctagaagaagatgaagaagaagaagatcaaagtattgaagaaagtgaagatgatgattctgattcagagagtgaagcacaacataaaagtaacaaccaggtgctattacatggtatttcagacccaaaagcagatggacagaaagcaactgaaaaagcccaggaaaaaagaatacaccagccattacctcttgcgtctgaatcccagactcactcattccaatcccagcagaagcagcctcaggttttgtcacagcagcttccatttattttccaaagctctcaggcaaaggaggaatctgtgaacaaacacaccagtgtaatacagtctacgggattggtgtccaatgtgaaacctttatctttggtaaatcaagccaaaaaggaaacttacatgaaactcatagttccttctcctgatgttcttaaagcagggaataaaaatacctctgaagaatctagtttattgaccagtgaattgagatccaaacgggaacaatataaacaggcattcccatcacagttaaagaaacaagagtcatcgaagagcctgaagaaggttattgcagctttgtcaaatccaaaagcaacctctagttcaccagcacatccaaaacaaacattagaaaacaaccacccaaatccattcttgacaaatgcacttttaggtaatcaccaaccaaatggagttattcaaagtgtcattcaagaagctcctctagcacttactaccaaaactaaaatgcagagcaagattaatgaaaacattgctgctgcaagtagcacccctttttcctcacctgtaaatctgagtacaagtgggagaagaacccctggcaatcagacacctgtaatgccctctgcctctcccatcctgcatagtcaagggaaggaaaaagcagttagcaataatgtaaacccagtaaaaacacagcatcactcccatcctgcaaaatctttagtggaacaattcagaggaacagattcagacattcccagtagtaaagattctgaagattcaaatgaggatgaagaggaagatgatgaagaagaagatgaggaagatgatgaagatgatgaatctgatgacagccaatcagaatcagatagtaattcagaatcagatacagaaggatcagaagaagaagatgatgatgataaagaccaagatgaatcagatagtgatactgaaggagagaaaacttcaatgaaactgaataaaacaacttcctctgtcaaaagcccttccatgagtctcacaggtcactcaacacctcgtaacctccacatagcaaaagccccaggctctgctcctgctgccttatgttctgaatcccagtcacctgcttttcttggtacatcttcttccacacttacttcaagcccacactctggcacttccaaaagaagaagagtaacagatgaacgtgaactgcgtattccattggaatatggctggcagagagagacaagaataagaaactttggagggcgccttcaaggagaagtagcatattatgctccatgtggaaagaaacttaggcagtaccctgaagtaataaagtatctcagcagaaatggaataatggatatctcaagggacaatttcagcttcagtgcaaaaataagagtgggtgacttctatgaagccagagatggaccgcagggaatgcagtggtgtcttttgaaagaagaggatgtcattcctcgtatcagggcaatggaaggtcgtagaggaagaccaccaaatccagatagacaacgagcaagagaggaatccaggatgagacgtcggaaaggtcgacctccaaatgttggcaatgctgaattcctagataacgcagatgcaaagttgctaagaaaactgcaagctcaagaaatagccaggcaagcagcacaaataaagcttttgagaaaacttcaaaagcaggaacaggctcgggttgctaaagaagccaaaaaacaacaagcaataatggctgctgaggagaagcggaagcaaaaagaacagataaagattatgaaacagcaggaaaaaattaagagaatacagcaaatcagaatggaaaaagaacttcgagctcagcaaattctagaggctaaaaagaaaaagaaggaagaagcggcaaatgccaaattattggaggccgagaaacgaataaaggaaaaagaaatgagaagacaacaagctgttcttctgaaacatcaggaacgagagcgaaggcgacaacacatgatgcttatgaaagctatggaagctcgtaaaaaagcagaagaaaaagagcggttgaaacaagaaaaacgtgatgagaaaagattaaataaagagcgtaaactagagcagcgaagattagaattagaaatggcaaaggaactaaagaagcctaatgaagacatgtgcttagcagaccaaaagcctttgccagagttgcctcgtattccaggacttgttctctctggaagtacattttcagactgtctcatggtggtgcagttcttacgaaactttggtaaagttttgggctttgatgtgaatattgatgttccaaacctgagtgttcttcaagagggattgctaaatataggggacagcatgggtgaagtacaagacttgcttgtgaggctcctctcagctgctgtatgtgatccaggtctaataacaggatacaaggctaaaacagctcttggagaacatttgctgaatgttggtgtgaatcgagacaatgtttccgagattttacagatatttatggaagcccactgtggacaaactgagcttactgaaagtctgaagaccaaagcttttcaggctcacactccagcacagaaagcttcagtcctggctttcctgatcaatgaactggcatgcagcaagagtgtggtcagtgaaatcgacaagaacattgattatatgtcaaacttgaggagagataaatgggtggtagaaggtaaactccgcaagctcagaatcattcatgctaagaaaacaggcaaaagagacacttcaggtggcattgatctgggagaagagcagcatcccttgggcacacccactccaggacgcaagcgaagaaggaagggaggagacagtgattatgacgatgatgatgacgatgacagtgatgaccaaggggatgaagatgatgaggatgaagaagataaagaagacaaaaaaggaaaaaagactgatatctgtgaagatgaggatgaaggtgaccaagcagcaagtgttgaagagctggaaaaacagattgaaaaactgagtaaacaacagagtcagtacagaaggaagctctttgatgcgtctcactcattgcgttcagtgatgtttggccaagatcgttacagacgccggtactggattcttccccaatgtggggggatttttgtagaaggcatggagagtggtgaaggactagaagaaattgcaaaagaaagagaaaaactgaaaaaggcagaaagtgtccagatcaaagaagaaatgtttgagacttctggggacagtttaaattgttcaaatacagatcactgtgaacaaaaggaagatcttaaagaaaaagataacacaaatctattccttcagaaacctggctctttttccaaattaagcaagcttttggaagtagctaagatgcctcctgagtcagaggttatgacccccaaaccaaatgctggtgcaaatgggtgcacgttgtcttatcagaacagtggaaaacattcactgggcagcgttcagtcaacagcaacgcaaagcaatgtggaaaaggcagactctaataatctgtttaatactggttcaagtggtccagggaagttctacagtcctctccccaatgaccagttactaaaaacgctgactgaaaagaatagacaatggtttagtcttttgccacgaacaccctgtgatgacacttcacttactcatgccgatatgtcaactgcttctttggtgactcctcagtctcagccaccatctaagtcaccttcacctaccccagctcctcttggatcttctgctcagaatcctgttggcttaaatccatttgctttatcacctcttcaggtgaaaggtggagtatctatgatgggacttcagttttgtggatggcccactggtgtggttacttctaatattccatttacatcatctgtacctagtctaggatcggggttagggttatcagaaggaaatggtaattcattcttgacttccaatgttgcttcaagtaaaagtgaatctccagtaccacagaatgaaaaggccacttcagctcaacctgcagctgttgaagtagcaaaaccagtagattttcctagtccaaaacctattccagaagaaatgcagtttggttggtggagaattattgacccagaggacctaaaagctttgctcaaagtgctgcatctcagaggaataagagaaaaggcattacaaaaacaaattcagaaacatttggattatattactcaagcctgcctcaagaataaggatgttgctattattgaactgaatgaaaatgaagaaaaccaagtaactcgagatattgtggagaactggtcagtagaagaacaagcaatggaaatggatttgagtgtccttcaacaggtagaagatctagaaaggagagttgcatcagcaagtttgcaagtgaagggttggatgtgtccagagcctgcatcagaaagggaggacttggtatattttgaacataaatcatttactaaattgtgcaaggagcatgatggagaatttactggcgaagacgaaagcagtgcacatgcactagaacggaagagtgacaaccccctagatatagctgtaaccaggctggctgatttggagcggaacattgaaagaagaattgaagaggatattgctccagggctcagggtatggagaagggcattatcagaagctcgcagtgctgcacaggtagctctgtgcattcagcaattacagaaatcaatagcatgggaaaaatcaattatgaaagtttactgccaaatctgtcgaaagggagataatgaagaactgcttcttctttgtgatggctgtgacaaaggctgtcatacctactgccatagacccaagattacaacaatcccagatggagactggttttgtccagcttgcattgctaaggcaagtggtcaaactctaaaaatcaaaaaacttcatgtcaaaggaaaaaagactaatgagtcaaagaaaggcaagaaggtaactttaacaggagatactgaagatgaagactctgcatctacaagtagttcactaaaaagaggaaacaaagacctcaagaaaagaaaaatggaggaaaacacttctattaacttgtcaaaacaagaaagttttacttcagttaagaaacctaaaagagatgactccaaggacctagctctttgcagtatgattctgactgaaatggaaactcatgaggatgcatggccttttctacttcctgtaaacttgaaacttgttcctggttataagaaagttattaagaagcctatggatttttccacaattagagagaaactaagtagtggacagtatccaaaccttgaaacctttgctctagatgtcaggcttgtttttgacaactgtgaaacatttaatgaagatgattctgatataggcagagctggccacaatatgaggaagtattttgaaaaaaagtggacagatactttcaaagtgagctgaagttataataatctctttatttttttccttctaaacaaggacaaatgagaccagcaatgtgaactgtatttacataaacgtgcaaggcacatacataatgactttctttttccttaagtataaaaaaaaagtatcagaagaatgataccatttttaaaggcttcattcctacaacaaccaaggccctcggttattggtttgtgtgatttatcagctaatttaggtagaacagggaagcacacccaaagaattttcaaaggaaagggtgttatagtgcaatagcaattaaaatatatcaaatcgcactgaatactcaacaccagagctctaatgtgggaaatggttctcctttccctctcaataaatatctatttttcatttttttactttgtagtttattttttagtgaatgtatttaattttatgaattatttatgattaaaccacatccagaatcttcgttttctgtgaaaaggaagaactagaaaattgctttaaatcttgaaaatacaaggaatgttttaaaatataaaacaaagccaagttaaactgtttacactgatgtgctataaaagcaccaaaaagaaactttactgtagagttacaagtacatttatatatatatgttgctgcatcacttgtgtagttaaattgtatttcaaaacagtgaaaaaattgacatgtatatactgttcattcttgtttatattaagtcttgttttaaatatgtattatgtgtatatattgtttgcagacattattgttcatgccttagaggattgtagcattttattttcgtctgaaggtaatgatagctatacagtctgtacagtaattatcctctaccaacactgtggcgtctccttaatcttggtagtgcctgcctttgaaacagggtgtaggggatattagttttccatttttctattttgttatataattttaagccaccagggcctaaattaaagtataatcatttgtatccatgtggaataaaattgtgacaatttcctacgcacacagtattttttcatagaaacatttccctcccatttgccttgcctcagaaataaatttaaaagacgtttgtaaccactgtgttttatctactgtgtgttgtggtggcctgttggaggcaaatagatcagattttttttgtacctacgtaagagtacttgaagttttatttaaaataaaatgttgtggaaaaggtagcattctttttttaggagtgttatttttcactatgtgtggcacggatacaataaaagacttttacaaactaa

SEQ ID NO: 72 - DNA, 3958 bp, Homo sapiens
ttttttttttttttttgcttaaaaaaaagccatgacggctctcccacaattcatcttccctgcgccatctttgtattatttctaatttattttggatgtcaaaaggcactgatgaagatattttctctggagtctccttctttctaacccggctctcccgatgtgaaccgagccgtcgtccgcccgccgccgccgccgccgccgccgccgcccgccccgcagcccaccatgtctcgccgcaagcaaggcaaaccccagcacttaagcaaacgggaattctcgcccgagcctcttgaagccattcttacagatgatgaaccagaccacggcccgttgggagctccagaaggggatcatgacctcctcacctgtgggcagtgccagatgaacttcccattgggggacattcttatttttatcgagcacaaacggaaacaatgcaatggcagcctctgcttagaaaaagctgtggataagccaccttccccttcaccaatcgagatgaaaaaagcatccaatcccgtggaggttggcatccaggtcacgccagaggatgacgattgtttatcaacgtcatctagaggaatttgccccaaacaggaacacatagcagataaacttctgcactggaggggcctctcctcccctcgttctgcacatggagctctaatccccacgcctgggatgagtgcagaatatgccccgcagggtatttgtaaagatgagcccagcagctacacatgtacaacttgcaaacagccattcaccagtgcatggtttctcttgcaacacgcacagaacactcatggattaagaatctacttagaaagcgaacacggaagtcccctgaccccgcgggttggtatcccttcaggactaggtgcagaatgtccttcccagccacctctccatgggattcatattgcagacaataacccctttaacctgctaagaataccaggatcagtatcgagagaggcttccggcctggcagaagggcgctttccacccactccccccctgtttagtccaccaccgagacatcacttggacccccaccgcatagagcgcctgggggcggaagagatggccctggccacccatcacccgagtgcctttgacagggtgctgcggttgaatccaatggctatggagcctcccgccatggatttctctaggagacttagagagctggcagggaacacgtctagcccaccgctgtccccaggccggcccagccctatgcaaaggttactgcaaccattccagccaggtagcaagccgcccttcctggcgacgccccccctccctcctctgcaatccgcccctcctccctcccagcccccggtcaagtccaagtcatgcgagttctgcggcaagacgttcaaatttcagagcaacctggtggtgcaccggcgcagccacacgggcgagaagccctacaagtgcaacctgtgcgaccacgcgtgcacccaggccagcaagctgaagcgccacatgaagacgcacatgcacaaatcgtcccccatgacggtcaagtccgacgacggtctctccaccgccagctccccggaacccggcaccagcgacttggtgggcagcgccagcagcgcgctcaagtccgtggtggccaagttcaagagcgagaacgaccccaacctgatcccggagaacggggacgaggaggaagaggaggacgacgaggaagaggaagaagaggaggaagaggaggaggaggagctgacggagagcgagagggtggactacggcttcgggctgagcctggaggcggcgcgccaccacgagaacagctcgcggggcgcggtcgtgggcgtgggcgacgagagccgcgccctgcccgacgtcatgcagggcatggtgctcagctccatgcagcacttcagcgaggccttccaccaggtcctgggcgagaagcataagcgcggccacctggccgaggccgagggccacagggacacttgcgacgaagactcggtggccggcgagtcggaccgcatagacgatggcactgttaatggccgcggctgctccccgggcgagtcggcctcggggggcctgtccaaaaagctgctgctgggcagccccagctcgctgagccccttctctaagcgcatcaagctcgagaaggagttcgacctgcccccggccgcgatgcccaacacggagaacgtgtactcgcagtggctcgccggctacgcggcctccaggcagctcaaagatcccttccttagcttcggagactccagacaatcgccttttgcctcctcgtcggagcactcctcggagaacgggagtttgcgcttctccacaccgcccggggagctggacggagggatctcggggcgcagcggcacgggaagtggagggagcacgccccatattagtggtccgggcccgggcaggcccagctcaaaagagggcagacgcagcgacacttgttcttcacacacccccattcggcgtagtacccagagagctcaagatgtgtggcagttttcggatggaagctcgagagcccttaagttctgagaaaatttgaagcccccaggggtggggtggacgcgtgccgcccagtcgacgtcagcgtggtctgtcatcctgctagtttgtgatgttttctgacagtagcctccaagaagccgttgtgcgaagacagagtcctgcagagtccttccagcctaggcctgcagcgccattttatttatattttttaataaaaagtaaaaacaaaaaaacagacccacattggaacagtgaatcagtcccatagagagggcccgtggaccatcgctgtcatgagtgatgccctggcccttctgaaaccagccaacctaattacctgtattgtggaaatgcgcatgagtccccaaccccttgtttctatacattctatgttgtcttttaaaaagtgtgcttaacattgacacaataaatgttggagctttaggtggtgtttgcttgttctttaatttttaatgcttataagacaatgaggctgcttatgattttgtacttctgtacctgtttcctacagacacccatcgggtgggtaggaggaacagatttgagaaatgggcaggagatgtaggaggggaactaggttaccgcttatcagatggcataaattttcaaggagaatcaaaatgcaaaacttgggaataaatcatagcaatatcataattaatgtagtagtaatattgctgtttattaatgctgaagtgtggttttcctaactgtctgacttataatttgcataccattaaataatgcataatatggcacgccgaatcctgtttttcaaatatatgcttttggtggctaccatgcaggatttgaatttgtcttttaatttagcttaggaaagaacatcactgggcgagcggtaaatcctaaagaaggtgataaatgtcagtagtttcttattaaatattctaattttaggttcccaaaccttcaggaaatatatcttaatgcagacaaacaaacataaaacttctttagtacttacatcaggaaatttggggcagattttagaggggggaaattataggaggaaagaagttcacatcagaacagacaatcacagcaatgctctattccttagaaattagtgccacaaataagttacatctacaaacaggtggtaaaaattctttctggcccagttaatttgcacagaacttttctcagtttggtattttttactgcttggagatccagaagagaattagaaacaacatagcaaattaaaataggtttgtcaataatagagctcagacacctgtgtgctgtagattcacatacaggccgtgaacctaagtggggaaaatcctacctatccaccttctggctagattacctagcttagtgaaaagatagccaaataattggcatgtgaattatttcctgcttattcataataaataatgactgtcta

SEQ ID NO: 73 - DNA, 7603 bp, Homo sapiens
ttttcttgcttttcttcccttttttttctttttgcaaacaaaacaaaaaacagcatagaagaaagagcaaaataaagaagaagaagaggaggaagagagggaaagagaggaagggaaaaaaaacaccaacccgggcagaggaggaggtgcggcggcggcggcggcggcggcagcggcggcagcggcgcggcggcggctcggaccccctcccccggctccccccatcagtgcagctctccgggcgatgccagaatagatgccggggcaatgtcccgccgcaaacagggcaacccgcagcacttgtcccagagggagctcatcaccccagaggctgaccatgtggaggccgccatcctcgaagaagacgagggtctggagatagaggagccaagtggcctggggctgatggtgggtggccccgaccctgacctgctcacctgtggccagtgtcaaatgaacttccccttgggggacatcctggtttttatagagcacaaaaggaagcagtgtggcggcagcttgggtgcctgctatgacaaggccctggacaaggacagcccgccaccctcctcacgctccgagctcaggaaagtgtccgagccggtggagatcgggatccaagtcacccccgacgaagatgaccacctgctctcacccacgaaaggcatctgtcccaagcaggagaacattgcaggtaaagatgagccttccagctacatttgcacaacatgcaagcagcccttcaacagcgcgtggttcctgctgcagcacgcgcagaacacgcacggcttccgcatctacctggagcccgggccggccagcagctcgctcacgccgcggctcaccatcccgccgccgctcgggccggaggccgtggcgcagtccccgctcatgaatttcctgggcgacagcaaccccttcaacctgctgcgcatgacgggccccatcctgcgggaccacccgggcttcggcgagggccgcctgccgggcacgccgcctctcttcagtcccccgccgcgccaccacctggacccgcaccgcctcagtgccgaggagatggggctcgtcgcccagcaccccagtgccttcgaccgagtcatgcgcctgaaccccatggccatcgactcgcccgccatggacttctcgcggcggctccgcgagctggcgggcaacagctccacgccgccgcccgtgtccccgggccgcggcaaccctatgcaccggctcctgaaccccttccagcccagccccaagtccccgttcctgagcacgccgccgctgccgcccatgccccctggcggcacgccgcccccgcagccgccagccaagagcaagtcgtgcgagttctgcggcaagaccttcaagttccagagcaatctcatcgtgcaccggcgcagtcacacgggcgagaagccctacaagtgccagctgtgcgaccacgcgtgctcgcaggccagcaagctcaagcgccacatgaagacgcacatgcacaaggccggctcgctggccggccgctccgacgacgggctctcggccgccagctcccccgagcccggcaccagcgagctggcgggcgagggcctcaaggcggccgacggtgacttccgccaccacgagagcgacccgtcgctgggccacgagccggaggaggaggacgaggaggaggaggaggaggaggaggagctgctactggagaacgagagccggcccgagtcgagcttcagcatggactcggagctgagccgcaaccgcgagaacggcggtggtggggtgcccggggtcccgggcgcggggggcggcgcggccaaggcgctggctgacgagaaggcgctggtgctgggcaaggtcatggagaacgtgggcctaggcgcactgccgcagtacggcgagctcctggccgacaagcagaagcgcggcgccttcctgaagcgtgcggcgggcggcggggacgcgggcgacgacgacgacgcgggcggctgcggggacgcgggcgcgggcggcgcggtcaacgggcgcgggggcggcttcgcgccaggcaccgagcccttccccgggctcttcccgcgcaagcccgcgccgctgcccagccccgggctcaacagcgccgccaagcgcatcaaggtggagaaggacctggagctgccgcccgccgcgctcatcccgtccgagaacgtgtactcgcagtggctggtgggctacgcggcgtcgcggcacttcatgaaggaccccttcctgggcttcacggacgcacgacagtcgcccttcgccacgtcgtccgagcactcgtccgagaacggcagcctgcgcttctccacgccgcccggggacctgctggacggcggcctctcgggccgcagcggcacggccagcggaggcagcaccccgcacctgggcggcccgggccccgggcggcccagctccaaggagggccgccgcagcgacacgtgcgagtactgcggcaaggtgttcaagaactgcagcaacttgacggtgcaccggcggagccacaccggcgagcggccttacaagtgcgagctgtgcaactacgcgtgcgcgcagagcagcaagctcacgcgccacatgaagacgcacgggcagatcggcaaggaggtgtaccgctgcgacatctgccagatgcccttcagcgtctacagcaccctggagaaacacatgaaaaagtggcacggcgagcacttgctgactaacgacgtcaaaatcgagcaggccgagaggagctaagcgcgcgggccccggcgccccgcacctgtacagtggaaccgttgccaaccgagagaatgctgacctgacttgcctccgtgtcaccgccaccccgcaccccgcgtgtccccggggcccaggggaggcggcactccaacctaacctgtgtctgcgaagtcctatggaaacccgagggttgattaaggcagtacaaattgtggagccttttaactgtgcaataatttctgtatttattgggttttgtaatttttttggcatgtgcaggtactttttattattattttttctgtttgaattcctttaagagattttgttgggtatccatcccttctttgttttttttttaacccggtagtagcctgagcaatgactcgcaagcaatgttagaggggaagcatatcttttaaattataatttggggggaggggtggtgctgcttttttgaaatttaagctaagcatgtgtaatttcttgtgaagaagccaacactcaaatgacttttaaagttgtttactttttcattccttccttttttttgtcctgaaataaaaagtggcatgcagttttttttttaattattttttaattttttttttggtttttgtttttggggtggggggtgtggatgtacagcggataacaatctttcaagtcgtagcactttgtttcagaactggaatggagatgtagcactcatgtcgtcccgagtcaagcggccttttctgtgttgatttcggctttcatattacataagggaaaccttgagtggtggtgctgggggaggcaccccacagactcagcgccgccagagatagggtttttggagggctcctctgggaaatggcccgacagcattctgaggttgtgcatgaccagcagatactatcctgttggtgtgccctggggtgccatggctgctattcgctgtagattaggctacataaaatgggctgagggtacctttttggggagatggggtggcctgcagtgacacagaaaggaagaaactagcggtgttcttttaggcgttttctggcttgacggcttctctctttttttaaatcacccccaccacataaatctcaaatcctatgttgctacaaggggtcatccatcatttcccaagcagacgaatgccctaattaattgaagttagtgttctctcatttaatgcacactgatgatattgtagggatgggtggggtggggatcttgcaaatttctattctcttttactgaaaaagcaggggatgagttccatcagaaggtgcccagcgctacttcccaggtttttattttttttttcctatctcattaggttggaaggtactaaatattgaactgttaagattagacatttgaattctgttgacccgcactttaaagcttttgtttgcatttaaattaaatggcttctaaacaagaaattgcagcatattcttctctttggcccagaggtgggttaaactgtaagggacagctgagattgagtgtcagtattgctaagcgtggcattcacaatactggcactataaagaacaaaataaaataataatttataggacagtttttctactgccattcaatttgatgtgagtgccttgaaaactgatcttcctatttgagtctcttgagacaaatgcaaaactttttttttgaaatgaaaagactttttaaaaaagtaaaacaagaaaagtacattctttagaaactaacaaagccacatttactttaagtaaaaaaaaaaaaaattctggttgaagatagaggatatgaaatgccataagacccaatcaaatgaagaaataaacccagcacaaccttggacatccattagctgaattatcctcagccccttttgtttttgggacaacgctgcttagatatggagtggaggtgatttactgctgaattaaaactcaagtgacacaagttacaagttgatatcgttgaatgaaaagcaaaacaaaaacaattcaggaacaacggctaattttttctaaagttaaatttagtgcactctgtcttaaaaatacgtttacagtattgggtacatacaagggtaaaaaaaaaattgtgtgtatgtgtgttggagcgatctttttttttcaaagtttgcttaataggttatacaaaaatgccacagtggccgcgtgtatattgttttcttttggtgacggggttttagtatatattatatatattaaaatttcttgattactgtaaaagtggaccagtatttgtaataatcgagaatgcctgggcattttacaaaacaagaaaaaaaatacccttttcttttccttgaaaatgttgcagtaaaatttaaatggtgggtctataaatttgttcttgttacagtaactgtaaagtcggagttttagtaaatttttttctgccttgggtgttgaatttttatttcaaaaaaaatgtatagaaacttgtatttggggattcaaaggggattgctacaccatgtagaaaaagtatgtagaaaaaaagtgcttaatattgttattgctttgcagaaaaaaaaaaaatcacatttctgacctgtacttatttttctcttcccgcctccctctggaatggatatattggttggttcatatgatgtaggcacttgctgtatttttactggagctcgtaattttttaactgtaagcttgtccttttaaagggatttaatgtacctttttgttagtgaatttggaaataaaaagaaaaaaaaaacaaaaacaaacaggctgccataatatatttttttaatttggcaggataaaatattgcaaaaaaaacacatttgtatgttaagtcctattgtacaggagaaaaagggttgtttgacaacctttgagaaaaagaaacaaaaggaagtagttaaatgctttggttcacaaatcatttagttgtatatattttttgtcggaattggcctacacagagaaccgttcgtgttgggcttctctctgaacgccccgaaccttgcatcaaggctccttggtgtggccacagcagaccagatgggaaattatttgtgttgagtggaaaaaaatcagtttttgtaaagatgtcagtaacattccacatcgtcctccctttctctaagaggccatctctaagatgtcagatgtagaggagagagagcgagagaacatcttccttctctaccatcactcctgtggcggtcaccaccaccacctctcccgcccttaccagcagaaagcaatgcaaactgagctgctttagtccttgagaaattgtgaaacaaacacaaatatcataaaaggagctggtgattcagctgggtccaggtgaagtgacctgctgttgagaccggtacaaattggatttcaggaaggagactccatcacagccaggacctttcgtgccatggagagtgttggcctcttgtctttcttccctgctttgctgctttgctctctgaaacctacattccgtcagtttccgaatgcgagggcctgggatgaatttggtgcctttccatatctcgttctctctccttcccctgcgtttcctctccatccttcatcctccattggtcctttttttttctttcattttttatttaatttcttttcttcctgtctgttcctcccctaatcctctattttatttttattttttgtaaagccaagtagctttaagataaagtggtggtcttttggatgagggaataatgcatttttaaataaaataccaatatcaggaagccattttttatttcaggaaatgtaagaaaccattatttcaggttatgaaagtataaccaagcatccttttgggcaattccttaccaaatgcagaagcttttctgttcgatgcactctttcctccttgccacttacctttgcaaagttaaaaaaaaggggggagggaatgggagagaaagctgagatttcagtttcctactgcagtttcctacctgcagatccaggggctgctgttgcctttggatgccccactgaggtcctagagtgcctccagggtggtcttcctgtagtcataacagctagccagtgctcaccagcttaccagattgccaggactaagccatcccaaagcacaagcattgtgtgtctctgtgactgcagagaagagagaattttgcttctgttttgtgtttaaaaaaccaacacggaagcagatgatcccgagagagaggcctctagcatgggtgacccagccgacctcaggccggtttccgcactgccacaactttgttcaaagttgcccccaattggaacctgccacttggcattagagggtctttcatggggagagaaggagactgaattactctaagcaaaatgtgaaaagtaaggaaatcagcctttcatcccggtcctaagtaaccgtcagccgaaggtctcgtggaacacaggcaaacccgtgattttggtgctccttgtaactcagccctgcaaagcaaagtcccattgatttaagttgtttgcatttgtactggcaaggcaaaatatttttattaccttttctattacttattgtatgagcttttgttgtttacttggaggttttgtcttttactacaagtttggaactatttattattgcttggtatttgtgctctgtttaagaaacaggcacttttttttattatggataaaatgttgagatgacaggaggtcatttcaatatggcttagtaaaatatttattgttcctttattctctgtacaagattttgggcctctttttttccttaatgtcacaatgttgagttcagcatgtgtctgccatttcatttgtacgcttgttcaaaaccaagtttgttctggtttcaagttataaaaataaattggacatttaacttgatctccaaa

SEQ ID NO: 74 - DNA, 3796 bp, Homo sapiens
ctggtctggccggcgacgcgcgtgccctgtggccaaacactgcctggagtgagagcaaactaccagcgcagtggggccggcgcgagtgtgcgtgtgtgtgcgtgtgtgtgtgcgagcgcggtggaggggggggaccaactgcttcacactttcaacactgcactgaagagggagagcgagagagagactggagacgcacagatccccccaaggtctcccaagcctaccgtcccacagattattgtacagagccccaaaaatcgaaacagaggaaacgaacagcagttgaacatggacgaaggaattcctcatttgcaagagagacagttactggaacatagagattttataggactggactattcctctttgtatatgtgtaaacccaaaaggagcatgaaacgagacgacaccaaggatacctacaaattaccgcacagattaatagaaaagaaaagaagagaccgaattaatgaatgcattgctcagctgaaagatttactgcctgaacatctgaaattgacaactctgggacatctggagaaagctgtagtcttggaattaactttgaaacacttaaaagctttaaccgccttaaccgagcaacagcatcagaagataattgctttacagaatggggagcgatctctgaaatcgcccattcagtccgacttggatgcgttccactcgggatttcaaacatgcgccaaagaagtcttgcaatacctctcccggtttgagagctggacacccagggagccgcggtgtgtccagctgatcaaccacttgcacgccgtggccacccagttcttgcccaccccgcagctgttgactcaacaggtccctctgagcaaaggcaccggcgctccctcggccgccgggtccgcggccgccccctgcctggagcgcgcggggcagaagctggagcccctcgcctactgcgtgcccgtcatccagcggactcagcccagcgccgagctcgccgccgagaacgacacggacaccgacagcggctacggcggcgaagccgaggcccggccggaccgcgagaaaggcaaaggcgcgggggcgagccgcgtcaccatcaagcaggagcctcccggggaggactcgccggcgcccaagaggatgaagctggattcccgcggcggcggcagcggcggcggcccggggggcggcgcggcggcggcggcagccgcgcttctggggcccgaccctgccgccgcggccgcgctgctgagacccgacgccgccctgctcagctcgctggtggcgttcggcggaggcggaggcgcgcccttcccgcagcccgcggccgccgcggcccccttctgcctgcccttctgcttcctctcgccttctgcagctgccgcctacgtgcagcccttcctggacaagagcggcctggagaagtatctgtacccggcggcggctgccgccccgttcccgctgctataccccggcatccccgccccggcggcagccgcggcagccgccgccgccgctgccgccgccgccgccgcgttcccctgcctgtcctcggtgttgtcgccccctcccgagaaggcgggcgccgccgccgcgaccctcctgccgcacgaggtggcgccccttggggcgccgcacccccagcacccgcacggccgcacccacctgcccttcgccgggccccgcgagccggggaacccggagagctctgctcaggaagatccctcgcagccaggaaaggaagctccctgaatccttgcgtcccgaaggacggaggttcaagcagagtgagaagttaaaatacccttaaggaggttcaagcagagtgagaagttaaaatacccttaaggtctttaagggaggaagtgtaatagatgcacgacaggcataaacaagaacaacaaaacaggtgttatgtgtacattcggagttcctgttttgctcatcccgcaccaccccaccctccacacactaacatccctttcttccccccaccagctgtaaaagatcctatgcgaaagacactggctcttttttttaatcccccaaataaattttgcccccttttaggccatgttccattatctcttaaaattggaacctaattcgagaggaagtaagaagggtctgttctgtggctgagctaggtgaaccccggggtaggggaaagatgttaacacctttgacgtctttggagttgacatggaacagcaggtagttgttatgtagagctagttctcaaagctgccctgcctgttttaggaggcgttccacaaacagattgaggctcttttagaattgaatttactcttcagtattttctaatgttcagctttctaaaaggcatatatttttcaaagaagtgaggatgcagtttctcacgttgcaacctattctgaagtggtttaaatggtatctcttagtaacttgcactcgttaaagaaacacggagctgggccatcgtcagaactaagtcagggaaggagatggatgagaaggccagaatcattcctagtacatttgctaacactttattgagaaattgaccatgaattaatggactcatcttaatttcttctaagtccatatatagatagatatctatctgtacagatttctatttatccatagataggtatctatacatacacatctcaagtgcatctattcccactctcattaatccatcatgttcctaaatttttgtaatcttactgtaaaaaaaagtgcactgaacttcaaaacaaaacaaaaaacaacaacaacaaaaaacaagtccaaactgatatatcctatattctgttaaaattcaaaagtgaacgaaagcatttaactggccagttttgattgcaaatgctgtaaagatatagaatgaagtcctgtgaggccttcctatctccaagtctatgtattttctggagaccaaaccagataccagataatcacaaagaaagcttttttaataaggcttaaaccaagaccttgtctagatatttttagtttgttgccaaggtagcactgtgagaaatctcacttggatgttatgtaaggggtgagacacaacagtctgactatgagtgaggaaaatatctgggtcttttcgtcagtttggtgcatttgctgctgctgttgctactgtttgcctcaaacgctgtgtttaaacaacgttaaactcttagcctacaaggtggctcttatgtacatagttgttaatacatccaattaatgatgtctgacatgctatttttgtagggagaaaatatgtgctaatgatattttgagttaaaatatcttttggggaggatttgctgaaaagttgcacttttgttacaatgcttatgcttggtacaagcttatgctgtcttaaattattttaaaaaaataaatactgtctgtgagaaaccagctggtttagaaaagtttagtatgtgacgataaactagaaattacctttatattctagtattttcagcactccataaattctattacctaaatattgccacactattttgtgatttaaaaattcttactaaggaataaaaactttaatatacgatatgatattgtctaataattaaaaaagacataatggatgctcaattagttttaagatatctataactatagggatacaaatcactacagttctcagatttacagcttttttttgtcattggcttgatgtcacacatttccaatctcttgcaagcctccaggctctggctttgtctacctgctcgttcccaatgtatcttaatgaaaagtgcaaaagaaaaacctaccaattaaaaaaaaaaaaaaaaaa

SEQ ID NO: 75 - DNA, 3388 bp, Homo sapiens
gtttgttaccgttttaatcctattaattaaaacgttaacctgattgggtagaaagcgctgtcccaacaggcgagtcttcttcataataacctactcagagataatgatgtaaaagactcccccgtctgtggcggcggctgtttgatgggtccggaaatctcttgaaggtgaatccaagcaagataaacggtgcggagaggaggcgcggggctgggctcagagcggcggcggcggcggctccactccctccgcgcccaccctcccaccatgcggggccgcggcccatggtgagccccagcagccagcaccatcggctggagacgaagaagaagaagaagaggaggcggcgagcgcgggggaaggcgaaaaagaaaaagaaagaaggggagagggctcccggcagcaccaggaccgacgcgcgcaccagctccggagcccagctcgcgcgcgtctgtggggccgcctgactccggggccgaggcggcggcggcggcagcgggcgcggcggcccgggctgcgcgccggcgcgggaccatggagcgcgggatgcacctcggtgcagcggccgccggcgaggacgacctcttcctgcacaagagcctgagcgcctccacctccaagcgcttggaagcggctttccgctccacgcccccgggcatggacctgtccctggcgccgccgcctcgggaacgcccggcgtcctcctcctcgtcgcccctgggctgcttcgagccggctgaccccgagggggcagggctgctgttgccgccgcctggaggaggcggcggcggcagcgcgggaagtggcggcggcggcggcggcggggtgggtgtccccgggctgctagtaggttcagccggcgttgggggcgaccctagcctaagcagcctgccggccggggccgccctttgcctcaagtacggcgaaagcgcgagccggggctcggtggccgagagcagcggcggcgagcagagccccgacgacgacagcgacggtcgctgcgagctcgtgctgcgggccggagtagccgacccgcgggcctccccgggagcgggaggtggtggcgcgaaggcagccgagggctgctccaatgcccacctccacggcggcgccagcgtccccccggggggcctgggcggcggcggcggcgggggtagcagcagcggtagcagtggcggcggtggcggtagcggtagcggcagcggcggcagcagcagcagcagcagcagcagcagcaagaaatccaaagagcaaaaggcgctgcggcttaacatcaatgcccgagagcgccggcggatgcacgacctgaacgacgcgctggacgagctgcgcgcggtgatcccctacgcgcacagcccctcggtgcgaaagctctccaagatcgccacgctgctgctcgccaagaactacatcctcatgcaggcgcaggccctggaggagatgcggcgcctagtcgcctacctcaaccagggccaggccatctcggctgcctccctgcccagctcggcggctgcagcggcagcagctgctgccctgcacccggcgctcggcgcctacgagcaggcagccggctacccgttcagcgccggactgcccccggctgcctcctgcccggagaagtgcgccctgtttaacagcgtctcctccagcctctgcaaacagtgcacggagaagccttaaacacacccccgaaaaacacaagaccgacccaaaatctagaggaaagcgaaaagctgctccccaccccctttattttggtcctctcgtagttgtgaaacacttgcagagcaaacaaagcagaggcaagaactgaggagaagtatcagagacaaacgggacttttagccttgacatccccagaatctcggtctttggggtggggagggagggaggagggaggtggagttgggatggagtatggatgtcttttttttctcagaaaagtggcaactttggtggcagcctagaccgcgaggaagtggaatcttccttaaaggtgaaacataagttgagaagtagtgcttggttattaagcctggagagtgtttgaatggcaaaatactaatcctactaataattgtggatttggctagtgctgagggggagaggaggggttaggggttgggtagcatgagagatggaatattcattcagacaaatcagaaagggcacttgaaaataaattttgattctgagccaggagaaaaacttgaaatgttgacttaagtgagggggaaataaaacccagagagagagagagagcgagagagagagacatgttactatgaaagacttgtattttttattgtctctgaactttaatcctgtgaaaatgctcaaagttttggcgagagtgatataaaaaaactgactgtggctgaaagaattgcatttaaaaatatttatgtgcaccttgttactttctactctgcaatgatgtattaacaattcatggtatttatttgttattcttcaatgacccttccacatcaacagtatttatcatgtgttaaagtcatgggtcttatgtgcagatttttttaatgcctctaaaattgttttatagattacttatgctgtgtgccaagtgtttaaaggtttatttgccaacaagtatgaagagaaatattgatgtatctgagctgcttaggtttatgaaaggtcacctggatattttcagttgcatcatccctgtatttaaattgagctttaataaattgcttcagtccaaaaattacaggaaaggtgtattcttaattgatgaatgaattgatctcttttttgaaaggggactcctttacattccaaaagggaaaaacatcacagcaatagttgctatacgtaagaacatgctaagcaaatatttttccaggctgtgctgtgcatttttaaaaggtctaatttaattgcttttaatatatatgtacatatatgttattttaactgtggagaattatttaagttaaaagactggtttgatttgcctatggtgtgaaatcctttgttatttttctaaaaaaataaaatttaaaaagaaagaaaactaaggaagaacaagaagctatttacccaaagtgagctttcagttttagttttgcatggctgtttgactgcctttccgccctatgaaaatcaagaaaatcttttttaaaaatggagtcctgctattttccactccttgcagataatacaaattcagtttgtcaggttggatggtgagttgggagctgtgatggatctgttggcgggttttggatgtgtaaagaatgatatatatattaaataggtcaatcagactatgacagctatgtacgaccatttgtatgtgtatctatgtcagaaagaatctttattaaaatattttgatcaaacaaaaaaaaaaaaaaaa

SEQ ID NO: 76 - DNA, 5158 bp, Homo sapiens
gggagacggtgcgggcggccgggagcgcagccctccgggaggcgggtcatggcctgggcgccgcccggggagcggctgcgcgaggatgcgcggtgcccggtgtgcctggatttcctgcaggagccggtcagcgtggactgcggccacagcttctgcctcaggtgcatctccgagttctgcgagaagtcggacggcgcgcagggcggcgtctacgcctgtccgcagtgccggggccccttccggccctcgggctttcgccccaaccggcagctggcgggcctggtggagagcgtgcggcggctggggttgggcgcggggcccggggcgcggcgatgcgcgcggcacggcgaggacctgagccgcttctgcgaggaggacgaggcggcgctgtgctgggtgtgcgacgccggccccgagcacaggacgcaccgcacggcgccgctgcaggaggccgccggcagctaccaggtaaagctccagatggctctggaacttatgaggaaagagttggaggacgccttgactcaggaggccaacgtggggaaaaagactgtcatttggaaggagaaagtggaaatgcagaggcagcgcttcagattggagtttgagaagcatcgtggctttctggcccaggaggagcaacggcagctgaggcggctggaggcggaggagcgagcgacgctgcagagactgcgggagagcaagagccggctggtccagcagagcaaggccctgaaggagctggcggatgagctgcaggagaggtgccagcgcccggccctgggtctgctggagggtgtgagaggagtcctgagcagaagtaaggctgtcacaaggctggaagcagagaacatccccatggaactgaagacagcatgctgcatccctgggaggagggagctcttaaggaagttccaagtggatgtaaagctggatcccgccacggcgcacccgagtctgctcttgaccgccgacctgcgcagtgtgcaggatggagaaccatggagggatgtccccaacaaccctgagcgatttgacacatggccctgcatcctgggtttgcagagcttctcatcagggaggcattactgggaggttctggtgggagaaggagcagagtggggtttaggggtctgtcaagacacactgccaagaaagggggaaaccacgccatctcctgagaatggggtctgggccctgtggctgctgaaagggaatgagtacatggtccttgcctccccatcagtgcctcttctccaactggaaagtcctcgctgcattgggattttcttggactatgaagccggtgaaatttcattctacaatgtcacagatggatcttatatctacacattcaaccaactcttctctggtcttcttcggccttactttttcatctgtgatgcaactcctcttatcttgccacccacaacaatagcagggtcaggaaattgggcatccagggatcatttagatcctgcttctgatgtaagagatgatcatctctaaaattctgttcccaagatgcagtcctagcgtagcgaacgttcctggagtggggtgaaggatatcaatatactaagttttaacagataccccatttaggtcagcacttgattcgttgttgctgtgaaatatgtccatgggacaaaagagggaatatgaaatatttgcatatgggaagattatagagcataataattttgtaaatggagcaatctcaacctctatttctagatcacattttcttgatgtcttccttcaaattaatgaccttggattacataaggatttctatgcattcattataatttgttattcctttcaatatccttgtatttcaaatcttccatataagaattagacatggcaattcttaaattgattcagaatggtctgatactattccagtatcacctccttaattctgtttctcctcgttttcctgattttccttctcattctctccttccccgctctgtctctctctccctgtcactctctctctcttgttccttattttttgtttcttacctcttactgtttaacctgttgcttccttctggattaatacatttagagccattcctttatatggtcacatttcctatgactttactcaattacttttaaaatcctttctattctgagactaatttttaagaattacaaagctcattcttctgaatctaatatcactaactcctagactttttccgttttctttggatacactttaagtaggaatttatcagaattttcattcaactcgttctttaatgcagatatttactagttataagaccttaaggctgggtgcagtggctcacgcctgtaatcccagcactttgggaggctgaggcgggtggatcacaagctcaggagttcaagaccagcctggccaacatggtgaaaccctgtctctactaaaaaaaaaaaaaaaatagaaaaattagctgggcatggtggcaggagcctgtaatcccagctattctggaggtggagacaggagaattgcttgaaccctggaggcggaggttgcagtgagccaatatctcaccactgtactccagcccagtgcgagactccatctcaaaaaagaaaaaagacctcaaacaacacttctctctctcttttagctgcttgttatggttcctatacatggaacaattatactggcctcactgtgttatggtaaatatttaaggtcatatttgatattgctggtttgaattcagcttttccatttaaatacattataatgatgatgatgaaatcatgataatatttaacttatttttaaagtatattctgtacctttccaacaaaaaggttaaaagtcattgaaggctaaccttactgccttctttgtatcactgtcttctaaataattattatgtctgggtacagtggctcacgcctgtaatcccagcactttgggaggccgaggtgggcagatcacgaggtcaggagattgagaccatcctggctaacacagtgaaaccccgtctctactaaaaatacaaaaagaaattagctgggcgtggtggtgggtgcctgttgtcccagctacttgggaggctgaggcaggagaatggcatgaacccaggaggcagagcttgtagtgagccgagatcgcgccactgcactccagccggggcaacagagcaagactccatctcaaaaataaataaataaataaataaataaataaataaataaataaatattacacaaatgctaaaatgtttaaatggtaaatgcttcaatgctaaccaaatattaattaatggcaaattatttaacattatctgataataatctgcagaaggtttaattttcctcctcaatttgaagttcaagatgtttttctcttccagggagattttttcgactgacatctttaacttaccttccaatcatattactaacgtagccttcttcctagattttttaattgtttgatcatgagcgaacacttctactctctgtgatagatttgcaaacagaggaaataacgcatcctcgtgtccctcttcttggtgttccacaggccatgtgtgccctagccctcgttcatgcaaggtctgtgtagggaaggtggacttcagctcagcaacagcatcccttcccacagggatcaggtgggtggcttgagataccccttccatggggcaccacccattcagtgagacggggaagccctgggtgggagggagaacacctccacatgtcttctactctctccataggatggaatgagtgtcccagtcccaggagtatccatttcccactgtgtagcccagtactctggtctcactgtctctgctgaatcctgtctcactgtgcatattattgtggtttatatcagtcagtaaaccaatgtgagtcttcatctcttgcattcttaggttcatagttttgtgtgtctcctgtaatgactcttctctttccctttccaactcctgaaagattgccactatttcctctggaactttgtttcgttaccagcaaaatcctcgacatccatacccgtttcctggctttccctctcctttcctctgaatggtagtcttttatattcagctgtccacttgacatcaaaatagacattttgaactcaatttgcctaaaacttacccacaaatttctccccaagtctctccctaactgcaacaacaaaaaccacaggcttctccctgtcactggatggcaactccattcttttgattgcttaagccaggcatccgattgagtactttcttgatttctccagcccacatccagtccatcggcaagccctgttggtcctaccttcagaatatgtccggggttcagttgtcctggccaccctgctgctgtaaccatggtcagaactccatcctgcccctctggattatgactttcgtttcctcacagtggtcctgcttgggctctaggcccttccactcccattctctctacagcagctgggctgattcctttagcacccaaggatatgttggcatcacagtgacttagataccatcacaaagacctcccattcaacttagagtgaaagtcagaatcctcacagtgaatccccaggccctagaggatgtgaacccccaggccctagaggatctgaacccccatccctcctctgattatctctcccacccccacttccctttgcattctgctccagctgccctggcctcatggctgggtttccaccaaagcaggcacttcccatcacagggccatttccccgcctgtggcttctgcttgacattcccttttccctgatatccccttgactcattattccctttcttccttaactcttctgagatccagcttctcagtgataccacacagccctactccccccagagcccatctagagctcacctttccagtcgcccttgccaggctcagtggaggctctttgttccccatacagtacgtgtcgtcgtactatattgttaggcttatttaatttatgtatgttttgcctttttgtgctaaatgtaaacaccacaaggggaggtatctttgtctgttgacaatgatacattcaatgtttctcaagcacccccaatgctggtttgtatgtggttatcattcaatctgtatttgttgaatgaataaatgattgactatgtggagagcaaaa

SEQ ID NO: 77 - DNA, 2344 bp, Homo sapiens
agttttacttccgtttgtttaacagctggcccggaagtttaagtgaatatgcggcttgggctccaaaagttgctgtacggtattttattttaaagtagaaatctgtccgcttttcacttacggaggccttacagtgtgtgttctgtgttacttgagtttatacgcactgcagaatttgtttaccctgctcttttggaaacgtattccggaagcgaaaccctgagtaatcggaagtggttaggagtgagagagctgctggatatgcggagggactgggcgggtcggcttccgaatggaagaggtctgtgagaagttaacctggtgataccgatccgaagagcctatcaagtgaagccccctgaaatacggagaataagaatcttagaggttgttcagcagaagtcttggagtgcattttcagtggttaaggtgaaaaaatgactactaaaaatttagaaaccaaagtcaccgttacttcatccccaatccgaggagcaggagatggaatggaaactgaggaaccacctaaatctgttgaagttacctccggagtccaatctagaaagcatcatagtcttcagagtccatggaagaaagcagttccatcagagagcccaggagttcttcagctagggaaaatgctcactgaaaaagcaatggaagttaaagctgtaagaatattagttcccaaagctgctataactcatgatatccccaacaaaaatacaaaggttaagtctctgggacatcataaaggagaattccttggtcagtcagagggagttatagaacctaataaggaactctcagaggtaaagaatgtattggaaaagctcaagaattctgaaagaaggttactacaggacaaagaaggtctttcaaaccagctccgtgtacagacagaggtaaatcgtgagttaaaaaagttactggtggcttctgttggggatgatcttcagtatcactttgaacgtctagcccgtgagaaaaatcagcttattttagaaaatgaagccctaggtcgaaacacagctcagctttctgaacagttagaacgtatgtcaatacagtgtgatgtatggcgaagtaaattccttgcaagcagggtaatggcagatgagttaaccaactcaagagcagctttacagcgtcaaaaccgtgatgcacacggggctatacaagatctcctaagtgaacgggaacagtttcgtcaagaaatgatagctacccagaaattattggaggagctcttagtttccttgcaatggggaagagagcaaacttactcccctagtgtacaaccccacagcacagcagagctagcattaacaaatcacaagttggcaaaagcagtaaattctcatcttctgggaaatgttggcattaacaatcaaaaaaagattccatcaacagttgaattctgcagcaccccagctgagaaaatggctgaaacggttctaagaattttagatccagttacctgcaaagagagttcacctgataatccattttttgagtcttcaccaaccaccttacttgctacaaagaaaaatattggacgatttcatccctatactagatatgaaaatataactttcaattgctgcaatcactgccggggagaactgattgccctttaacagtcaatatgttggaggcatgctaagaataaacaactaaataactgtattagaaaaaaaagaaacttactaaatatcataatctgatgatatgtggtcctgaattggctactagtttaagcaaataaactgtaagtcatttatgggttagttggggaataaatggatatgggctggatattcggtaatatcattaatgaaaagcagattgcagaaatacagtatgatctcagtattttgaaattgtaaatacatgtacagacaaatacttagacagtatgcatactggtgttaacagtcacaatttctgggtgatgaaaatgtaacttgaaaccgctccatttctacaatgcacatttactgtttctgttataataaaagggtatgttagaaaaacaaaaaggaggctgggcatggtggctcatgcctctaatctcagcactttgggaggccaaggtgggcggatcacttgaggtctggagtttgagaccagcctgagcaacatggtgagaccccatctctacaaaaaaaatataaaaattagccaggtgtggtggtgcacacctgtggtcccagctacttgggaggctgaggtgggaaaatcacttgaacctgggagggtgaggttgcagtgagctgagatcatgccactgcactccagcctgggtgacaggaaaaaaaaaaaaaaaaaaaaaaaaaaaaaa

SEQ ID NO: 78 - DNA, 3568 bp, Homo sapiens
gagccattttggagccggtgtcagtttccactctgccttcagcggtgcatttttttccaccctcccctccccctcctcccctccccccgctcgcacgcacacacacggcgccccccgcccgcccgcctcccccacagcaactatgaaataatcgtagtatgagaggcagagatcggggcgagacaatggggatgtgggcgcgggagccccgttccggcttagcagcacctcccagccccgcagaataaaaccgatcgcgccccctccgcgcgcgccctcccccgagtgcggagcgggaggaggcggcggcggccgaggaggaggaggaggaggccccggaggaggaggcgttggaggtcgaggcggaggcggaggaggaggaggccgaggcgccggaggaggccgaggcgccggagcaggaggaggccggccggaggcggcatgagacgagcgtggcggccgcggctgctcggggccgcgctggttgcccattgacagcggcgtctgcagctcgcttcaagatggccgcttggctcgcattcattttctgctgaacgacttttaactttcattgtcttttccgcccgcttcgatcgcctcgcgccggctgctctttccgggattttttatcaagcagaaatgcatcgaacaacgagaatcaagatcactgagctaaatccccacctgatgtgtgtgctttgtggagggtacttcattgatgccacaaccataatagaatgtctacattccttctgtaaaacgtgtattgttcgttacctggagaccagcaagtattgtcctatttgtgatgtccaagttcacaagaccagaccactactgaatataaggtcagataaaactctccaagatattgtatacaaattagttccagggcttttcaaaaatgaaatgaagagaagaagggatttttatgcagctcatccttctgctgatgctgccaatggctctaatgaagatagaggagaggttgcagatgaagataagagaattataactgatgatgagataataagcttatccattgaattctttgaccagaacagattggatcggaaagtaaacaaagacaaagagaaatctaaggaggaggtgaatgataaaagatacttacgatgcccagcagcaatgactgtgatgcacttaagaaagtttctcagaagtaaaatggacatacctaatactttccagattgatgtcatgtatgaggaggaacctttaaaggattattatacactaatggatattgcctacatttatacctggagaaggaatggtccacttccattgaaatacagagttcgacctacttgtaaaagaatgaagatcagtcaccagagagatggactgacaaatgctggagaactggaaagtgactctgggagtgacaaggccaacagcccagcaggaggtattccctccacctcttcttgtttgcctagccccagtactccagtgcagtctcctcatccacagtttcctcacatttccagtactatgaatggaaccagcaacagccccagcggtaaccaccaatcttcttttgccaatagacctcgaaaatcatcagtaaatgggtcatcagcaacttcttctggttgatacctgagactgttaaggaaaaaaattttaaacccctgatttatatagatatcttcatgccattacagctttctagatgctaatacatgtgactatcgtccaatttgctttcttttgtagtgacattaaatttggctataaaagatggactacatgtgatactcctatggacgttaattgaaaagaaagattgttgttataaagaattggtttcttggaaagcaggcaagactttttctctgtgttaggaaagatgggaaatggtttctgtaaccattgtttggatttggaagtactctgcagtggacataagcattgggccatagtttgttaatctcaactaacgcctacattacattctccttgatcgttcttgttattacgctgttttgtgaacctgtagaaaacaagtgctttttatcttgaaattcaaccaacggaaagaatatgcatagaataatgcattctatgtagccatgtcactgtgaataacgatttcttgcatatttagccattttgattcctgtttgatttatacttctctgttgctacgcaaaaccgatcaaagaaaagtgaacttcagttttacaatctgtatgcctaaaagcgggtactaccgtttattttactgacttgtttaaatgattcgcttttgtaagaatcagatggcattatgcttgttgtacaatgccatattggtatatgacataacaggaaacagtattgtatgatatatttataaatgctataaagaaatattgtgtttcatgcattcagaaatgattgttaaaattctcccaactggttcgacctttgcagatacccataacctatgttgagccttgcttaccagcaaagaatatttttaatgtggatatctaattctaaagtctgttccattagaagcaattggcacatctttctatactttatatacttttctccagtaatacatgtttactttaaagattgttgcagtgaagaaaaacctttaactgagaaatatggaaaccgtcttaattttccattggctatgatggaattaatattgtattttaaaaatgcatattgatcactataattctaaaacaattttttaaataaaccagcaggttgctaaaagaaggcattttatctaaagttattttaataggtggtatagcagtaattttaaatttaagagttgcttttacagttaacaatggaatatgccttctctgctatgtctgaaaatagaagctatttattatgagcttctacaggtatttttaaatagagcaagcatgttgaatttaaaatatgaataaccccacccaacaattttcagtttattttttgctttggtcgaacttggtgtgtgttcatcacccatcagttatttgtgagggtgtttattctatatgaatattgtttcatgtttgtatgggaaaattgtagctaaacatttcattgtccccagtctgcaaaagaagcacaattctattgctttgtcttgcttatagtcattaaatcattacttttacatatattgctgttacttctgctttctttaaaaatatagtaaaggatgttttatgaagtcacaagatacatatatttttattttgacctaaatttgtacagtcccattgtaagtgttgtttctaattatagatgtaaaatgaaatttcatttgtaattggaaaaaatccaataaaaaggatattcatttagaaaatagctaagatctttaataaaaatttgatatgaaaagcacaatgtgcagaagttatggaaaacctatagaggattacaacaggtaaacgttaaagagaatacattgctgacttatagtgatgtggctaagaagtacatgctttgttgtaaaattgcttgaaagcccattgaaagatgtatctgtttatttacagtctttgaagtaaaagttaccaatgtttgccaataaaaa

SEQ ID NO: 79 - DNA, 4627 bp, Homo sapiens
gcggcgggggcggccatcgtgctgcgcagcctgggcgcttggggagccgcccacttcgccgggtcgcgccccgacggccggagcgtggatgcggcggcgcccgccgagccggggcggacgcggggcggcccgggcccgggagacgcgccggcagccccggcaccgcagcggtcgcaggatggccgaggctatcagctgtactctgaactgtagttgccaaagtttcaaacccgggaaaataaaccaccgtcagtgtgaccaatgcaagcatggatgggtggcccacgctctaagtaagctaaggatcccccccatgtatccaacaagccaggtggagattgtccagtccaatgtagtgtttgatattagcagcctcatgctctatgggacccaggccatccccgttcgcctaaaaatcctactggaccggctcttcagtgtgttgaagcaagatgaggttctccagatcctccatgccttggactggacacttcaggattatatccgtggatacgtactgcaggatgcatcaggaaaggtgttggatcactggagcatcatgaccagtgaggaagaagtggccaccttgcagcagttccttcgttttggagagaccaaatctatagttgaactcatggcaattcaagagaaagaagagcaatccatcatcataccaccttccacagcaaatgtagatatcagggctttcatcgagagctgcagtcacaggagttctagcctccccactcctgtggacaaaggaaaccccagcagtatacacccctttgagaacctcataagcaacatgactttcatgctgcctttccagttcttcaaccctctgcctcctgcactgatagggtcattgcccgaacaatatatgttggagcagggtcatgaccaaagtcaggaccccaaacaggaagtccatgggcccttccctgacagcagcttcttaacttccagttccacaccatttcaggttgaaaaagatcagtgtttaaactgtccggatgctattactaaaaaagaagacagcacccatttaagtgactccagctcatacaacattgtcactaagtttgaaaggacacagttatcccctgaggccaaagtgaagcctgagaggaatagccttggtacaaagaagggccgggtgttctgcactgcatgtgagaagaccttctatgacaaaggcaccctcaaaatccactacaatgccgtccacttgaagatcaagcataagtgcaccatcgaagggtgtaacatggtgttcagctccctaaggagccggaatcgccatagcgccaaccccaaccctcggctgcacatgccaatgaacagaaataaccgggacaaagacctcaggaacagcctgaacctggccagctctgagaactacaagtgcccaggtttcacagtgacgtccccagactgtaggcctcctcccagctaccctggttcaggagaggattccaaaggccaaccagccttcccaaacattgggcaaaatggtgtgctttttcccaacctaaagacagtccagccagtccttcctttctaccgcagtccagccacgcctgccgaggtagcaaacacgcctgggatactcccttccctcccgctgttgtcctcttcaatcccagaacagctcatttcaaacgaaatgccatttgatgcccttcccaagaagaaatccaggaagtccagtatgcctatcaaaatagagaaagaagctgtggaaatagctaatgagaaaagacacaacctcagctcagatgaagacatgcccctacaggtggtcagtgaagatgagcaggaggcctgcagtcctcagtcacacagagtatctgaggagcagcatgtacagtcaggaggcttagggaagcctttccctgaaggggagaggccctgccatcgtgaatcagtaattgagtccagtggagccatcagccaaacccctgagcaggccacacacaattcagagagggagactgagcagacaccagcattgatcatggtgccaagggaggtcgaggatggtggccatgaacactacttcacacctgggatggaaccccaagttcctttttctgactacatggaactgcagcagcgcctgctggctgggggactcttcagtgctttgtccaacaggggaatggcttttccttgtcttgaagattctaaagaactggagcacgtgggtcagcatgcattagcaaggcagatagaagaaaatcgcttccagtgtgacatctgcaagaagacctttaaaaatgcttgtagtgtgaaaattcatcacaagaatatgcatgtcaaagaaatgcacacatgcacagtggagggctgtaatgctacctttccctcccgcaggagcagagacagacacagctcaaacctaaacctccaccaaaaagcattgagccaggaagcattggagagtagtgaagatcatttccgtgcagcttaccttctgaaagatgtggctaaggaagcctatcaggatgtggcttttacacagcaagcctcccagacatctgtcatcttcaaaggaacaagtcgaatgggcagtctggtttacccaataacgcaagtccacagtgccagcctggagagctacaactctggccccttgagcgagggcaccatcctggatttgagcactacctcgagcatgaagtcagagagtagcagccattcttcctgggactctgacggggtgagtgaggaaggcactgtgcttatggaggacagtgatgggaactgtgaagggtcgagccttgtccctggggaagatgagtaccccatctgtgtcctgatggagaaggctgaccagagccttgctagcctgccttctgggttgcccataacctgtcatctctgccaaaagacatacagtaacaaagggacctttagggcccactacaaaactgtgcacctccggcagctccacaaatgcaaagtaccaggctgcaacaccatgttttcgtctgttcgcagtcgaaacagacacagccagaatcccaacctgcacaaaagcctggcctcatctccaagtcacctccagtaacaagatggcaaaccaagtatgctcagataagcttttttcataattcaggaataaagtagtccatagaaatgtttctgtttcatatcatttggggcgagtcaggcaaaagtatttgatttgactttatagttttccacagcacaatgagcaaaagacaaacctcgtgggaagatgacactggggcagcccttcctattatttttcttagcccaagaggtctttcactgatacaaggaaaacttgcagaaatgtgatttttcccagatttgtttacatgttccctgggacagatccaggtctgcagatcgacaccagtgggcccaggacctgggggtggctttaaatgaggcttgcagtgttaaaggtcttggataagaagggtcctggggaagaagactctgtggacaagataccagtccccaaaacagcattttcagttccttcttcaattagtttgaaatccagacctgagtttggaagactgattttttgagaccatccctgtgtttggagtggataattgtccctcccctcagccctgcaccagaggtctcatatgttaccccagggagttctcagaggattgggttggcctctaacatgttccttgttaattcttgttctgtaacatgcattcaagaagctaggggaaaaatatctcatgcacttaaataatggtcttcaatttaatttaaaaatattttgacaatatttaatttgtgcttatgtggtgtttggtgtgagtgcagatattgcactgtgtcacctctggatctctgctcagaagcagaacaagtgatgacctaaatgtcaaaatcactgctcgttttcatttggtgaacttcaaactctgttctttttggtcacctgtggaatgaatgcaagcatgattttggcaggaacatttgtacatattctgccgtagataatgtggttctgatggttgttgtgtattttcagtatcactggatccctcagtcttcaccgttttataaacgtataagattaggatgaacttttgaatttacttggtaggaaaaaaagtaggacattattgccatattgtatgtcttaatatttaacttattcggaaatatattccacactgttacatacattttccatggtagaaaggaagttcagtcagtcctgtggaatgaaaccatctcctaaaattcagcatttgcagcattctaaaagcctgtgtaggtacaaggacattgattttgtattcagaattcaagttaactatcttttaaattcgtggttgatgtaagtaataaaaaacattcttaaagttgagggttataagagagattatttctgtggtctaaaggttaaaaagccaacaacctgttaccaattatttcagctttttttgttttaataagtgtgacaacttaaaacttgtttctatttaaagtgaaatgtatctttcaactgtttagttacccagctgtttaatattccagtcttcccaaagtgaaaagatttgtatacaaatgttttctatgatttaataaaaatatatggcacaccaaaaaaaaaaaaaaa

SEQ ID NO: 80 - DNA, 4617 bp, Homo sapiens
atccgataggaccaggtagccactgagcatgcctgtctggtgggcatagcctctgtgcctggtggggtccagccctgtatgtggacttcctgggggaccgcctgcatgctgggaaagtcctgcaactgtgggctctgggccggacccctcctccttggggagcgttgctgtggtctccgcagcctgttggtgtggtccgagaggggactggtgtgtggtggtagggacgcaggtgctcaggagggctcctcaggctgcctctctgcctgttactgctgctccctccctggtcctggggactcgctcaggcctggatgtgtggttttggacaccttggaaagaggttagctgtgagttttgctttgattgggctttgagctgctgagctagatctgtccaagcatgcttttgtggttttctcgagtctttggtcaccctgcgtagaattacctttacttttgccttcattttaggtaatcattaccaaatgaggaggaaaggacgatgtcatcgaggctctgcagcgaggcatccttcttccccatgcagtgttaaacactcccctacgcgagaaacgctgacctacgctcaagctcaaaggatggtagagatagaaattgaagggcgcttgcacaggatcagtatttttgatcccctggagatcatattggaagatgacctcactgctcaagagatgagtgagtgcaacagcaacaaggaaaacagcgagcggcctcctgtctgcttaagaactaagcgtcacaaaaacaacagagtcaaaaagaaaaacgaggccctccccagcgcccacggcacgccggcctcggccagtgccctcccggagcccaaggtgcgcatcgtggagtacagccctccgtccgcccccaggaggcctcctgtgtactacaagttcatcgagaagtcggccgaggaactggacaacgaggtggagtatgacatggacgaggaggactatgcctggctggagatcgtcaatgagaagcgcaagggcgactgcgtccccgccgtgtcgcagagcatgtttgagttcctgatggaccgcttcgagaaggagtcgcactgcgagaaccagaagcagggcgagcagcagtctctgatcgacgaggacgccgtgtgctgcatctgcatggacggggagtgtcagaacagcaacgtgatcctcttctgcgacatgtgcaacctggccgtgcaccaggagtgctacggggtgccctacatccccgagggccagtggctctgccgccactgcctgcagtcgcgggcccggcccgccgactgtgtgctgtgccccaacaagggtggtgccttcaaaaagacagatgacgaccgctggggtcacgtggtgtgtgccctgtggatcccagaggtcggctttgccaacacggtgttcatcgagcccatcgatggggtgaggaacatccctccagcccggtggaaactgacatgctacctctgtaagcagaagggcgtgggtgcctgcatccagtgccacaaagcaaactgctacacagcattccatgtgacgtgtgcccagaaggctggcctgtacatgaaaatggagcccgtgaaggaactgactggcggtggcaccaccttctccgtcagaaagaccgcttactgtgatgtccacacgcctccaggctgcacccggaggcctctgaatatttacggggatgtcgaaatgaaaaatggcgtctgtcgaaaagagagctcggttaaaacggtcaggtccacatccaaggtcaggaagaaggcaaaaaaggctaagaaagctctggctgagccctgcgcggtcctgccgaccgtgtgcgctccttatattcccccgcagaggttaaataggattgcgaatcaggtggccattcagcggaagaagcagtttgtggagcgagcccacagctactggctgctcaagcggctgtccaggaacggggcccccctgctgcggcggctgcagtccagcctgcagtctcagcgaagctcacagcagagagaaaatgatgaggagatgaaggctgccaaagagaagctgaagtactggcagcggctgcggcacgacctggagcgcgctcgcctgctgatcgagctgctgcgcaagcgggagaagctcaagcgtgagcaggtgaaggtggagcaggtcgccatggagctgcggctgaccccgctgacggtgctgctgcgctcagtgctggaccagctgcaagacaaggaccccgccaggatatttgcgcagcccgtgagtctgaaggaggtaccagattatttggatcacattaaacatcccatggactttgccacaatgaggaaacggttagaagctcaagggtataaaaacctccatgagtttgaggaggattttgatctcattatagataactgcatgaagtacaatgccagggacaccgtgttctatagagccgcggtgaggctgcgcgatcagggaggtgttgttctgaggcaggcccggcgcgaggtggacagcatcggcttggaagaggcctcggggatgcacctgcctgagcggcctgctgcggcaccgcggcggcctttctcctgggaagacgtggacaggttgctggaccccgccaacagagcccacctgggcctggaggagcagctgagagagctgctggacatgctcgacctcacctgcgctatgaagtccagcggctcccggagcaagcgggcaaagctgctcaaaaaggaaattgcccttctccgaaacaagctgagccagcagcacagccagcccctgcccacggggccaggcttggaaggcttcgaagaggacggagctgcgctggggccggaggcgggcgaggaagtccttccgaggttggagactcttctgcagccaaggaaaaggtcgcggagcacatgcggagactccgaggtggaggaggagtccccaggaaagcgcctggacgcaggtctcaccaacggctttgggggtgcgaggagcgagcaggagccgggcggcggcctggggaggaaggccacaccccgacgacgctgtgcctccgagtccagcatctcctccagcaacagcccgctctgcgactcgagctttaatgcgcccaaatgtgggcggggcaaaccggctcttgtgcgacggcacacgctggaggaccgcagtgagctgatctcctgcatcgagaatgggaactacgccaaggcggccaggatcgcagccgaagtcggccagagcagcatgtggatctccactgatgccgccgcctcggtgctggagcctctgaaggtggtgtgggccaagtgcagcggctacccctcctacccggcactgatcatcgaccccaagatgccccgtgtgcctggccaccacaacggcgtcaccatcccggccccacccctggacgtgctgaagattggggagcacatgcagaccaagtctgatgagaagctgttcctcgttctcttttttgataataagagaagttggcagtggcttcctaagtccaaaatggttccccttggtattgacgaaactatagacaagttaaagatgatggaagggaggaattccagcatccggaaggccgtgcggatcgcttttgaccgcgccatgaaccacctgagccgcgtccacggggagccgaccagcgacctcagtgacattgactgacggcccggccgccagcgcgggtcttgtccatagtgttgataagctgtacatgtttgtatattgttcaaaacttaacttattctgatttttagttatagctctttaattctttttccccggggaggggggaggttttatttccaagttttctaggaacccatctccgtctgggcgctgtgagtggggtgggcacgtccgggcagcccagtgcgtctgtcgcacgtccccaggccgtgctgctggcgtcactttctttgatatgtagctttttcttaaagacttttgaatgtttaataattttgtaaatcatgctctttacacagagtaccacttatttaataagacgggatgtaaatttacaatgacaaatgtgtattttaagaaagaaaatgacattattttgaatggtactttgtggaaagaggggagaataaagttatgctgtgtacatcacttgcagatcaccaaaaacactccgctgcccgtgaccgccggtgggtgtgtccccgctcccgtcgtcccgcccacctcaaaccccgcaggtgtgcctcccagcggattatttattgtagaaagtgtattcatttgctttataatgaaaaatacatttgcaaaggtatattgatatgcatttttatacaggcacataaaaattcaacttggcttgggagcagaatgcattgcattgtataaatgactctggcctgtgtgtactttgattttataacttgtaatcttttgtttacaatgaggggctttctgtaacttgttttaatttagaacactttggtagcaatagaaactttggatacatttttgtatggtacctgtgatgtatatagaattagtactttatttttatttttaagaggtaaagcattatgttggggaaagtagggtgggtttccaaatttgcattttttatattaaaaataaagtcaagaaaaaaaaaa

SEQ ID NO: 81 - DNA, 4907 bp, Homo sapiens
ggactgcgggataggaagctggggatatggacaagcagcagcgttatagcgctctgggtttcgggacataggcctgggccatgcggcccccttggccccttggcgcgacccccaggaacgttcggaaagctggtcctcgtggctgggggaaaggcggggggtgggggggaagcgggcacgtgaccccggtcagccaatctgggtgctgctgacgtggccgcgcggccccgatgctctccccacccccccagcccgttcgggaagggaggggctgggggctacgccccctcccccagcacggcttcgttttctgggggggggttgacaccccggattacataccccgtaccaagccgagggcaactttggaggccccctggaaggctttaggatccagattcttcgctgctgctgccttaccgccgagaaccaccacccgccaggcgtcttgcggccacacccctggcgggttcaggcaggctacgcccacgcgacccctcccgtttccctgctttggccaatggaggagctacgaatggcacgacctgctcgagcttggcagtctccagttgggctgtgcatggaagcttgggaagactttgttggaaggggaggcggggagagagtgctggaggctctggggcgatggcttccgcacctcttccaaccaccctctttccctggagtcggcggaccacagctcagccaattggcttggagatgtggcgggttgccacttccctgtgggtctctgcggcactcttctgcctggtgactgacaccttggaaatgaagtttatgacgtcatcgttgcggctggccaatagaaaaagctcccgcggagaggtgttccttccccttcgactcagcttcttcacccgcgtgagcgagcgcgcgcgcgcggagggggtggggaaaagctcaagcagggtggcgcgcatgagcggcgaagctcctcctccccgcctatatataaagggctggcgcggggctcggcggcgccatttcgtgctggagtggagcagcctctagaacgagctggaggattctgcctaccgatacagagccttcgagtcgtccggggccgccattacaatccacctccatccgcttggaaatggccttcgtcccggcctatgactggtcccagcgggcagtacagaccccctagaagcccctggagctcccctttttcgggccccgcccaatcctcggagtctgtccaccccctctactccgccctcaagaggatttcaaagatggaggcggcggctccctaaaccacttttcgtgttcatccgcctccatccgagatcgaaacgggacctcgtcggccccgtaggggcccgacaagaagagggaatccctgcagaccaacagcgggctatattgacgacggtgtctgagatcggggaccgtcttttgaagagtcagtccctccttagttgcccgcctcagctgaggccgccgccattttcttgctgtccgccgtctgcagagcgcgccaagctgcccggagctctccgagaggccccaaagagactgctttcgtgccggccaggcagggggtttgtcgcctggaggcccaagaggaacggcctccccccaacttagcgggttatgctggaccgggcggtgaggggaaccgaggccacccggactttccgcggctgagggcagcgccggttccttgcggtcaagatgctgcaaaacgtgactccccacaataagctccctggggaagggaatgcagggttgctggggctgggcccagaagcagcagcaccagggaagaggattcgaaaaccctctctcttgtatgagggctttgagagccccacaatggcttcggtgcctgctttgcaacttacccctgccaacccaccacccccggaggtgtccaatcccaaaaagccaggacgagttaccaaccagctgcaatacctacacaaggtagtgatgaaggctctgtggaaacatcagttcgcatggccattccggcagcctgtggatgctgtcaaactgggtctaccggattatcacaaaattataaaacagcctatggacatgggtactattaagaggagacttgaaaacaattattattgggctgcttcagagtgtatgcaagattttaataccatgttcaccaactgttacatttacaacaagcccactgatgatattgtcctaatggcacaaacgctggaaaagatattcctacagaaggttgcatcaatgccacaagaagaacaagagctggtagtgaccatccctaagaacagccacaagaagggggccaagttggcagcgctccagggcagtgttaccagtgcccatcaggtgcctgccgtctcttctgtgtcacacacagccctgtatactcctccacctgagatacctaccactgtcctcaacattccccacccatcagtcatttcctctccacttctcaagtccttgcactctgctggacccccgctccttgctgttactgcagctcctccagcccagccccttgccaagaaaaaaggcgtaaagcggaaagcagatactaccacccctacacctacagccatcttggctcctggttctccagctagccctcctgggagtcttgagcctaaggcagcacggcttccccctatgcgtagagagagtggtcgccccatcaagcccccacgcaaagacttgcctgactctcagcaacaacaccagagctctaagaaaggaaagctttcagaacagttaaaacattgcaatggcattttgaaggagttactctctaagaagcatgctgcctatgcttggcctttctataaaccagtggatgcttctgcacttggcctgcatgactaccatgacatcattaagcaccccatggacctcagcactgtcaagcggaagatggagaaccgtgattaccgggatgcacaggagtttgctgctgatgtacggcttatgttctccaactgctataagtacaatcccccagatcacgatgttgtggcaatggcacgaaagctacaggatgtatttgagttccgttatgccaagatgccagatgaaccactagaaccagggcctttaccagtctctactgccatgccccctggcttggccaaatcgtcttcagagtcctccagtgaggaaagtagcagtgagagctcctctgaggaagaggaggaggaagatgaggaggacgaggaggaagaagagagtgaaagctcagactcagaggaagaaagggctcatcgcttagcagaactacaggaacagcttcgggcagtacatgaacaactggctgctctgtcccagggtccaatatccaagcccaagaggaaaagagagaaaaaagagaaaaagaagaaacggaaggcagagaagcatcgaggccgagctggggccgatgaagatgacaaggggcctagggcaccccgcccacctcaacctaagaagtccaagaaagcaagtggcagtgggggtggcagtgctgctttaggcccttctggctttggaccttctggaggaagtggcaccaagctccccaaaaaggccacaaagacagccccacctgccctgcctacaggttatgattcagaggaggaggaagagagcaggcccatgagttacgatgagaagcggcagctgagcctggacatcaacaaattacctggggagaagctgggccgagttgtgcatataatccaagccagggagccctctttacgtgattcaaacccagaagagattgagattgattttgaaacactcaagccatccacacttagagagcttgagcgctatgtcctttcctgcctacgtaagaaaccccggaagccctacaccattaagaagcctgtgggaaagacaaaggaggaactggctttggagaaaaagcgggaattagaaaagcggttacaagatgtcagcggacagctcaattctactaaaaagccccccaagaaagcgaatgagaaaacagagtcatcctctgcacagcaagtagcagtgtcacgccttagcgcttccagctccagctcagattccagctcctcctcttcctcgtcgtcgtcttcagacaccagtgattcagactcaggctaaggggtcaggccagatggggcaggaaggctccgcaggaccggacccctagaccaccctgccccacctgccccttccccctttgctgtgacacttcttcatctcacccccccccgcccccctctaggagagctggctctgcagtgggggagggatgcagggacatttactgaaggagggacatggacaaaacaacattgaattcccagccccattggggagtgatctcttggacacagagcccccattcaaaatggggcagggcaagggtgggagtgtgcaaagccctgatctggagttacctgaggccacagctgccctattcacttctaagggccctgttttgagattgtttgttctaatttattttaagctaggtaaggctggggggagggtggggccgtggtcccctcagcctccatggggagggaagaagggggagctctttttttacgttgatttttttttttctactctgttttccctttttccttccgctccatttggggccctgggggtttcagtcatctccccatttggtcccctggactgtctttgttgattctaacttgtaaataaagaaaatattattcaagttttgagttaccttaatatttgcttttgtagtgtttcaaaaggaacatcataagaattgtcttgataattttgagggaaatattactgcagtgagaaaaggcaatagctaacctataattggattgtcttaatttttaaaccagtaggcttttgctgtgtttttaataaagtaaatatgacttttgtaaattgaaaaaaaaaaaaaa

SEQ ID NO: 82 - DNA, 5673 bp, Homo sapiens
tgccggggccggcgagccaaagaggagccggccgcgcgggccgggaggggacggccgccggagccgcgaggccaactgtcgcctggttgggcccggaaatgggacgtcgcgctttctcagggagcgtagaagcagccagggcctctccaagccgctgctgtgacagaaagtgagtgagctgccggaggatgtccaccgccacgacagtcgcccccgcggggatcccggcgaccccgggccctgtgaacccaccccccccggaggtctccaaccccagcaagcccggccgcaagaccaaccagctgcagtacatgcagaatgtggtggtgaagacgctctggaaacaccagttcgcctggcccttctaccagcccgtggacgcaatcaaattgaacctgccggattatcataaaataattaaaaacccaatggatatggggactattaagaagagactagaaaataattattattggagtgcaagcgaatgtatgcaggacttcaacaccatgtttacaaattgttacatttataacaagcccacagatgacatagtgctaatggcccaagctttagagaaaatttttctacaaaaagtggcccagatgccccaagaggaagttgaattattaccccctgctccaaagggcaaaggtcggaagccggctgcgggagcccagagcgcaggtacacagcaagtggcggccgtgtcctctgtctccccagcgaccccctttcagagcgtgccccccaccgtctcccagacgcccgtcatcgctgccacccctgtaccaaccatcactgcaaacgtcacgtcggtcccagtccccccagctgccgccccacctcctcctgccacacccatcgtccccgtggtccctcctacgccgcctgtcgtcaagaaaaagggcgtgaagcggaaagcagacacaaccactcccacgacgtcggccatcactgccagccggagtgagtcgcccccgccgttgtcagaccccaagcaggccaaagtggtggcccggcgggagagtggtggccgccccatcaagcctcccaagaaggacctggaggacggcgaggtgccccagcacgcaggcaagaagggcaagctgtcggagcacctacgctactgcgacagcatcctcagggagatgctatccaagaagcacgcggcctacgcctggcccttctacaagccagtggatgccgaggccctggagctgcacgactaccacgacatcatcaagcacccgatggacctcagcaccgtgaaaaggaagatggatggccgagagtacccagacgcacagggctttgctgctgatgtccggctgatgttctcgaattgctacaaatacaatcccccagaccacgaggttgtggccatggcccggaagctccaggacgtgtttgagatgaggtttgccaagatgccagatgagcccgtggaggcaccggcgctgcctgcccccgcggcccccatggtgagcaagggcgctgagagcagccgtagcagtgaggagagctcttcggactcaggcagctcggactcggaggaggagcgggccaccaggctggcggagctgcaggagcagctgaaggccgtgcacgagcagctggccgccctgtctcaggccccagtaaacaaaccaaagaagaagaaggagaagaaggagaaggagaagaagaagaaggacaaggagaaggagaaggagaagcacaaagtgaaggccgaggaagagaagaaggccaaggtggctccgcctgccaagcaggctcagcagaagaaggctcctgccaagaaggccaacagcacgaccacggccggcagacagctgaagaaaggcggcaagcaggcatctgcctcctacgactcagaggaagaggaggagggcctgcccatgagctacgatgaaaagcgccagcttagcctggacatcaaccggctgcccggggagaagctgggccgggtagtgcacatcatccaatctcgggagccctcgctcagggactccaaccccgacgagatagaaattgactttgagactctgaaacccaccactttgcgggaactggagagatatgtcaagtcttgtttacagaaaaagcaaaggaaaccgttctcagcaagcgggaagaaacaggcagccaagtcgaaagaggagctagctcaggaaaagaagaaggagctggaaaagcgtctgcaggatgtcagcgggcagctgagcagcagcaagaagcccgcccggaaagagaagcccggctcagcaccctcagggggcccgtccaggctcagcagcagcagctcctccgagtctgggagcagcagctccagcgggtccagctctgacagcagtgactcagaatgaactggcttcggacagaacaggacagatggatgtcgcacacgccgagactctgccgtacccctctgtggttcatattactacttctgttccatggtgtgcaggtctgcttcttaattcagtgttatgatatcttccagtttttgctttcataggtcagagatctatcttgtgtgtgcgttagacttgatgagaaggtgtgaactctgcagaaagtctcttcttcatcactgaattcagtcacttggagatgacaacttcaaatgctaacccgatgaccccagaaaaccgtgtgagattcgtaccgaagaaccttgtggaatccctttgcttaggcccaacctggtcgatagctcgagaaagaattttttccaaggaaatgtctcggatatgggtactgtatttgaaagctgttagctttgtcaacacgcattgtccttgtcatttgggccccgagctctgaccctcgtgtctgacgcggccacctctttctggaggggctgaggacagatgtgcctgcttgtggagaccaggctgggcctaagcgaagggtcatcgcagccccagcccggagcgtggagcccttggggggtggtcgggtgggatgtgcgttctccgctcgtggtgatgtcaggagctcctcggagggaacagagcggctgtgtatgcagcctgcaggtttccatacactgaagcttttacctcaactttaaaaaaaaaaaaagaagaaaagatttaaaaaaaaaaaaaaaggagactttttttgtaaggttcggcaattttctacggaagtccagcccgctgtgagtccccgcctggctagcgctgcccctgctgctgctgccgcgccacccttgggaaccacttcccgagcttatgtgtatataaatagttatttattaacatcattggtcatttttaaaaaaaagaaaataagaaaaaaccgcagaagaaatgcattcacacagtcgcagagatgcaggccttgccagtggtgtgccgggcgcgggtcctgtctggcggcggcctgtcgtctccaggtgctaactcctgccaccgcgcggtgctcacccacgtctgttcgcgcgctcgcccctgggtttgttgggttttttggtttttttctttgtggtttttttttttttttttttttgtatgaaacttggaggcttacaggtatagacagctttcagctacagcacattctaattttttattttgtttagttcttttgtattcacttctggtctctttaagactgttttaaaagaaatcaatttagggaaccccagttatataatataaactttgtaatctgagagaaaaaatgtatagtaaatctaagtcttgatttttaactttctattgtaaaaaataataatatacagagtttaatagaaggtgatgttttggttttgttttcccagaggctgccatatggtctttgagtacggggatgtcccaaactggcccaccaatgagcatggcggctccggccaggaatgccagagttagcctcccaggcttgcgggtggacatgcctgctccctgccagcctccagtggcctggccaggccctcccgagcctgtctgccctccccaggggtggaggagtctctgggccccaggaggattccctcccggagactcgcacggtgctccctgctcacgcgttgtcacagttagtccggaaatgactgaaaccaggcattctcccggacctcagcgtgggggagcctccaggcagacgctgggtatggagctgtggtgtggtctgtcctgtatggtggccagtgctttctgccagcatttctggatggatatagggactatcattagtatcctaatacacggtgattttaaaacaaccataaaattgattcagagtccactgacccttacagatgtaggtatacccttactggagagggaactctgatgaggagatgctggtaaattatcattttttaaattgctggtgagtctgacacttggtgagttttcagccagtttgttaaacttttaattaagttttgtttataataaaaatataaatggatttgaaagtttccattttttaaagttaccctcgttttcaaaggtattttctaaacagatctttaatggactatttaaaccgaatttaaggaattcacacacgacagttgacaggtcttcacgcaggctggttggtaacgtgctgccagcacagggctgggtgatacgtacaccctaagccgggggtgcctggggctggggggcgctccttgcaatgcccctccagccacagggcagtgaggtgctgcctgtgtgagccgtcgggggagcggccggctgtgggggcagcgcagcaggagcatcgtggggcctttccttctcggctggttctctgtgacggtggcgtcggctcgcctctgctcctttcatctagaaagaagccactgaccctgacagcccacggcgggtacactgagcagctgcattggtgctgtcacttttttaaggctttctgtccagacttcaacactggtttcttttcagagtttcgaaggattaatgacttcctcagcgcccttgctggcgggctgagggtgacagtcacgtccgtttcttctgtattagaaggctgcggtgattcaattagattgtcccactgctgagacctgtagggcagcttctaacatgcttttttcaaggggagaggagtagtgacaagtcgtgtgtcggaattggatttgagaacactctgaatgacccctggaggccgagggggcaggcttcgggcgtgaactgaactccagacccctctttgtgttgggcagtgtcatcttgcttacaaactgtaagacacatttttttgtgtgtttgtttttgttgttgttcttttgcagcactcacgcctctgacagtcttttgggaaagagtaacacccacatacagaatttgtcacatccagagtagcactgttccttaatactggcataatgcttccaggaagtttttcttttttatatttaaaatgttacttttctgtatgatgtgcatgcaagtttaccgtaacttttcttaaactttttagtgccgtttctagtatattcctgtaaatgtcagttactgaaaatgagtccaatgtaagtagtttagcttgtttattgcaatgctggcctcaacacaacagaataaaaatggtagaaagtactctttgatgtttctggtaatcatggacccttctcctggggcatttgttttgttttcataataaaaagcaaaaaaaaaaaaaaaaaaaaaaaaaaaaaaaaaaaaaaaa

SEQ ID NO: 83 - DNA, 4635 bp, Homo sapiens
attctttggaatactactgctagaagtctgacttaagacccagcttatgggccacatggcacccagctgcttctgcagagaaggcaggccactgatgggtacagcaaagtgtggtgctgctggccaagccaaagacccgtgtaggatgactgggcctctgccccttgtgggtgttgccactgtgcttgagtgcctggtgaagaatgtgatgggatcactagcatgtctgcggagagcggccctgggacgagattgagaaatctgccagtaatgggggatggactagaaacttcccaaatgtctacaacacaggcccaggcccaaccccagccagccaacgcagccagcaccaaccccccgcccccagagacctccaaccctaacaagcccaagaggcagaccaaccaactgcaatacctgctcagagtggtgctcaagacactatggaaacaccagtttgcatggcctttccagcagcctgtggatgccgtcaagctgaacctccctgattactataagatcattaaaacgcctatggatatgggaacaataaagaagcgcttggaaaacaactattactggaatgctcaggaatgtatccaggacttcaacactatgtttacaaattgttacatctacaacaagcctggagatgacatagtcttaatggcagaagctctggaaaagctcttcttgcaaaaaataaatgagctacccacagaagaaaccgagatcatgatagtccaggcaaaaggaagaggacgtgggaggaaagaaacagggacagcaaaacctggcgtttccacggtaccaaacacaactcaagcatcgactcctccgcagacccagacccctcagccgaatcctcctcctgtgcaggccacgcctcaccccttccctgccgtcaccccggacctcatcgtccagacccctgtcatgacagtggtgcctccccagccactgcagacgcccccgccagtgcccccccagccacaacccccacccgctccagctccccagcccgtacagagccacccacccatcatcgcggccaccccacagcctgtgaagacaaagaagggagtgaagaggaaagcagacaccaccacccccaccaccattgaccccattcacgagccaccctcgctgcccccggagcccaagaccaccaagctgggccagcggcgggagagcagccggcctgtgaaacctccaaagaaggacgtgcccgactctcagcagcacccagcaccagagaagagcagcaaggtctcggagcagctcaagtgctgcagcggcatcctcaaggagatgtttgccaagaagcacgccgcctacgcctggcccttctacaagcctgtggacgtggaggcactgggcctacacgactactgtgacatcatcaagcaccccatggacatgagcacaatcaagtctaaactggaggcccgtgagtaccgtgatgctcaggagtttggtgctgacgtccgattgatgttctccaactgctataagtacaaccctcctgaccatgaggtggtggccatggcccgcaagctccaggatgtgttcgaaatgcgctttgccaagatgccggacgagcctgaggagccagtggtggccgtgtcctccccggcagtgccccctcccaccaaggttgtggccccgccctcatccagcgacagcagcagcgatagctcctcggacagtgacagttcgactgatgactctgaggaggagcgagcccagcggctggctgagctccaggagcagctcaaagccgtgcacgagcagcttgcagccctctctcagccccagcagaacaaaccaaagaaaaaggagaaagacaagaaggaaaagaaaaaagaaaagcacaaaaggaaagaggaagtggaagagaataaaaaaagcaaagccaaggaacctcctcctaaaaagacgaagaaaaataatagcagcaacagcaatgtgagcaagaaggagccagcgcccatgaagagcaagccccctcccacgtatgagtcggaggaagaggacaagtgcaagcctatgtcctatgaggagaagcggcagctcagcttggacatcaacaagctccccggcgagaagctgggccgcgtggtgcacatcatccagtcacgggagccctccctgaagaattccaaccccgacgagattgaaatcgactttgagaccctgaagccgtccacactgcgtgagctggagcgctatgtcacctcctgtttgcggaagaaaaggaaacctcaagctgagaaagttgatgtgattgccggctcctccaagatgaagggcttctcgtcctcagagtcggagagctccagtgagtccagctcctctgacagcgaagactccgaaacaggtcctgcctaatcattggacacggactcttaataaaacggtcttcagttccagattccttcccagcaagctatagcttaagtccattttcttccgtgaaagggacaggactccatcaagttatggaattcctcagagccctgggcctgtcccccggggtggattagtcatgtccagcagcacacgcctagtcccgccttcgggaaggctgcctgcctggccagccgcccaggcctctctgtgtaaagactgcctggctgtcctgcccagccttcctggttctctggggtcctctgggtgggtggcatctcctggagggtgatgacaatccccaacacatgcattcatgtggtgctactctgtgtgcaaagccagaccccaagtatgttttctctctttgtcccatccctctttttctgggactttggaccctaactacttccctcctgaaccttgcagtgacatcagtccaggagagctctcgttcagtgtgcggaagaacactctgacctctagagctgtcctagataaggagtgggagctttagaggcaaggcctctagaccctggaaggctcagtgaggctcttcccacagcatgcttctcactggtgccctgtaaggctcgagccaccgctgactctgagccttttggagtctttcctccttcgtctccattgttcccgtgcatttccaaaagcttaagttgcctggtgggcatttccccagtttctttggcctccgtcttctcaagtcacatagggaaagtacctcctggaaccaggctgcagtatgcaggacctgccaggcaggcactggtgaagggccttgggcctatcatccccccaaccccacctcaccccacccgcctcctctagtggggtgagtctgggctggtggaccagagagggtgtcacagaccctcagggactgccccatggacacctctgactggtgttaacagtgtgaacattttccccgtcttcagtcccttagaatgacgacagcccctggggttggggcaggcgagtgtggccacatcatccaagccctcccagagacacaaataggcttttttgctctaaaaataaataccagcccttttttggtcacaaatccagcatctcagcagaaaactgcctgacatgaaaagtcccctgaggaactgcatctgcgtttcaggggcttttcattttttctccttttttaaagtgtagattgtgggtgcttcctagaggcctgccttcttctggaactggaagtgggctatcaccatgggcaagcccttgggtgcaggctccccacctgcctgggaactctggcagctctcctcagctccttgggcttgagcagctgcaactgccccagatttgctgtggaagcaggggctagccctggcctcaccagggcctcccggggccctgcattgatgctcaggagttcctgggctgctcttgatcctttctgggcatccagcttccagttaagctctgtttgccaaacaaactattctcagctgccctttggcctgcgcctgatgtgttcctgttgcagtcccgcctgcctgagacaggagcaggcaggagagccttcatgcccagattcccacaggacaattggggagctgctggcattgtctttctgggaagattctgctttcttggaccaaatggcagcctgattaccagtgtcgggcctgcatgctgcccccgacacacgcacgcacgcgcacacacgtgtgcacatgggccatagccacaagccagctctcctccagggtcctttcaacctcgctgtccagggaccctgtccttcttgcccgtggggcttccatctggcagagaacgttcagggcttgttgaacttgaaagctcattagacttaagctgtcacctgtgcttggtgccccaggaacagccagagaggacagtgcccactcacttcttgttggcagcctcctgtgcaggaagtgccagccgggcctcgacgcaccagctggctgtgggtcctgaggaggggcgggaggcggccgctcagtgcagatggggactcctctcctctgccctgaccttaccctccattacctccttcactggagtggggctggggggtgggtggaatcagtgttttaatcggatttttaaaaaacattttatttctttgtacaattaccatcctatgtaaagatgaaatttgtgttgagttgaagattgtcatggaataaagatcacaccgtacttgaggccatcttcatgtaa

SEQ ID NO: 84 - DNA, 2227 bp, Homo sapiens
gaagcggcgccgcacggcctgggcctggcgcggggggcgggcaccggggcccggtcggacatgggcaagaagcacaagaagcacaagtcggacaaacacctctacgaggagtatgtagagaagcccttgaagctggtcctcaaagtaggagggaacgaagtcaccgaactctccacgggcagctcggggcacgactccagcctcttcgaagacaaaaacgatcatgacaaacacaaggacagaaagcggaaaaagagaaagaaaggagagaagcagattccaggggaagaaaaggggagaaaacggagaagagttaaggaggataaaaagaagcgagatcgagaccgggtggagaatgaggcagaaaaagatctccagtgtcacgcccctgtgagattagacttgcctcctgagaagcctctcacaagctctttagccaaacaagaagaagtagaacagacaccccttcaagaagctttgaatcaactgatgagacaattgcagagaaaagatccaagtgctttcttttcatttcctgtgactgattttattgctcctggctactccatgatcattaaacacccaatggattttagtaccatgaaagaaaagatcaagaacaatgactatcagtccatagaagaactaaaggataacttcaaactaatgtgtactaatgccatgatttacaataaaccagagaccatttattataaagctgcaaagaagctgttgcactcaggaatgaaaattcttagccaggaaagaattcagagcctgaagcagagcatagacttcatggctgacttgcagaaaactcgaaagcagaaagatggaacagacacctcacagagtggggaggacggaggctgctggcagagagagagagaggactctggagatgccgaagcacacgccttcaagagtcccagcaaagaaaataaaaagaaagacaaagatatgcttgaagataagtttaaaagcaataatttagagagagagcaggagcagcttgaccgcatcgtgaaggaatctggaggaaagctgaccaggcggcttgtgaacagtcagtgcgaatttgaaagaagaaaaccagatggaacaacgacgttgggacttctccatcctgtggatcccattgtaggagagccaggctactgccctgtgagactgggaatgacaactggaagacttcagtctggagtgaatactttgcaggggttcaaagaggataaaaggaacaaagtcactccagtgttatatttgaattatgggccctacagttcttatgcaccgcattatgactccacatttgcaaatatcagcaaggatgattctgatttaatctattcaacctatggggaagactctgatcttccaagtgatttcagcatccatgagtttttggccacgtgccaagattatccgtatgtcatggcagatagtttactggatgttttaacaaaaggagggcattccaggaccctacaagagatggagatgtcattgcctgaagatgaaggccatactaggacacttgacacagcaaaagaaatggagattacagaagtagagccaccagggcgtttggactccagtactcaagacaggctcatagcgctgaaagcagtaacaaattttggcgttccagttgaagtttttgactctgaagaagctgaaatattccagaagaaacttgatgagaccaccagattgctcagggaactccaggaagcccagaatgaacgtttgagcaccagaccccctccgaacatgatctgtctcttgggtccctcatacagagaaatgcatcttgctgaacaagtgaccaataatcttaaagaacttgcacagcaagtaactccaggtgatatcgtaagcacgtatggagttcgaaaagcaatggggatttccattccttcccccgtcatggaaaacaactttgtggatttgacagaagacactgaagaacctaaaaagacggatgttgctgagtgtggacctggtggaagttgaggctgcctggtatttgattatatattatgtacatactttttcattcttaacttagaaatgcttttcagaagatattaaatatttgtaaattgtgtttttaattaaactttggaacagcgaatttggatgttccagaggttggacttgtattaggtaataaagctggacctgggactcgtgaggaaggaatgtgaaaaaaaaaaaaaaaaaa

SEQ ID NO: 85 - DNA, 2699 bp, Homo sapiens
ctgccgcggccccgcctcgccccgtttccggcgcggcccagcgagctcggcaacctcggcgcagcgagcgcgggcggccagccagggccagggggcggtggcggccaaggtccgaccgggtgccagctgttcccagcccccgcctcgggcccgccgccggcgccgccatgggcaagaagcacaagaagcacaaggccgagtggcgctcgtcctacgaggattatgccgacaagcccctggagaagcctctaaagctagtcctgaaggtcggaggaagtgaagtgactgaactctcaggatccggccacgactccagttactatgatgacaggtcagaccatgagcgagagaggcacaaagaaaagaaaaagaagaagaagaagaagtccgagaaggagaagcatctggacgatgaggaaagaaggaagcgaaaggaagagaagaagcggaagcgagagagggagcactgtgacacggagggagaggctgacgactttgatcctgggaagaaggtggaggtggagccgcccccagatcggccagtccgagcgtgccggacacagccagccgaaaatgagagcacacctattcagcaactcctggaacacttcctccgccagcttcagagaaaagatccccatggattttttgcttttcctgtcacggatgcaattgctcctggatattcaatgataataaaacatcccatggattttggcaccatgaaagacaaaattgtagctaatgaatacaagtcagttacggaatttaaggcagatttcaagctgatgtgtgataatgcaatgacatacaataggccagataccgtgtactacaagttggcgaagaagatccttcacgcaggctttaagatgatgagcaaacaggcagctcttttgggcaatgaagatacagctgttgaggaacctgtccctgaagttgtaccagtacaagtagaaactgccaagaaatccaaaaagccgagtagagaagttatcagctgcatgtttgagcctgaagggaatgcctgcagcttgacggacagtaccgcagaggagcacgtgctggcgctggtggagcacgcagctgacgaagctcgggacaggatcaaccggttcctcccaggcggcaagatgggctatctgaagaggaacggggacgggagcctgctctacagcgtggtcaacacggccgagccggacgctgatgaggaggagacccacccggtggacttgagctcgctctccagtaagctactcccaggcttcaccacgctgggcttcaaagacgagagaagaaacaaagtcacctttctctccagtgccactactgcgctttcgatgcagaataattcagtatttggcgacttgaagtcggacgagatggagctgctctactcagcctacggagatgagacaggcgtgcagtgtgcgctgagcctgcaggagtttgtgaaggatgctgggagctacagcaagaaagtggtggacgacctcctggaccagatcacaggcggagaccactctaggacgctcttccagctgaagcagagaagaaatgttcccatgaagcctccagatgaagccaaggttggggacaccctaggagacagcagcagctctgttctggagttcatgtcgatgaagtcctatcccgacgtttctgtggatatctccatgctcagctctctggggaaggtgaagaaggagctggaccctgacgacagccatttgaacttggatgagacgacgaagctcctgcaggacctgcacgaagcacaggcggagcgcggcggctctcggccgtcgtccaacctcagctccctgtccaacgcctccgagagggaccagcaccacctgggaagcccttctcgcctgagtgtcggggagcagccagacgtcacccacgacccctatgagtttcttcagtctccagagcctgcggcctctgccaagacctaactctagaccaccttcagctcttttattttatttttttagttttattttgcacgtgtagagtttttgtcatcagacaaggactttgatcctgtcccctttggcatgcgggaagcagccgcggggaggtaatgaattgtctgtggtatcatgtcagcagagtctccaagccccacgaaccctgaggagtggagtcatacgcgaaggccatatggccatcgtgtcagcagagagagtctctgtacacagccccgtgaaccctgaggagtggagtcatacacgaagggcgtgtggccatcgtgtcagcagagagagtctctgtacacagccccgtgaaccctgaggagtggagtcatacgcgaagggtgtgtggccaggctgcagagctgcgtgccgtttgtgtccgagcatcacgtgtggctccagcccttgtttctgccagtgtagacacctctgtctgccccactgtcctggggtcgctcttgggaggcacaggcatgggtgtgtctggcctcattctgtatcagtccagtgtgttcctgtcatagtttgtgtctcccaggcaggccatggtaggggcctcgcaggggccattggggagcacagggccaggctggggtgaggagagctcccctgttttctgtttaattgatgagcctgggaaaggagtgtgttctgcctgcccgttacagtggagcgttccgtgtccataaaacgttttctaactgggtgtttaaaaaa

SEQ ID NO: 86 - DNA, 3156 bp, Homo sapiens
tggaaaccagaagagcattttaagaatcataatagttcagtgcagatgttcctgggaggtcaagttaagagtcaaaaataattcattagatttaacaatttagcatggacatgtacttgtagacaggattcaaagcagttaagaatgtctctgccaagtcgacaaacagctattattgttaaccctcctccaccagaatatataaatactaagaaaaatgggcgattgacaaatcaacttcagtatctacaaaaagttgtcctaaaggatttatggaagcatagtttttcatggccctttcaacgtcctgtggatgctgtgaaactacagttgcctgattattataccattataaaaaacccaatggatttaaatacaattaagaagcgcttggagaataaatattatgcgaaggcttcagaatgtatagaagacttcaatacaatgttctcaaattgttatttatataacaagcctggagatgacattgttcttatggcacaagctctagagaagctgtttatgcagaaattatctcagatgccacaagaagagcaagttgtgggtgttaaggaaagaatcaagaaaggcactcaacagaatatagctgtttcttctgctaaagaaaaatcatcacccagcgcaacagaaaaagtatttaagcagcaagaaattccttctgtatttcctaagacatctatttctcccttgaacgtggtacagggagcttcagtcaactccagttcacaaactgcggcccaagttacaaaaggtgtgaagaggaaagcagatacaacaactcctgcaacttcagcagttaaagcaagtagtgaattttctccaacattcacagaaaaatcagtggcactgccacctataaaagaaaatatgccaaagaatgttttgccagattctcagcaacaatataatgttgtgaagactgttaaagtaactgaacaattaaggcactgtagtgagattcttaaagaaatgcttgcaaagaaacatttttcatatgcatggcccttttataatcctgttgacgttaatgctttgggactccataactactatgacgttgtcaaaaatccgatggatcttggaactattaaggagaaaatggataaccaagaatataaggatgcatacaaatttgcggcagatgttagattaatgttcatgaattgctacaagtacaatcctccagatcacgaagttgtgacaatggcaagaatgcttcaggatgttttcgaaacgcatttttcaaagatcccgattgaacctgttgagagtatgcctttatgttacatcaaaacagatatcacagaaaccactggtagagagaacactaatgaagcctcctctgaagggaactcttctgatgattctgaagatgagcgagttaagcgtcttgcaaagcttcaggagcagcttaaagctgtacatcaacagctccaggttttgtcccaagtacctttccgtaagctaaataaaaagaaagagaagtctaaaaaggaaaagaaaaaagaaaaggttaataacagcaatgaaaatccaagaaaaatgtgtgagcaaatgaggctaaaggaaaagtccaagagaaatcagccaaagaaaaggaaacaacagttcattggtctaaaatctgaagatgaagataatgctaaacctatgaactatgatgagaaaaggcagttaagtctgaatataaacaaactccctggagataaacttgggcgagtagttcacataatacaatcaagagagccttctctgagcaattccaatcctgatgagatagagatagactttgaaacactgaaagcatcaacactaagagaattagaaaaatatgtttcggcatgtctaagaaagagaccattaaaacctcctgctaagaaaataatgatgtccaaagaagaacttcactcacagaaaaaacaggaattggaaaagcggttactggatgttaataatcagttaaattctagaaaacgtcaaacaaaatctgataaaacgcaaccatccaaagctgttgaaaatgtttcccgactgagtgagagcagcagcagcagcagcagctcatcagagtctgaaagtagcagcagtgacttaagctcttcagacagcagtgattctgaatcagaaatgttccctaagtttacagaagtaaaaccaaatgattctccttctaaagagaatgtaaagaaaatgaagaatgaatgcatactgcctgaaggaagaacaggcgtcacacagataggatattgtgtgcaagacacaacctctgccaatactacccttgttcatcagaccacaccttcacatgtaatgccaccaaatcaccaccaattagcatttaattatcaagaattagaacatttacagactgtgaaaaacatttcacctttacaaattctgcctccctcaggtgattctgaacagctctcaaatggcataactgtgatgcatccatctggtgatagtgacacaacgatgttagaatctgaatgtcaagctcctgtacagaaggatataaagattaagaatgcagattcatggaaaagtttaggcaaaccagtgaaaccatcaggtgtaatgaaatcctcagatgagctcttcaaccaatttagaaaagcagccatagaaaaggaagtaaaagctcggacacaggaactcatacggaagcatttggaacaaaatacaaaggaactaaaagcatctcaagaaaatcagagggatcttgggaatggattgactgtagaatctttttcaaataaaatacaaaacaagtgctctggagaagagcagaaagaacatcagcagtcatcagaagctcaagataaatccaaactctggcttctcaaagaccgtgatttagcaaggcagaaagaacaagagaggaggaggagagaagcaatggtgggtaccattgatatgacccttcaaagtgacattatgacaatgtttgaaaacaactttgattaaaactcagtttttaaattaaccatcaacttaaaatgaatggtaaaagatcaaaatgcatatggtaaaatgattgctttcagataacaagataccaatcttatattgtattttgactgctctaaaatgattaaacagttttcacttacatttttaaaaaaaaaaaaaaaa

SEQ ID NO: 87 - DNA, 3660 bp, Homo sapiens
cggctgcgctcaccggtaggccccgctcgggttccgccgaagcccagcccccgcaggtcgcccctccgacgccggcgcgccgcaagggaggccagctcgctcgcagtggggaggtcgcggctccagtcctcgcgtccccgccgtggtcccggtgcctgtcccatcccgcgggcgcggccgttgcgggcggcgcggcccgggcgcgcgcggcgaatctgcggctgcgaatcggctggagcggggcctcgcgagagcggcgaggcctgggcggctgggcctgggcgggcggcgcgggctgctccggaggctcgggtggcttgagagtcttgggaggctccgggcgctgcccgcgcggtcgccggcatgacgggccgcgtgtgccgcggttgcggcggcacggacatcgagctggacgcggcgcgcggggacgcggtgtgcaccgcctgcggctcagtgctggaggacaacatcatcgtgtccgaggtgcagttcgtggagagcagcggcggcggctcctcggccgtgggccagttcgtgtccctggacggtgctggcaaaaccccgactctgggtggcggcttccacgtgaatctggggaaggagtcgagagcgcagaccctgcagaatgggaggcgccacatccaccacctggggaaccagctgcagctgaaccagcactgcctggacaccgccttcaacttcttcaagatggccgtgagcaggcacctgacccgcggccggaagatggcccacgtgattgctgcctgcctctacctggtctgccgtacggagggcacgccgcacatgctcctggacctcagcgacctgctccaggtgaatgtgtacgtgcttggaaagacgtttcttctcttggcaagagagctctgcatcaatgcgccggccatagacccgtgcctgtatattccacgctttgcgcacctgctggaattcggggagaagaaccacgaggtgtccatgactgccctgaggctcctacagaggatgaagcgggactggatgcacacaggccggcgcccctcgggcctctgcggagcagcgctcctggttgcagccagaatgcatgacttcaggaggactgtgaaggaggtcatcagtgtggtcaaagtgtgtgagtccacgctgcggaagaggctcacggaatttgaagacacccccaccagtcagttgaccattgatgagttcatgaagatcgacctggaggaggagtgcgaccccccctcgtacacagctgggcagaggaagctgcggatgaagcagcttgaacaagtcctgtcaaaaaaactggaggaggttgaaggtgaaatatccagttaccaggatgcaattgagattgaactagaaaacagccggccaaaggccaaggggggcctggccagcctggcaaaagatggctccaccgaggacaccgcgtccagcttgtgtggcgaggaggacacagaggacgaggagctggaagccgcggccagccacctgaacaaagacttataccgggagctccttggtggtgcccccggcagctcggaagcagcaggaagccccgagtggggcggcagacctccggccctggggtccctgctggaccccctccccactgcagccagcctgggcatctcagactccatccgcgaatgcatctcctctcagagcagcgaccccaaagatgcttcaggagacggtgagctggacctcagtggcattgatgacctggagattgacaggtacatcctgaatgagtcggaagcccgcgtgaaggccgagctgtggatgagggagaacgccgagtacctgcgggaacagagggaaaaagaagcaagaatagcgaaagagaaggagctcggcatctacaaggaacacaagcccaagaagtcttgcaagcgacgggagccaattcaggccagtaccgccagggaggccatcgagaagatgctggagcagaagaagatctccagcaagatcaattatagcgtgctccggggcctcagcagcgccggcgggggcagtccgcacagggaggatgcacagcccgagcatagcgccagtgccaggaagctgtcacgaaggaggacgccggccagcagaagtggggctgaccctgtgaccagtgtggggaaaaggttgaggcctctggtgtctacgcagccagcaaagaaggtggccacgggagaggctttgctcccaagctctcccaccctcggagctgagcctgccaggccccaggcggtgctggtggagagcgggcccgtgtcataccacgccgacgaggaggctgacgaggaggagcctgacgaggaggacggggagccctgcgtcagtgccctgcagatgatgggcagcaacgactatggctgtgatggcgatgaggacgacggctactgaagtgtggcctccaggcaggtgatgtcctggcagggggcctcgcgggtctcctcagcatcagacgggcttccaggaccgcagcaggcaggccccagcgccgagactcctggtgacaggtggcacctgtcccacagccctcgtcccatgtggaacttaccattgggattgtgtttctattcagcaagggaaaccggaccaagcgtctgcatgtgtgtgatcagatgtgggccgggtgtgtgcagggctgggtcccgctgcctgccgtcgactcatccaaggaccctccaaggctggcagtgtggtgttgctactattaaggaaacaggcttggggcagccccactgctggtccaagtgtgtggagggctgagtgtgctggccctgtgactcaggaccagctctggagtctccagcccaccctccgcaccgtcccctcctgagcagcactcggcgccagcagcctctgccagagtggaagccagagccctgcaggtgtccggcgcagccgtgggagctgaggatctggcacttgagaggcagcagctccttgaaggtcctctgcctccagctgtggccctgcatccagatacctgcctcgtccgaggcagacacccccacccctgcctcctccagacccccctccccgctgcctgcaccgcctggagcagcatgggggtcagacccctgctccagggccacttgagttgtgggcccaggagccctgcggctgccggcaggtgaactgagtgcccgacagctgagaccggcgcccacccgtcctgagcatagctctgtaggcagtgcgggcatagcctgcatagtgtcctggcgctgggagttccccgtggacagagccagagggcagtggcgctccctgtcagagctggatcaggccccccatcgaggagggagggcagacggaggcccgagagcctccccaggcctcttcgtgggaaggccccagtaccactcgtaggaggtctcagctctggcatggctgccccggatgtggccgagggggcttcaccctgtgtccttaggagggggtggccttgaggcagagccgtgcctcactgacccccaggggcctcatcctccccatggaatgggctgtatgtcctgccccaacttggcccgcagcaggccagacccccctacccccgcccagagctcagtagccagcctgggtcctgccagggcttctcgagggcttgggggaagaatagatttagtaaagcaggaagatctgttgttacttaacaga

SEQ ID NO: 88 - DNA, 3702 bp, Homo sapiens
gagttccagcagtccgcgagctgccgtcggctccgcggggggggcgggccgggcaccccggggcgcggaggagcgctcctcgcttctctccttcccccctgccgcactccgccggaccctcccgccggcccgcgccgctgcactcgccctctcctctcgccccccggcaaactttcggcccctccccgcccctcgcccgttattcgtcgtggctcaagcccggccacgccgccccaagggctcctcccgacctcccggcctgccgctccggccactgcgggatccagaaacatgtcgaccacacttctgtccgccttctacgatgtcgacttcttgtgcaagacagagaaatccctggccaacctcaacctgaacaacatgctggacaagaaggcggtggggacgcctgtggccgccgcccccagctcgggcttcgcgccgggattcctccgacggcactcggccagcaacctgcatgcactcgcccaccccgcgcccagccccggcagctgctcgcccaagttcccgggcgccgctaacggcagcagctgcggcagcgcggcggccggcggtccgacctcctacggcacccttaaggagccgtcggggggcggcggcacagccctgctcaacaaggagaacaaattccgggaccgctcgtttagcgagaacggcgatcgcagccagcacctcctgcacctgcagcagcagcagaaggggggcggcggctcccagatcaactccacgcgctacaagaccgagctgtgccggcccttcgaggagagcggcacgtgcaagtacggcgaaaagtgccagttcgcgcatggcttccacgagctgcgcagcctgactcgccatccgaagtacaagaccgagctgtgccgcacctttcataccatcggcttctgcccctatgggccgcgctgccacttcatccacaacgcggacgagcggcggcccgcgccgtcggggggcgcctccggggacctgcgtgcctttggcacgcgcgatgcgttgcacctgggcttcccgcgggagccgcggcccaagttgcaccacagcctcagcttctcgggcttcccgtcgggccaccatcagcccccgggcggcctcgagtcgccgctgctgctcgacagccccacgtcgcgcacgccgccgccgccctcctgctcttcggcctcgtcctgctcctcctccgcctcctcctgttcctcggcctccgcggcctccacgccctcgggcgccccgacatgctgcgcctccgcggcggccgcggctgcggccgctctgctgtacggcaccgggggcgccgaggacctgctggcgccgggggccccgtgcgcggcctgctcgtcggcctcgtgcgccaacaacgccttcgccttcggtccggagctcagcagcctcatcacgccgctcgccatccagacccacaactttgccgccgtggccgccgccgcctactaccgcagtcagcagcagcagcagcagcagggcctggcgccccccgcgcagccgccggcgccgcccagcgcgaccctccccgccggggccgccgcacctccctcgccgcccttcagcttccagctgccgcgccgcctgtccgactcgcccgtgttcgacgcgccccccagccccccggactcgctgtcggaccgcgacagctacctaagcggctccctgagctccggcagcctcagcggctctgagtctcccagcctcgaccctggccgccgcctgccaatcttcagccgcctctccatctccgacgactgaggcaagagggcgccagtgaggaggaagggaaggcggttcagagatgttggaggacacccctcgccatctcgcccttgctgggggcacgggagtggggggggtgacatgggccctaggcagactgcaagcccgaccgagcacttggactcgaactctgtgccgggaggggcccccacccctcctttttcggtttcctcttgtctttttttttttatttttattacgaagtttcattctttttgagcaaaaaagtcgaactttttctgttgaacaaaatattcacaacagggcagttgtgatacgaatagaacaaaaaaaaaaaaaaaacacttaaactttgttaggactccgatgagtttgggacttcaggaaaaatcaacccagcaccagcagctaccaaccaccattccatctcttcacttgaacagcattagttaagtccagatgtgggaacccttctcttggaagaagttcctaattgtgtctcagaccggtgtaaacaaaccagccagccgccaccttgctaaacctataagctttttaaaatccaatatattctgccaagaatatgccttgatagttagccctcagcccataggtgttttttgttttttaacagaattatatatgtctgggggtgaaaaaacccttgcattccaaaggtccatactggttacttggtttcattgccaccacttagtggatgttcagtttagaaccattttgtctgctccctctggaagccttgcgcagagcttactttgtaattgttggagaataactgctgaatttttagctgttttgagttgattcgcaccactgcaccacaactcaatatgaaaactatttaacttatttattatcttgtgaaaagtatacaatgaaaattttgttcatactgtatttatcaagtatgatgaaaagcaatagatatatattcttttattatgttaaattatgattgccattattaatcggcaaaatgtggagtgtatgttcttttcacagtaatatatgccttttgtaacttcacttggttattttattgtaaatgagtacaaaattcttaatttaagagattgtatgtaatatttatttcattaatttctttccttgtttacgtaaattttgaaagattgcatgatttcttgacagaaatcgatcttgatgctgtggaagtagtttgaggaacatcctatgagttttcttagaatgtataaaggttgtagcccatccaacttcaaagaaaaaaatgaccacatactttgcaatcaggctgaaatgtggcatgcttttctaattccaactttataaactagcaaaaaagtgtttgcttattccaccagttctactgtgacatactcgagtataaagacatgtagcaataacggggagtggggggggagtctcacagtgcctttggaagggcccgaacttgccttaaatcttcctcaaccaaataagtattttattagtgcttgagagaatctgaatgtaggatgggttcaactgcacaaaaggaaaagatttttaccactttttttatatagatataaagtgaagcaaccgccttagtgctgaaatatgtagtacatgaatatgccttgtttaattacagaaaattccaaaacttgtactatttttttttccatgtagaaaggcaggaatgtctcctaagctttcctggacagcagatgaatgagcggtagctttagtttgtacgtaggtacagttggagcactatatgtactctctggactactttggacagaagtaggtttttgaatgtaacaagataagtcaacttgagttgtaatatattttggggaatcagctcactacaaattgtgactgtaaacattgtactgtaaatgttttgtagttttcccccaataaaatttttgggaaaaaaaggtaaaaaaaaaa

SEQ ID NO: 89 - DNA, 4710 bp, Homo sapiens
cgtcgccgccgctgctgccgccgccgctgccacagcctttgccgccacggtctccgccgccgctgtcctcgcgctgcctctgggagcctccattgttccagcagcgcccggtcccgagaccgggcatcttgggggctcgcgaaacgggcggcggccgacggagttgagaccccagggcgccggcgggaccaggagcggcaggggtcagctcaggaatcccggggagccgggaccaaagcgtggggcggcagggggccggggtggcgaggtctacggtctccggagttggggctcccccttcccggcccgactttccccgccgacctccccaagtggggtcggagccccggcgggcgcccccggcgatgagcccggactcgaggtggccgatgtgacagcatgggggtggactttgatgtgaagactttctgccacaacttgcgggcgactaagccaccatacgagtgcccggtggagacctgccgaaaggtctacaagagttacagtggtattgagtaccacctgtaccactatgaccacgacaacccaccacccccacaacaaactccactccgcaagcacaagaaaaaggggcgccagtcacgcccagccaacaagcagtcacccagcccctcagaggtctcacagtcaccaggccgtgaggtgatgagctatgcacaggcccagcgcatggtggaggtggacttgcatggccgcgtccaccgcatcagcatctttgacaacctggatgtggtgtcagaggatgaggaagcccccgaggaggcccctgagaatggcagcaacaaggagaacactgagacaccagctgctactcccaagtcaggcaaacataagaacaaggagaagcgcaaggactccaaccatcaccaccaccacaatgtttctgcgagcaccactcccaagctgccagaggtggtctatcgggagctggaacaggacacccctgatgccccaccccggccaacttcctattaccggtacatcgagaagtctgcagaggagctggacgaggaagtagagtatgacatggacgaggaggactacatctggctggatatcatgaatgagcgtcggaagacagagggtgtaagtcccatcccgcaggagatctttgagtacctaatggaccgactggagaaggagtcgtactttgagagtcataataaaggcgaccctaatgcgctagtggacgaggatgctgtttgctgtatctgcaatgatggtgagtgccagaacagcaatgtcatcctcttctgtgacatgtgcaacctggccgtgcaccaggagtgctacggtgtcccctatatccctgagggccagtggctgtgccgccgttgcctgcagtcaccctctcgtgctgtggattgtgccctgtgccccaacaagggcggtgccttcaagcagacagatgacgggcgctgggcccatgtggtgtgtgccttgtggatccctgaggtctgcttcgccaacacggtcttcctagagcctattgacagcattgagcacatcccaccagctcgctggaagctcacctgctacatttgcaaacaacggggctcaggggcctgcatccagtgccacaaggccaactgttacacagctttccatgtgacatgcgcccagcaggctggcctttacatgaagatggagcctgtgcgggagacaggcgccaacggcacctctttcagtgtccgcaagacagcctactgcgacatccacacgcctccaggttcagcacgccgactgcctgccctgtcccacagcgagggtgaggaggatgaagatgaggaggaggatgagggtaagggctggagctcagagaaagtcaagaaggccaaggccaagtcccggatcaaaatgaagaaggcacggaagatcctggcagagaagcgggcagcagcacctgtggtgtcagtgccctgcatcccaccacacaggcttagtaaaatcaccaaccgcctgaccatccaaaggaagagccagttcatgcagaggctgcacagctactggacactgaagcggcagtcacggaatggggtcccattgctacgtcgcctgcagacacacctgcaatctcagaggaactgtgaccaagttgggagagattctgaggataagaactgggcccttaaagaacagctcaagtcctggcagcggctccggcatgacttggagcgagctcggctgctcgtggaattgatccgcaagcgggaaaaactcaaaagggagacgatcaaggttcagcagattgccatggagatgcagctgactcctttcctcatcctccttcgcaaaaccttggagcagctccaagagaaggacacaggcaacatcttcagcgagccggtccctctgtctgaggtacctgactacctagaccacatcaaaaagcccatggactttttcaccatgaagcagaacttggaggcttaccgctacctgaattttgatgattttgaggaggacttcaacctcatcgtcagcaactgcctcaagtataacgccaaggacaccatcttctaccgggcagcagtgcggcttcgtgagcagggtggtgctgtgctccgccaggcccggcgccaggcagaaaaaatgggcattgactttgagacgggcatgcatatcccccacagcctggctggagatgaggccacacaccacactgaagatgcagccgaggaagagcggctggtcttgctggagaaccagaagcacctgccagtggaagaacagctaaagctgcttctggagcggctggacgaagtgaatgccagcaagcagagtgtgggccgctcacggcgtgcaaagatgatcaagaaagagatgacggcactgcggcggaagcttgcccatcagcgagagacgggacgtgatggccctgagcggcatggcccctcgagccggggtagtctgacaccccacccggcagcctgtgacaaggatgggcagacagatagtgcggcagaggagagcagcagccaggagacaagcaaaggcctgggtcccaacatgtcctcaacccccgcacatgaggtgggcaggagaacctcagttctgttctccaaaaagaacccgaagacagctggaccgcccaagaggccgggccggccccccaaaaaccgggagagccagatgacccccagccacggaggcagtcctgtggggcccccccagctccccatcatgagttccctgcgtcagcgcaagcggggtaggagcccccggcccagttcgagctcagacagcgacagtgataagtccacagaagaccccccaatggacttaccagccaatggcttcagcggtggaaaccaaccagtgaagaagagtttcttggtataccgtaatgactgcagccttccccggagcagctcagactctgagtccagcagcagtagcagtagcagcgctgcttcagaccggaccagcacaacgccctcaaaacaaggccggggcaaaccctccttctctcggggcactttcccagaggacagcagtgaggatacctcaggcactgagaatgaggcctactccgtgggcactggccgcggcgtgggccacagcatggtaaggaagagtctgggccggggagctggctggctgtcagaggatgaggactccccgctggatgctctggacctcgtgtgggccaaatgccgaggctatccatcatacccagctctgatcattgatccaaagatgccccgagaaggtatgttccaccatggggttcccatccctgtgcccccactggaggtgctgaaacttggggagcagatgacccaggaagcccgagagcatctctacctcgtcctcttctttgacaacaaacgaacctggcagtggctgcccaggaccaagctggttcctctgggtgtgaaccaggacctagacaaggagaagatgctggagggccgcaagtccaacatccgcaagtcagtacagatcgcctaccacagggctctgcagcaccgcagcaaggtgcaaggcgagcagagcagtgagaccagcgatagtgattgatactgctcaacacagcccaacctatagtgccctgtgacttctctcctcccctttgctcactgtcctggagtggcaccggcctctgcactgactcatttctggtcttggggccagtctcaggggaagctgggtgggggaggtccctcctgccctaagtgcagctggactgtacagaacactccaagggccaatggcagttcagcgcaaggagagggagggcccacaggtcagaaaaagctccagagacctcacagcattgtagggcggggtggtgggccaaagttaggacactgcgtaaaacaggccatcccaccacctctacctgctcatgccaggagaatccataactgcctagaggcctggggcccctaccggtcgtgaggtgagtgggcatctgtccagcctggaagaggggcactaggtgactccctcccctgctgttgtaaatactgtaattatcggagaatttaaattattctcatttgtaactgcgtttccgggtcgcgccagagtcatttggtactaaaaaaaaaaaaaaaaaagactgggggctgtccccatttcccttctctttcccatagattcccccacctttcaaactggtttgtatttatttcaaaggaagaaaatatattgattcttagaaaataaactgtcaatttagaa

SEQ ID NO: 90 - DNA, 6018 bp, Homo sapiens
attccccctcctcccccgggagcggcggcggcggccgggccggggccccagcgcgggccgggagggggcacggcggaggccacggaggcaggcgcgggagaagaccgcgctccgcttcccgggccgcgccgacctgctcggcggcctgcccgcccgcgcccaggggccccgaacggtggggccgggcaggcggctgaggcctgtcccctcagttcccaggtgccatgaggaagcctcgtcggaagtcccggcagaatgccgagggccggcgttccccgtccccctacagtctcaagtgctcacccacccgggagaccctgacatatgcccaggcccagcggattgtcgaggtagacattgatggacgcctgcatcgtatcagcatctatgacccactcaaaatcattactgaagatgagctaactgcccaggatatcaccgaatgcaatagtaacaaggaaaacagtgaacagcctcagttccctggcaagtccaagaaaccctcatccaagggcaaaaagaaggaatcctgctccaagcatgcatctggtacttccttccacctcccacagcccagcttccgtatggtggactcaggcatccagccagaagcacccccgctgcctgctgcctactaccgctacattgagaagccacctgaagacctggatgcagaggtagagtatgacatggatgaggaggaccttgcctggctggacatggtgaatgaaaaacggcgagtagatgggcacagtttggtgtctgcagatacctttgagctgctggtagaccggcttgagaaagagtcatacttggagagtcgcagcagtggggcccaacagtcactcatcgatgaagacgctttctgctgtgtgtgcctggatgatgaatgtcacaatagcaatgttattctcttctgtgacatctgcaacctggctgtacaccaggagtgctatggcgtcccatacatccctgagggccagtggctatgccgctgctgcctgcagtctccctcccggcctgtggattgcatcctttgccccaataagggtggcgccttcaaacagaccagtgatgggcactgggcccatgtggtgtgtgccatctggatccctgaagtctgctttgctaacaccgtgttcttggaacctattgagggcattgacaatatcccgcctgcccgctggaaactaacctgctatatctgcaagcagaaagggctaggtgcagccatccagtgccataaggtgaactgctacacagcattccatgtgacatgtgcacagcgggctgggctcttcatgaagattgagcccatgcgcgaaaccagcctcaatggcaccatctttacagtgcgcaagactgcctactgtgaggcccactcgccaccaggtgcggccactgctaggaggaagggcgactcccctagaagcatcagtgagactggcgatgaggaagggctgaaggagggtgatggagaggaggaagaagaggaagaggtggaggaagaagagcaggaagctcaaggcggggtgagtggctccctcaagggagtgcccaagaaaagcaagatgagtttgaagcagaagatcaagaaggagccagaggaagcaggccaagacacaccctccactctccccatgcttgctgtcccacagataccctcttacaggttgaacaagatctgtagtggtctctcctttcagaggaaaaaccagtttatgcagcggcttcacaattattggctgttgaagcggcaggcacggaatggtgtccctcttatccggcgcttgcactcccatctgcagtcccaaagaaacgctgagcagcgagagcaggatgagaagacaagtgcagtgaaggaggagctgaagtattggcagaagctccggcatgacttggagcgggcgcggctgctgattgagctgattcggaagagagagaagctcaaacgagagcaggtcaaagtccagcaggctgccatggagctggagctgatgccattcaatgttctgttgaggacaacactggacctgctgcaggagaaggatcctgcacacatcttcgcagaaccagtcaacttgagtgaggttccagattacctggaattcatatccaagccaatggatttttctactatgaggcggaagctggagtcccacctgtaccgcaccttggaggagtttgaggaggactttaaccttatagttaccaactgcatgaagtataatgctaaagacacaattttccaccgagcagctgtccgcctgcgggacctgggaggggccatcctacggcacgcccggcggcaggcagagaacatcggctatgaccccgagaggggcactcacctgcccgagtcacccaaattggaagacttttaccgcttctcctgggaagacgtggacaacatcctcatcccagagaaccgggcccatttgtccccagaggtgcagctgaaggagctgctggagaaactggacctggtgagcgccatgcggtccagtggggcccgcacccgtcgtgtccgcctgctacgccgggagatcaatgcccttcggcagaagctggcacagccaccaccaccacagccaccatcactcaacaagacagtatccaatggggagctgccagcagggccccagggggatgcagctgtgctggagcaggccttgcaggaggagccagaagacgatggggacagagatgactccaaactgcctcctccgccaaccctggagcccactgggcctgcaccttccttgtctgagcaagaatcccccccggagccccctactctgaaacccattaatgatagcaaacctccaagcaggttcctaaagcccagaaaggtggaagaagatgagctcttggaaaaatcaccactgcagctagggaatgagcctttgcaacgcttgctcagtgacaatggcatcaacagactatccctcatggcccctgacaccccggccggtaccccacttagtggtgtgggtcgccgcacatcagtcctcttcaagaaggccaagaatggggttaagctacagagaagcccagacagggtcctggagaatggcgaggaccatggtgtggcaggctctcctgcctctccagccagcatcgaggaagagcgccactcccggaagcggccaaggagcaggagctgtagtgagagcgaaggggagaggtccccccagcaggaggaagagacaggcatgaccaacggctttggaaaacacaccgaaagcgggtctgactctgaatgtagtttgggtctcagtggtggactggcatttgaagcttgcagtggtctgacgccccccaaacgcagccgtgggaagccagccctgtctcgagtgcccttcctggaaggtgtgaacggagactctgactacaatggctcaggcagaagcctcctgctgccctttgaagaccgcggagacctgaagcccttggagctggtgtgggccaagtgccgaggctacccctcctaccctgccttgatcatcgatcccaagatgccccgggagggcctcctgcacaatggcgttcccatccctgtccccccgctggacgtgctgaagctgggagagcagaaacaggcagaggctggagagaagctcttccttgtcctcttctttgacaacaagcgcacctggcagtggcttccaagggacaaagtcctgcccttgggtgtggaagacaccgtggacaagctcaagatgctggaaggccgcaagaccagcatccgcaagtcagtgcaggtggcctatgaccgtgcgatgatccacctgagcagagtccgggggccccactccttcgtcacttccagctacctgtaagggcagggctggcctgcatccgcttgccctgcccccatcccgcagggcacagagaagcctcttctgcccctgccagatgtatggccggcagcttccccctctcatggtaggccagggactgggctttctccccactaagggcaaggccccagttttgaccaatcgcatggttctcctggcaggcctgctgtgtgccaaaaactcccacccaaggtccctcaggggatatttcactgaagaaccagttagaagtagaaacagctgtggggcttgggcccagcttaggagattgcccagatggcaagaggtcctgggctccttcttgaggggctgcctggcccgctccatcctactcccactaactacacctcagggcgggtgaggttccgacactgatcccagagatgccgtggatacgccagggtcccagggggaatctccccaagctcacactctctcccgcttatcgcctattctcacacctcttctcggtcccatcttctgcacccattgcccagtcttgctttctctttcccatattccttttctttttctcttgtgccaaactgacagaaaccgtcaccacactggtctttttctttaatgtctcattccccttgaggccagctgctatgccaggtggtgtctctgccaggctcctcaggcccagacagaggccagcccacaacctatgaccccctcccccaggacaccacctcccacccacagaccttccctttagctgttgacacaacttcccagctctgcaagtgtgccccctggatcaaggcgggtcccctcttgtttttttctttgctgccacgaggtggtccaagccttcagggtgggctcctatcaggctgggtgtgcgagtgtccatctgtccacatggatgtcgagggtggtttgtgtggagctgtgctcgtcagctgggtctgccctcttcccccttttctccttcttctctcctcatggactttttctgcaattgcagtcttaagcttcactctccaccacctggatggcatggcgcctgccaccaaacatcttcctggcctgcgctctgccctgccctgcctagcctctgctactcccacttcccaactccagggaatgcattacttttatttcaaaccctctgcctccttccttctttctcttcaaccccctccccaccttcaccttctcaaaaatggaaggaaaaaaaaactgtgaatggggaatgctgactgacaaaccaacacaactttcagaggcttcagtgtctgttctctggacatttcttttcacctcctgagcaccaaagtcgcagggccagttgcaggccgctgattgccatgttgatttttaacctgatattctttttaattgttttaaatttttcataggggagttttggacaaaacagtcactggggagatcactgccatttttacacacttgactttttaaaaatacaaccaaccaaccaccacaacttcttatacatttgggacatgagccagagtttaaaagggaaccaacaaaacactataacttaaaaggatggggttttggattttgtataataataaaaacaatacagcatatggctagggaaggacatggtgtatataattgtaaaatactgttctaaattattcaggcctatagtttccattactggagtcctccattgtgtggccacacagtgtcgttgatttaaaggagccagtgcttcccctctccccaggtagttggtcagctgtggactctgtgacctttgtctaaacctgtgttgtaagatcttgggacttcctctctttctatgtctatctcttccccccaacactttctcttcttagtctctctctttatttttcaatctctgaatattttagtctctctctgagtctcattttttaaaatgctcttttagaacgggaaacggctcagatcctgctgtggcacggggcctatgtgtctctgtcgcgtctgctgtgaagcacatgatgctctatttattgtagagagtgactttatttgctttctagaattgtttataacagatggtataagagaggtaataaacagagaaaaatctatgcttgtaaagaatacaaaagttaattttacctactataatatgactgtctgaaacttattttctctctgagaaataaatgttctaatgggc

SEQ ID NO: 91 - DNA, 4411 bp, Homo sapiens
agtgttcttgcagggctgctgatgggtggtcctgttcttttcgcggtcctgtttgcgcagagatgaaacggggaacttagcgtatccctaccgctctttttgatgacaggagtaaagggctgttcagactacctaaacaatgttgttaagagaagcactcgtacttctcagacttcgctgttccggaccccgcgagccaggggcaggcaccgggtccacccggggctgagctgcggcggcgcctgacaatgccccctcgcgccccggcctcggcgcccgctcccggctccagcgcgcctgcacgtacgtagccttcacgtgtgtgtggatacggagtgcatgtgtggagacagaggaatatgctccaacaaatttcggatagaggcgccgaagacaggacgtggggaagctaaagaagtaaacaggtcatggcacgtttaacaaaaagacgacaggcggatacaaaagctatccagcatctttgggcagccattgagattatacggaaccagaagcagattgccaacattgaccgtattacaaagtatatgtctcgagtccacggtatgcaccctaaagagaccacccgtcagctgagcttagctgtgaaagatggtcttattgtcgaaactctaacagtgggctgcaaaggttcaaaagctggtattgaacaagaaggatattggttgccaggagatgagattgactgggaaacagaaaatcatgactggtattgttttgaatgccatttgcctggagaggtgttgatatgtgacctgtgttttcgtgtgtatcattccaagtgtttgtctgatgagttcaggcttagagacagcagtagtccctggcagtgcccagtttgcaggagcattaagaagaagaatacaaacaaacaggagatgggcacatacctcagattcattgtctcccgcatgaaggagagggctatagatcttaataaaaaggggaaggacaataaacacccgatgtacaggaggctggtgcactcagctgtggacgttcccaccattcaagagaaagtgaatgaagggaaataccgaagttatgaagagttcaaagctgatgcccaattgcttctccacaataccgtgattttctatggagcagacagtgagcaagctgacattgcgaggatgctatataaagacacatgtcatgagctggatgaactgcagctttgcaagaattgcttttacttgtcaaatgctcgtcctgacaactggttctgttatccttgtatacctaatcatgagctggtttgggctaaaatgaaaggttttgggttttggccagccaaagtcatgcagaaagaagacaatcaagtcgacgttcgcttctttggccaccaccaccagagggcctggattccttctgaaaacattcaagatatcacagtcaacattcatcggctgcacgtgaagcgcagtatgggttggaaaaaggcctgtgatgagctggagctgcatcagcgtttcctacgagaagggagattttggaaatctaagaatgaggaccgaggtgaggaagaggcagaatccagtatctcctccaccagtaatgagcagctaaaggtcactcaagaaccaagagcaaagaaaggacgacgtaatcaaagtgtggagcccaaaaaggaagaaccagagcctgaaacagaagcagtaagttctagccaggaaatacccacgatgcctcagcccatcgaaaaagtctccgtgtcaactcagacaaagaagttaagtgcctcttcaccaagaatgctgcatcggagcacccagaccacaaacgacggcgtgtgtcagagcatgtgccatgacaaatacaccaagatcttcaatgacttcaaagaccggatgaagtcggaccacaagcgggagacagagcgtgttgtccgagaagctctggagaagctgcgttctgaaatggaagaagaaaagagacaagctgtaaataaagctgtagccaacatgcagggtgagatggacagaaaatgtaagcaagtaaaggaaaagtgtaaggaagaatttgtagaagaaatcaagaagctggcaacacagcacaagcaactgatttctcagaccaagaagaagcagtggtgctacaactgtgaggaggaggccatgtaccactgctgctggaacacatcctactgctccatcaagtgccagcaggagcactggcacgcggagcacaagcgcacctgccgccggaaaagatgaagctggcccttcccggagtcaccccgatgattactcttttcagacacagcggtttttgtttccaagaagccaaaattgtttagaatttgcttcccattttgcaccagcctttaaacacttttcgtgaagaaattttgcacagtagtttaaatcttttgttaatgctcctccgaagtttttcagggggtaaaagtaacatcagtggagggtattattttaaataaattttaattgagaatttgttgcattttcagcaaattttaaaacatttttaggttttacagagattttaacctttaaacaacagatctttaaaaaacaggtgaatacaagtgagtttaacaaagaaacatttagaatagatctgaatgtaagaactacagaactgtttcagaaataaaacatactaccttgatgtgacatttttttcttaaccttgttgagctggttttgttcagcttaatttactgttcaaaggcattatctgttggtcacaccagtgggtatatgattgaatttagggaacagggttgacacagcagggctagtcctgcatattttttcttaaatatttcccaattgtgtttttcattatttcttttcaatatataacttttataacaaattattagctttgatcttgtagtttaaaattgcagggaactggggtaatcttttactgagctggatcttagagaaaatgaatatttaaattttaaagtttgcacatttcatctttgtcctaacatgagtgcttgtaacaaaataaacaacaaaaacaaagccaaaaactacctttatccatatgtgaaattatagatgaggcatacgaatttgtttaatgcttcccttcccttcccacatatcatctcactgcctattatctggtgtcacctcatgtatcgtaagttaatactaaaagaagagaaagcacttaagtttcacagaagccgttatgtttgtagtaatgggtcattgcctactaatgaactccatcactgtacacagaatgaagaataatgcatgttaattttcttgtattaaagatgccgtgatttgtaaaaagtctgtattttgcggaatgtctggattaagaagcattaccaataggaatggatcgatagttgaataatgattttttatacatagatatataaaatacagccaggaaaacttaaattacttttcttttaaaatatctcacaatttatgtggtatttttaaagactgatcttagaccaagtcaaattcccatttatcatttagttattttttgaggttagagaataatttgtacatatttatttagacctttgatatttattaaagcaattactcacaatggaagtgaaagaatcaggagaaaagccttttaaaaagtattctccaggtttgtcagggtcactctaaagataaaaatgtaactaagtcttctgtgaaatatcatccatctaatcttgatgctgttgcagatggtggtgacacaagttaattgacaaactactgccaaatggtgcacaatattttgtaaaaagtacccagtagccccatttcatacaatgtacctaaattatgcagtaacttggcatcatcgttccctccttgttgctgtgtaattagtcagtgttgccacagtgtgtggcgctgatggagatgtcagaaccgagaacacttaaccttctttgattgtttttcaagttttaagacttcgatccacccctatgagagcaagtaattgtggaaatatttttggtgtaaaatcattccagagtatgtaatatttaactgatagctgcatgaaagtgagattcgtgttactttggcttttctgtctctgttgacacggttgcacatttccaagttactacagcgtgaaaactgtgtgtttaaaaaaaaacaaaattaaaaaaagagattgtggcctggttttgtaaaagttttaggtaaaattacaattgattgttttaggaatcattattaaaaattttctgcaaatcataaagctatatcgaggtgttgagcttagccactatgcacattgtaattattcattgtggctgtccagttctatgatgcattctggcattttgtaagctgctctgactagcaatatatagattcatttaatgtgttaacattggttaataaatgtatttaaaaaaaactaaaaaaaa

SEQ ID NO: 92 - DNA, 6345 bp, Homo sapiens
ctctagactcgaggaattcccgcggcctgggcctgcgccgctcagctctctggaaactagcgcctcagctgcgcggcgcgtaggtcgcggggagctccgaaccgccggcgcccggccatggcggtctccaggctagatcgcctttttattttactggatactggcactactcctgttacaagaaaagctgctgcacagcaacttggagaagtggtgaagcttcatccccatgaactaaataatctcctgtctaaagtgttgatatatttaaggagtgcaaattgggatacccggattgcagcaggacaagctgttgaagctatagtgaaaaatgtacctgagtggaatccagtgccgagaaccagacaagaacctacttccgaaagttctatggaagattcacctactacagagcgattgaattttgacagatttgatatatgtagattgttacaacatggtgcatcactcctgggatctgctggtgccgaatttgaagtccaagatgaaaaatcaggtgaagtggatcctaaagagaggatagcacgccaacgaaaattattacagaagaaacttggccttaatatgggagaagcaattggaatgagtactgaagaacttttcaatgatgaggatttggattataccccaacttcagcatcctttgttaacaaacaacctactcttcaggcagctgaattgattgactcagagtttcgagcaggaatgagcaatagacaaaagaacaaagctaaaagaatggccaagttatttgcaaaacagagatccagggatgcagtggaaactaatgagaagagcaatgatagcactgatggggagccagaagaaaagagacggaaaatagcaaatgttgttattaatcagtctgcaaatgattccaaagtcttgattgataatattccagacagctcttccttaattgaagagacaaatgaatggcctttggaaagcttttgtgaagaactttgcaatgacctttttaatccctcctgggaggttcgacatggtgcaggcactggacttagggaaattcttaaagctcatgggaaaagtggtggtaaaatgggtgacagcactttagaagagatgattcagcagcatcaagagtggttggaagacttggttattagactcctttgtgtttttgcattagacagatttggagactttgtttctgatgaagttgtggcaccagttcgtgaaacttgtgctcaaacattaggtgtggttttaaaacacatgaacgaaacaggagttcataagactgtggatgtgctgctaaaattacttacacaagaacaatgggaagttagacatggtggtctgctgggaataaaatatgctttggcagtccgtcaggatgtaattaatactttattgcctaaagttttaactagaataattgaaggactccaggatcttgatgatgatgtcagagctgttgctgcagcatcattagtgcctgtagtagaaagccttgtctatcttcagacacaaaaggtgcccttcattataaatacattgtgggatgctcttctggaattagatgatctaacagcttcaacaaatagtattatgactctcctttcatccttgttaacttaccctcaggtccaacaatgcagtattcagcagtcactgacagttttagttccacgtgtctggccttttttgcatcacactatatcatcagttcgaagagcagcattggaaactctgtttacgttattatcaacacaggaccagaactcttcatcttggcttatacctatactgcctgatatgctccgacacatttttcagttctgtgttttggaaagcagccaggaaattctggaccttattcacaaggtttggatggaactgttgagtaaggcttcagttcagtatgtggtagcagctgcttgcccatggatgggtgcttggctttgcttgatgatgcagccttctcatttacctatcgatttaaatatgttgctagaagtaaaagctagagccaaggaaaaaacaggtggtaaggtgcgccaaggccaaagccagaataaagaagtacttcaggagtatattgcaggtgccgacaccatcatggaagacccagccaccagggattttgtagttatgcgggccagaatgatggcagccaagttgttaggagcactttgttgctgtatttgtgatccaggtgtaaatgtggtaactcaagaaattaaaccagctgaatccctgggccagttactactcttccatttgaactccaagtctgctttacagaggattagtgtagctttggtaatctgtgaatgggctgctttacaaaaggagtgtaaagctgttaccttagctgtgcagccgcgtttacttgatatcctttcagaacatttatattatgacgaaattgccgttccattcacacgaatgcagaatgaatgtaaacaacttatatcatcattagctgatgtacatattgaagttggtaatcgagtaaacaacaatgttttaacaatagatcaagctagtgacttggtcactactgtttttaatgaagccacatcatctttcgatttaaatcctcaagtgttacaacagttagatagtaaacgacagcaggtccaaatgacagttacagagaccaaccaggagtggcaagtgttgcagttgagagtgcatacttttgctgcctgtgcagttgtgagcttgcagcagcttccggagaaattaaatcctatcataaaaccattaatggagacaattaaaaaagaagagaatacactagtgcaaaactatgcagctcagtgcatagctaaactccttcagcagtgcacaacaaggacgccctgtcccaattcaaaaattattaaaaacctctgtagctcactttgtgtggacccatatctaactccttgtgtcacatgtccagtaccaacacaaagtggccaggaaaattctaaaggatccacctcagaaaaagatggaatgcaccatactgtcaccaagcacagaggtataattacactctacaggcaccagaaagctgcctttgctatcacaagtaggcgaggtcctacccccaaagcagtaaaagctcaaatagcagatcttcctgcaggaagtagtggaaatattcttgttgaacttgatgaggcccagaagccttacctggtacaacggagaggagctgaatttgctttgacaactatagtaaagcattttggtggtgaaatggcagtgaagttgccacatctctgggatgctatggttggcccattgaggaatacaatcgacataaataattttgatggaaaatccctcctggataagggagatagccctgctcaagaattggtgaattctctgcaggtttttgaaacagcagcagcttcaatggattctgagcttcatcccttgttggtccagcatttgccacatctttatatgtgccttcaataccccagtactgcagtgaggcacatggctgctcgttgtgtaggtgtcatgagcaaaatagctaccatggaaacaatgaatatttttttggagaaggttcttccgtggctgggagcaattgatgacagtgtcaaacaagagggtgcaattgaagcacttgcctgtgtaatggaacaactagatgttggtattgttccatatattgtccttttagttgttcctgtattaggaagaatgagtgatcagacagacagtgtgagattcatggccacgcagtgctttgcaacgctaattagactcatgccacttgaggcaggcattccagaccctccaaacatgtcagcagaattaatccaattgaaagccaaggagcgacactttttggagcaattgttagatgggaaaaaattggaaaattataaaattccagtaccaatcaatgctgaactcagaaaatatcagcaggatggtgtgaactggttagcatttcttaataagtataaacttcatggaattctgtgtgatgacatgggtttaggaaaaactttacagtccatctgcattctagcaggagatcattgtcatagggcccaggaatatgcaagatcaaaattagcagaatgtatgccacttccttccttagtggtttgtccgccaacattaacaggccattgggtggatgaagtaggtaaattttgctctagagaatatctcaacccgttgcattacactggacctcccactgaaagaataaggttacagcaccaagtaaaaaggcacaatctaatagtggcttcatatgatgttgtgaggaatgacatagatttctttagaaatattaaatttaactactgcattcttgatgaaggccatgtcatcaaaaatggaaaaacaaagttgtcaaaagcagtaaaacaactgactgctaattataggattattctttctggaacaccaatccagaacaacgttttggagctgtggtcattatttgatttcctcatgccaggatttttgggtactgaacgccagtttgctgctcgatatggtaaacctatattagcaagtagggatgctcgaagctccagtcgagagcaagaagcaggtgttcttgctatggatgcgctgcaccgccaagtactaccgtttcttttgagaagaatgaaagaagatgttttgcaggatcttccacctaaaattattcaagactattattgtactcttagtcctctccaggttcagctctatgaagattttgctaagtctcgtgccaagtgtgatgttgatgaaacagtttcttcagctacactttctgaagaaactgaaaaaccaaagcttaaagctacaggccacgtattccaggcattacagtacttacgtaaactgtgcaaccatccagcattagtcttaacacctcaacatccagaattcaagaccactgccgaaaaactggcagttcagaattcttctctacatgatattcaacatgcccctaagctctcagctttgaaacaattgctgttggactgcggtttgggaaatggcagcacttccgagagtggcacagagtctgttgtggcccagcacaggatactgatattctgtcagctgaaaagcatgcttgatatagtagagcatgatctcctcaaacctcacttgccctctgtcacttatttgagattagatggcagcatacctcctggtcagaggcattccattgtttcccggtttaataatgatccatctatagacgttctgttacttaccactcacgttggtggcctgggacttaatttgacaggcgctgacacagtagtatttgtggagcatgactggaatcctatgcgagatctacaagccatggaccgggcccatcgcattgggcagaaacgtgtggttaacgtataccgattgataaccagaggaacattggaagaaaaaataatggggttgcagaaattcaagatgaacatagcgaatactgttattagccaagagaattctagtttgcagagcatggggactgatcagcttcttgatctgtttactcttgataaggatggcaaagcagaaaaagctgacacctctacttctgggaaagcaagtatgaaatcaattcttgaaaacctgagtgatctttgggatcaagagcagtatgattcagagtacagcctggaaaattttatgcattctctcaagtaactatcaaatattgtaaatgcaattgctgctagttcagttacatttctgctgatattcagcaaatttctaagtttatggtgaacttttaactcaatgtgtaaatagatctggagaatattcagcataatgctggctcttgtttcactgggggaaacaagttattctcaaatatttgcactgtattaaatttaaatgttaatgtgaaatggtttaaattttacatgctgaaaagctgcagagcagaggaaccaaaccaggtttatttgtgctaccaggaggtgttcttaatgggaacaggcctcctatctttagtcactttgtacaggatgatatccatgagtactttagtgtttgtatatgttttttcttttaaatagaacttgtttttataattgatttaaaatagggctttttttctataaaagccttaatgagccataattttaagaatataagaataatgactatgatattggtcagtcttagaacatgaaaatgtcagacaatgaatttaatcgggcccttggtggaaacatttatatatttaatgcagatgcatagtgtttttcaaatctttaacatcattttttcaacttttaactataatatcaactattctaaatacaggtaatggtatatttaaggctaccataacatcctatttagagggtggttttt

SEQ ID NO: 93 - DNA, 3308 bp, Homo sapiens
agtcctgttacacctcccgcggccgcgcacagcggcaacccgggcgtgcgggggcgcgcgcggtcagggaggggcctgcggaggcgcgaggcccccggaagcgcctttcccggaaggcagggaggcagcgccggcctccggaggcggcctgggcgatggcggcggagttttgtccataacgtgggcaaccgcgcagctggaggatggcctcactcgggcctgccgcagctggggagcaggcgtcgggggctgaggcggagccgggccccgcggggccgccgccgccgccctcaccgtcctctctggggcccctgctccccctgcagcgggaacctctctacaactggcaggcgaccaaggcgtcgctgaaggagcgcttcgccttcctcttcaactcggagctgctgagcgatgtgcgcttcgtactgggcaagggtcgcggcgccgccgccgctgggggcccgcagcgcatccccgcccaccgcttcgtgctggcggccggcagcgccgtctttgacgccatgttcaacggcggcatggccaccacgtcggccgagatcgagctgccggacgtggagcccgcagccttcctggcgctgctgagatttctatattcagatgaagttcaaattggtccagaaacagttatgaccactctttatactgccaagaaatacgcagtcccagccttggaagcacactgtgtagaatttctcaccaaacatcttagggcagataatgcctttatgttacttactcaggctcgattatttgatgaacctcagcttgctagtctttgtctagatacaatagacaaaagcacaatggatgcaataagtgcagaagggtttactgatattgatatagatacactctgtgcagttttagagagagacacactcagtattcgagaaagtcgactttttggagctgttgtacgctgggcagaagcagaatgtcagagacaacaattacctgtgacttttgggaataaacaaaaagttctaggaaaagcactttccttaatccggttcccactgatgacaattgaggaatttgcagcaggtcctgctcaatctggaattttgtcagatcgtgaagtggtaaacctctttcttcattttactgtcaaccctaaaccccgagttgaatacattgaccgaccaagatgctgtctcaggggaaaggaatgctgcatcaatagattccagcaagtagaaagccgctggggttacagtgggacgagtgatcgaatcagattcacagttaatagaaggatctctatagttggatttggcttgtatggatctattcatggccctacagattatcaagtgaatatacagatcattgaatatgagaaaaagcaaaccctgggacagaatgataccggctttagttgtgatgggacagctaacacattcagggtcatgttcaaggaacccatagagatcctgcccaatgtgtgctacacagcatgtgcaacactcaaaggtccagattcccactatggcacaaaaggattgaagaaagtagtgcatgagacacctgctgcaagcaagactgtttttttcttttttagttcccctggcaataataatggcacttcaatagaagatggacaaattccagaaatcatattttatacataatttagcattataatacatcttggctaaataataccatacaatctagtgtcaaaaacataaatggccacaaaaaagtagtttgagtgttatgaatatttaaaattgtaagataagaaacagtttcttagagcagatagaaaaatgcttatttaaatctttgcatgatttaaaaacagattttccattttcttacaactttaagagaaaagaactgggtttaatggtttaaaaaaaagcacagctttttcaccttcatcttgtataatttcatagattggctgacttagggtctttcaatagtttgggaattgaaagattcttgttatatatagctagtttgggtttgtttttgttttaactattttgaaggttaggtgagatgggcaaataggcttaactattttgaaggttggatgaaaagagatgggtcagtattcctacagaattcttattaactcaaataactaaatttcagaaaattaagaagctgactttatatttggtggtttgaagtatcttgttgttagcatttgtaataatgctaaaaaaggcctaataaaatgcccaagaaaatattcagtgcatttatagagaaggatattttgtagtagtatagtaatgtgttatgtagtacagttttaaagctataaatggaattttgtgtaaattcacaaaaatgtgatataaacaggatctaagactggattccctgtcactaaactgcaccactatacctgtctctctgtgtgggggacactgctgatgattcccaagattgagatgatgacggtgatgacgactgggtgaacagccatcacttcaacattgtgataatccttcacagcaagaaaccgaataaaatactaacatttctaacaactgctctgacattgtaaagagatccaacagaatcactcctgctgaaaaatacgctttctgccacctacacatttctatttaggaagtaaaatttgcttcatggtcatgaccccattagtcagtgttacagctgtgttggggataggaagtatatctggcagattgatatttatacacttttttataaagcagattttaaaatatagtaacatccatttttttcccttgaaagtgattctcttataaaaaatgaaagtggagtttaaggtatatcaaatcgttgtggaaggtgattaaaaatcaaaattcttttaaatatcaacttaattttttctaagtaagatacaaaaaattttcatctaaagtaatatttcactttatattgtaaagaaggtaggtatattggtggctgaggtctcttgaaattgctaaagggaaatttttctatggtaatgctcttacggatataaacctcagttaaatggaattatctatgggatgtgtggttctggttaactaaaaattaaccagtaaacactctgtagtaaccattacagaaaatacttctgccttaaaaaatatgatatgccagagatgagttagtgtttcttgacgttggagaccttttaaatgcctcatctgttgtactgaacaattgaaactgcatgcagccataaaagggacaagaaacagaactgtttactaactttgggacatcccctggagtttttaaaaataaataaatatatatatatataaaaaaaaaaaaaaaaaaaa

SEQ ID NO: 94 - DNA, 2103 bp, Homo sapiens
aaagtccatgggagccggagcgccgggacgccaagcacttcctgccgcgggcggcgcgccgcagctgcccaggccggaccgggccgggcgcccgcagatgagccccgctagggccgccccgcgctgagagcccagccccgccgctgcccgcccgccatgtctcagatgctgcacatcgagatccccaacttcgggaacacagtgctgggctgcctgaacgagcagcgcctgctgggcctctactgcgatgtgtccatcgtggtcaagggccaggccttcaaggcccaccgggcggtgctggccgccagcagcctctacttccgcgacctgttcagcggcaacagcaagagcgccttcgagctgcccggctccgtgccgcccgcctgcttccagcagatcctgtccttctgctacacgggcaggctcaccatgacggccagcgagcagctcgtggtcatgtacacggccggcttcctgcagatccagcacatcgtggagcgcggcaccgacctcatgttcaaggtgagctcgccccactgcgactcgcagaccgctgtgatcgaggacgccggctccgagccccagagcccctgcaaccagctgcagccggccgccgccgccgcggccccctacgtcgtgtccccctcggtgcccatcccgctgctgacccgagtaaagcatgaagccatggagctgccgccggccggcccaggcctggcccccaagcgcccgctggagacggggccccgggacggcgtggcggtggccgcgggggctgcggtggcggcgggcacagcccctctcaaactgccccgtgtctcctactacggggtgcccagcctggccaccctcatccccggcatccagcagatgccctacccccagggggagcggaccagtccaggcgccagcagcctgcccaccaccgacagccccacctcgtaccacaacgaggaggacgaggaggacgacgaggcctacgacaccatggtggaggagcagtacggccagatgtacatcaaggcctccggcagctatgcagtgcaagagaagcctgagccagtgccgctggagagccgctcctgcgtcctcatccgccgcgacctcgtggccctacctgccagcctcatcagccagatcggataccgctgccatcccaagctctactcggaaggggaccccggggagaagctggagctggtggcaggctctggggtctacatcacacgcggccagctgatgaactgccacctgtgtgcaggggtgaagcataaggtcttgctgcggaggctcctggccaccttctttgacaggaacacgctggccaacagctgcgggactggcatccgctcgtccaccagcgaccccagccggaagccgctggacagccgggtcctgaacgctgtgaaattgtactgtcagaacttcgcccccagcttcaaggagagcgagatgaacgtgatcgccgcggacatgtgcaccaacgcccgccgcgttcgcaagcgctggctgcccaagatcaagtccatgctgccggagggcgtggagatgtaccgcacggtcatgggctccgccgccgccagcgtgcccctcgaccccgagttcccgcctgccgcggcacaggtgttcgagcaacgcatctacgccgagcggcggggcgacgccgccaccatcgtggctctgagaactgacgccgtgaatgttgacctgagtgccgccgccaaccccgccttcgacgccggcgaggaggtggacggggctggctcggtcatccaggaggtggccgcccccgagccgctgcccgccgatggccagagccccccacagccctttgagcagggcgggggcggccccagcaggccccagacgccggcggccgcggcccggaggccggagggcacctatgcagggaccttgtaagcggagctgggtggctgcgcgagggaccgagtactagagctgcttgcatgcgttactaatacaaacaaatgtgatcaagccacttacctactgaactgctactgttgcctgagaaaaatgtgatttttattctgcttgtatttaaaattgatgaaggaaaaaaaaaaaaaaaaaaaaaaaaaa

SEQ ID NO: 95 - DNA, 4556 bp, Homo sapiens
tggccgccgcggctgccgctgctgctgaggcggaggccgcggaggccgcggaggcggaggccgaggccccggcgcagcggggcgcgccccgggcccaggcccggccccagccgccgctgcggagcccgccgggaccccccggagcgcggccacggcgcagccgctgccatggcccagacactgcagatggagatcccgaacttcggcaacagcatcctggagtgcctcaatgaacagcggctgcagggcctgtactgtgacgtgtcagtggtggtcaagggccatgccttcaaggcccaccgggccgtgcttgctgccagcagctcctacttccgggacctgttcaacaacagccgcagcgccgtggtggagctgccggcggctgtgcagccccagtctttccagcagatcctcagcttctgctacacgggccggctgagcatgaacgtgggcgaccagttcctgctcatgtacacggctggcttcctgcagatccaggagatcatggagaagggcaccgagttcttcctcaaggtgagctccccgagctgcgactcccagggcctgcatgcggaggaggccccatcgtcggagccccagagccccgtggcgcagacatcgggctggccagcctgtagcaccccgctgcccctcgtgtcgcgggtgaagacggagcagcaggagtcggactccgtgcagtgcatgcccgtggccaagcggctgtgggacagtggccagaaggaggctgggggcggcggcaatggcagccgcaagatggccaagttctccacgccggacctggctgccaaccggcctcaccagcccccgccaccccaacaggctccggtggtggcagcagcccagcccgccgtggctgcgggagcagggcagccagccggtggggtggcagcagcagggggtgtggtgagtgggcccagcacgtcggagcggaccagcccaggcacctcaagcgcctacaccagcgacagccctggctcctaccacaatgaggaggacgaggaggaggatggtggcgaggagggcatggatgagcagtaccggcagatctgcaacatgtacaccatgtacagcatgatgaacgtcggccagacagccgagaaggtggaggccctcccggagcaggtagcccccgagtcccgaaatcgcatccgggttcggcaagacctggcgtctctcccggctgaacttatcaaccagattgggaaccgctgccaccccaagctctacgacgagggcgacccctctgagaagctggagctggtgacaggcaccaacgtgtacatcacaagggcgcagctgatgaactgccacgtcagcgcaggcacgcggcacaaggtcctactgcggcggctcctggcctccttctttgaccggaacacgctggccaacagctgcggcaccggcatccgctcttctaccaacgatccccgtcggaagcccctggacagccgcgtgctccacgctgtcaagtactactgccagaacttcgcccccaacttcaaggagagcgagatgaatgccatcgcggccgacatgtgcaccaacgcccgccgcgtcgtgcgcaagagctggatgcccaaggtcaaggtgctcaaggctgaggatgacgcctacaccaccttcatcagtgaaacgggcaagatcgagccggacatgatgggtgtggagcatggcttcgagaccgccagccacgagggcgaggcgggtccctcggctgaagccctgcagtaacccgcccagcctcccgcggggccacacacttcccctcccaacacacacacacacctgccatcttggtcatgagctactgtctgtccctccccaggacccgcggtgggtgctgcatgttcccggccctctgcccctcctgtcctaccccctttccccaccgagagctgggccgggagaggaccgcagggcaggtggcgtgaggtccgtgttgccttctttaacacacactcgtgcagtgggggagttctggctccccaacctaacccctagccgtcatctccacactcaccaggcccaccaggggagggggctggcctgggggtcttgggaaggcccctccccaggccctaggccacctcgcggaagccttcagcctccgcccctcactgcagccccttgggacttgaggggggccccaggggttctcaggacccctcccaccacctcccagtgcttccacgtctccaaaagcgccttcctgtcaccctcgtctatccctgcgcctgggggctggggtaggcgaggccgtggggactacccattttatagctggggaaacaggctccgagaaattgcacaaccgacctcaggtggccggcagtggcgtgcctggtgccctttctcctcttccgcctctgttgctccctttggtcctctggggcctcagagaggcaggtcctaaaggagggggggtctcctgggggcagaccgagggtctcggaggatagaatgagaggtttccagggctggcagagtgtgtgcgtgtgtgtgtgcagaagttttgctttcaaacaaatgaagatacaagaggcagtaggacctgggttggaacccaggggagcagactggggggctgttgcccctccctccatctccccacacccaccccaccccacagcagggctcctggcccccacccccctgtacataatttttaaaacctttttttagcgaatgaaatattgaagtataagattccttttatttttcaaaccaatggggctgtgtctattgtccccctcggtccccaggggtggggggccttggaaggcagggcggtgttggggggctggggggcaggctgaatgtgtgtgtgtgggtgtgtatgtgtggagtgtgtgtgtgtgtttccatggtaggactccagtcccagctgctgcctaggctcctgtgggtcctgtgggtccccctcccctgttcaccttccccaacagggctatagtttaagggtgtcccaggccttggctggttggctgggcccagctcctgggggctgggcagggcagggcagggccgggtccacttccattgttagcagttgtttgcagaattttctcttttaccattcctctctttttgttctcgcccagagtgggtggttttttgttgttgttttagattttcatgtgaaggcagttttttttcttttttaactccccatccccctatgcagggtgtcatttcaccatccacatccacatccttgtttgtgtttctggccctcgtcctccctgcctctcatctgcctccccaacccccacctacccactgctcccaggggtctctccaggggcagggggattttaggagatggggtgggggccagcccctactggacccttgtaatctgatttggagaccatccccccgatgggaccagcagccccgccggcccactgggggtccctcttaacatctgcttgttgcgggggtcagtcatgagtgccagggtctggctggggtcttggcactgtcttcctggccggggcctgaaaccttagcccccagccggcctgagtgggggatattgacacccccagctaaagcacaagcaccttagtcacccctcctctccccccgcctcctggcctgccaccccaccccagcgtttaccccaaagcacaatgccctggtcacttggcaagcggctgggcctgacggaggccgaggggcagaccggggctccagccagacccctgaaaggaaggtgctcccccacttccaggccttagttggggtgggggggccagctcctgggcctggggtcttctcacccccacccccttgtcctgggtaggcccctgcctgcccctctctgccttttcctcgggtgtccctcctcgagcccctgtggcattggcttgggtggcagagcccacttgtttcagggaccccaggaggtgccccctggctcccaggactgtgtgtgggtccggggggtgggggggtggggagaagggtcgggcagggggtgcaggggaggaaactcctcaccaggagagccaaagacagggttgtgccttaccccaggagccacccctgtaccccccttgccctgccattcaccctccacccctacccctgggcggcctgctgctttttccttctcttcctcccctgccctgagctgcatggttcccccaccctgggcagccaggaaggaatctgaatggagaatcaccaaccaccagagaaaaaagactgtggggccctcccctgccaactccccttccctggccgcccactcaacccacacctctttcacgcaggacaggctgcccaccctgtccacgtgaagtgccaacgccctccccaccctgggccgagcccccacccctccctgggcccccaagtgagattgcacatttaactactgtaaggagaggagcggcgttggcaaatgtgaaccatgagaatatcagtgatactgatgagaataaactaaacgcctttgtaacaaaaaaaaaaaaaaaaaaaaaaaaaaaaaaaaaaaaaaaaaaaaaaaaaaaaaaaaaaaaaaaaaa

SEQ ID NO: 96 - DNA, 2656 bp, Homo sapiens
atggcggcgggtgggagcggcgggcgtgcgtcgtgcccgccgggggtcggggtcggcccgggcacggggggcagtcccgggcccagcgccaacgccgccgccaccccggcccccggcaacgcggccgccgccgccgccgccgccgccgccgccgccgccgcccctgggccgacgccgcccgccccgccgggccccgggacagacgcgcaggccgcgggcgcggagcgggcggaggaggcggcgggcccgggggcggcggcgctgcagcgcgaggccgcgtacaactggcaggccagcaagcccaccgtgcaggagcgcttcgccttcctcttcaacaacgaggtgctgtgcgacgtgcacttcctggtgggcaaggggctcagctcgcagcgcatccccgcgcacaggttcgtgctggccgtgggcagcgccgtctttgatgccatgttcaacgggggaatggccacaacatccacggagattgagctgcccgacgtggaacccgctgccttcctcgcactgctcaagtttctctactcggacgaggtgcagattggcccggagacggtgatgaccacgctatacaccgccaagaagtacgcggtgccagcgctcgaggcccattgcgtggagttcctgaagaagaacctgcgagccgacaacgccttcatgctgctcacgcaggcgcgactcttcgatgaaccgcagctggccagcctgtgcctggagaacatcgacaaaaacactgcagacgccatcaccgcggagggcttcaccgacattgacctggacacgctggtggctgtcctggagcgcgacacactgggcatccgtgaggtgcggctgttcaatgccgttgtccgctggtccgaggccgagtgtcagcggcagcagctgcaggtgacgccagagaacaggcggaaggttctgggcaaggccctgggcctcattcgcttcccgctcatgaccatcgaggagttcgctgcaggtcccgcacagtcgggcatcctggtggaccgcgaggtggtcagcctcttcctgcacttcaccgtcaaccccaagccacgagtggagttcattgaccggccccgctgctgcctgcgtgggaaggagtgcagcatcaaccgcttccagcaggtggagagtcgctggggctacagcgggaccagtgaccgcatcaggttctcagtcaacaagcgcatcttcgtggtgggatttgggctgtatggatccatccacgggcccaccgactaccaagtgaacatccagattattcacaccgatagcaacaccgtcttgggccagaacgacacgggcttcagctgcgacggctcagccagcaccttccgcgtcatgttcaaggagccggtggaggtgctgcccaacgtcaactacacggcctgtgccacgctcaagggcccagactcccactacggcaccaaaggcctgcgcaaggtgacacacgagtcgcccaccacgggcgccaagacctgcttcaccttttgctacgcggccgggaacaacaatggcacatccgtggaggacggccagatccccgaggtcatcttctacacctaggctgcccgacaccgacaccgccctccctccgtggggatagccgcagccccaggccatcatctgctgctggggcccccccaccacgcggtgccaggcccagtgtcccccaggccgtctgtccactccatgccacctttctcagcatcaggacggggttgccctgtgttcaccacgagtgtggctgctggatcagggcagccggggaggtggccaggccagtggccaggccctgtggagacaatccctcaggactagggacagggctgtgccggcctgggccagggcccacggacccgcagctcagggcgcctgcccacgtcgtctgccggcggtgcgccgcgggcgtccctcgcgtctcttcactgcacattgcaatgcatttgcgattcccatttctctgctaggagccagcctgggtggcgctgctcccagagccgtgggtcccagaccttgcgttccttttgttcctgtccgtttatcaggacacgggccccacctgtcacgtgcccgaggccacccaagcccagcctgcggggcgttcccactgcctggatgccggcttgagttctgcgcacgcaggattcagtgtggggacggcccctgccggataggcctagccctggcccaggtggtgagcggtttgcagtgtccgttctcatccacctgatgggcccagataaaggcccccgctgtccagcctccctggacggccctcgcggtccctgcagcccaagatgggactcagaccctgtgccccagagctcccctgccgcagaatggggccccagccggccccgaccgggtccaggagcactgctcgcctgtacatactgttgccctagcccacctggtgccgtgggagccacccccaggtgctgggggcacagcccctccccactccggccacgcccccacccaccccgcgtgtttctgccctgtgactcctggaacctgcgtcctccccaaagccatgggaggggtgtcctcctcagaccatgcccccagatgatttttttaaataaagaaacaaatgcacctgcaaaaaaaaaaaaaaaaaaaaaaaaaaaaaaaaaaaaaa

SEQ ID NO: 97 - DNA, 4857 bp, Homo sapiens
cagactcacgcagctccagcccatcttgctgacctaattcagaaaagaagtgctacagctctgtgcctgtcatctttgcagtgtagcattttcaggtgatctaggaaacagttatttttatgagcaaataagagaaacaggaatcatgatggggatatatttaacagacccagtactggataaaacttaaagccagtttctattcaacatagtgaaaaggtcaccttgcctggctgagaaaagcagcaaaatatcagctttgttggtttcagttaacctcttagcccgggctaatctcttttccttgatgttcaaaccaatttgggatatctaactctaaagagagacacactgtactcatggtagatgacaaggaaaagaacatgaaatgtctcaccttcttcttgatgcttccagagacggtaaagaacaggtccaagaaaagctcaaagaaagcaaataccagcagcagcagtagcaacagcagcaagttgccaccagtttgttatgaaataattaccttgaagactaaaaagaagaagatggctgctgatatattcccccgtaaaaagccagccaactccagcagcaccagcgtccagcagtaccaccagcagaatctcagtaacaacaaccttatcccggccccaaactggcagggtctttatcccaccattagagagagaaatgcgatgatgttcaataatgatttgatggcagatgtacattttgtggttgggccaccaggtgggactcaacggttgccaggacacaaatatgttttagctgttgggagctctgtgttccatgcgatgttttacggagaacttgcagaggacaaagatgaaatccgtataccagatgtcgaacctgctgcttttctcgctatgctgaaatatatctattgtgatgaaattgacttggctgctgacacagtgctggccacactttatgctgccaaaaagtacattgtccctcaccttgccagagcctgtgttaatttcctggagaccagcctgagtgccaagaatgcctgtgtgctcctctcccagagctgcctgttcgaggagccagacctgacccagcgttgctgggaggtgattgatgcccaggctgagttagctctcaagtctgagggattctgcgatattgacttccagacactagaaagtattctccgtagggaaactctgaatgccaaagaaattgtggtttttgaggcagctctcaactgggctgaagtagaatgccaacgacaagatctggcgttgagcattgaaaataaacgcaaggttctaggaaaggcactttacttgatccgcatacccacaatggccctcgatgattttgcaaatggtgctgcacagtccggggtattaactctcaatgagaccaacgacatcttcctctggtatactgcagccaaaaagcctgagcttcagtttgtgagtaaagcccgtaagggccttgtcccccagcgctgtcaccgtttccagtcgtgtgcctatcgaagcaaccaatggcgctatcgtggtcgctgtgacagcatccagtttgcagttgataaaagagtgttcattgctggctttgggctgtatggctccagctgtggttctgcagaatacagtgccaagattgaacttaagcggcagggcgttgtcctggggcagaacttgagcaagtacttctcagatgggtccagcaatacctttcccgtatggtttgaatacccagtgcagatcgagccagacaccttctacacagccagtgtgatactggatggcaatgaactcagctactttggacaagaaggcatgacagaagttcagtgtggcaaagtgactgtccagtttcagtgctcctcagatagcaccaatggcactggggtacagggagggcagatccctgaacttatattctatgcttgaaaactcacttcctgaagcagcttgagctccaaagtgcacatctggttccaacttgcctgatgcttagctcatctgcaaatatgtgatcagtgccggtaatttgtaatgaatgaagcggtaggcaggttctaatttcttttaaccttttaattatgtacaggcaaaaatgcagcattccgcttttaactatctgcttaaaagagctaacgttcttattaaggctttgtggtttttagagttgcatctatgaacctggggagattatgtgctttcccaagcgttccaccaccctctcagttttgtccctctgaagataattttggatcaccttgaatttccttttggacgttatttgatgaacagaaataaattgataacaagagttatttttaaacagaactcctcttaccccccaaaacagataaacctcagtgtacaattttgaaagaagttttgccttgtaatgagtaataatttagaaagtagacagtggttgtgtttggctctcgttttattccttttacatttgttgcttctgggatttaaaaaattactaaattcataagatagttaggtattaaacacttcagaatatcaatgtaaaattggaaaataaggaactgggggcatttgtttaggccatgacttctacaagcagatttcttttcttttagtttagaagacaaaaaatttcaatacagatacttcttttagaagtaaatttttagattttattgtcagtagaaaaaagttaaactcctactaatttaaactaagacagtttaaaaaggaagcctgaaaaagactcatactacaaataatttaattgatggcatataagaatatgcagtttgaaaaagccaaactcttctctccacttagcttttgatccccactgtttgcttatttgtataagtcatactgtgtagaatttctattttctttttccccattaaaagaggaccaaacaattctttatacaaatggagtagcaactagttttgtagcactacatttaatgtaatgagatacctttgttcatttttttaaatttgaaatatactttacctgatccactttgattgtatactatattctttgttaattttaattttgtcctgttcctagactgctagaatctggcccctggccatcttaaagtgccaacatatgcctgcagggtttataaaaaatggcctggagtgacacattttattatacctaatattcactgcatcagtatcacatctagctcccttacttgtccacagataatgtaaacaaaggagggaaaaacttattaaattctccttcgctgctggcttgtgctggtttagtgcctgtgtccctggcagtgtccagtgtgttcacttccagttgaagtatccatgtgtttctgggcagcttttctgctcagtgtgatcctgagatggcttccccgccgccacccagagtgtggtccttggccgcctcctgctcctgctctgcaagcctgaaactggcttgtctggagccaggagttagtcctggggtgtgtgtgtgcctgcgcacccatgcgcatgcaagtgtgtttgccagctcaggagctgtctcctctctacctggctagtaagaggtgggacagtaatggtcctcctgctggccccagcaaggcccatgagtgactgccctgacgtattcactgtgcctctgggccacttcttcccctgtagatgtgggcttgttgccttcagccggcttccctgagggaggagaacactggattattggaaatgttttaatcactcttgccattacctacatctattagcatagatgatgaaaagctgttactggtgattatagatgagtatttccaggacaacattctaaaagtacaattatttcttattggggagattacaggtagtttggcaaagcattgaagtacaaaggtacattttcaattaaaaagcacacttctacaaaagatttggtttttaaattatggttacacatttcagtaactcatagctgctgtgcaaattggtagaccttataagaaggcacttgtttgtaagccagagaagaaactttaattgcatcctatcagattgttgaggtgggtgtgatagtcttcaggtgcagtgcgttcattcactaacgctcactgtcagtgcccatgtttgctagctgcctccatgtgactagtgagctgctggtgaaagtcgtgtgaaatcctgtacactgtgtatagaacaatgtaattttatgttaattgttattactttaaaacatatctaccatctgattggctggtaccgagagctgtgggtaaaatttgaaaattgtatttagaataagaaattttacattttaaaccctattgtcctttatgcattttcaatgaaatggaatgaaggctaatatgcttgctttatttacttttgtaatcttggattttgtagcttttaaaactagaaaccattgttctaacaaagcaggcaactttattctataaacacaactttattaagcagaatacactgtagatgcttttccccaacgtatctggctggcagtctttgtcgttgttcattctggggataaaggggaactaggctagcagttctaatgtgacattctttaagcatatcttaaaatagtatttaagtaaatggtctaatttctacataattattgcactgaacttttttgtttattaaggtgtttaaataagctcagctaattcaagacactgtagtcacttgtgcatcagtgtgcttgaatttagtagcttacagcattatttatgaaggaaaaaatacataaatatgaagtacctcatgttgaatgttattgtactgtatttttaatgtaacagtgcagatcttgttagacacatgaatgtgtataatcatgttaaatgcaaataaaactagttcataga

SEQ ID NO: 98 - DNA, 2217 bp, Homo sapiens
tttagcttgtgctcaagtcctcttgctgtgttttcagaagcactcacatgttctttcttttcctgagtgaaaagcaaaggtcccacggtgtgtgctgtggtgcaccgcctggctttgggggtcccggaggcaggctgcctagactcacagcctcgggaccgttgccacggcctgtcttctcgttcaggcctgcctctgacagcactcaccatgaggacattccatccttcaccccctcctctggcacaggccaccactgcggtgctgtgccttcagatgggaggtgggcgcggtggccgcctccttccctccaggacctgcccgtgtgaagaccccccggagtgctgagcttcagggctgcgtggaaagagtttttactctctttttctagcctgtataccaggcttttccccacattgtcaggtagagcaccagcttccctgaccgctgctgctcggggagggctggggctggccgggggtcctgtggaggagtacatggaggactccaggtacagcgcaggagtcacggcttttgttttttgacattggcccccggttctaccaatgacagggtgccctggctggagctgtcatcacacacacccctcagctcggaggctgtgggctcctcaaagctggagaaagaggccaagatttttctgcacacggagtgtggggataggagccgggccaagcgctggcccctcagcggtgagccctgcccactcttaccgagcaaggtgggtggctctggcacgagtcccccagggggagagcatggctaccagggagctgcagcggagccctccagccctcaccccaggccagccccaccccggcctctttgagaattctcagaactttgtacctttcccctgatttttaaaccctttttctaaacagactgactttcttacaaaatgcatttggaaaccagacctttgctacccaccaatgtctctgggttttgtaccagtccctgctctcaggccaccctgcccaggacccgggcccgcctccccctccacactcaggatgtcctgctccatctggccggctcactccgtgtggcctgcctttgctgaccgttttggggttccccgccggagctacaggggcattttcttccctaaaaccaacagtgtcccactgacctccccaagtgtttgctgcgtggcagatttcctgttcttgttcgcagtttgccgactgaagagtgtgggatttccgaggcccaggtgagcacgtccatctcaggaggcgtggagggaaaagacatgtcatgaagggttttttttatgtgactgatttttttttaaatcgatgttcaaactaataaatatttttttatgaagaggaaaaatgtgtagattacatttcacattttgtatttttgtttgtgtctgtttgtattttggtgtttacaacaccaaagtgggaaatacagtccattggggatggtgttatttgggggcggggagggggcagggacaccacgatttttctgtcaagctctggatcctgaccaggttgtacactggggctctctgagctttgggacacaggacactgccagggctacgtagagaactgactcagaagacgcagcttactgcttccaactttgcacatcttcctctttaaaaaactgagaaaatgcaaaaactggaactttttgcaatattataaaagaagtaatcttattttagctcattctgtgacatgtgcgactcttaagaaagccatacttaatggtggtggttttttttagatcttatattgtgttttgtatgcagcccttttagaactacttgtagtgagggtgctgtgtgtgcttttcttaaatatttatttttttcaacatgctttcaacctgtcaacaaaaacaaaacacacaaaaaaagggcagtgtttgaagattgttgatttttttctggggataatctatattatattgacttcctattacttattataaacctgtgtttgtattggagatgtgtctactattgggggaagaggttctcgtaatcgctcggtgggaaatcatggctctgccgtcctgcctctctgtggccgtgggttcacgtggcctctgcggtgagtctccaagtttctgcctaggcgcctgtgcgtttcctttctgtgacgggattagcttagacatccttgcaaagcgatcactttcaataaattgggaaattgctgctccagc

SEQ ID NO: 99 - DNA, 590 bp, Homo sapiens
ctttatctttgatatttcctatttttaaaaaaacttatctgtgaattgatttaatgattgtgtatataaatctgccaaaattatttcaatggatgaaacaatgaatcagtacctatttatatgctgccaaggcacacctataattttttaaatgatgataagagtagcctaaagcagtgagcagacatctcagaaatttcagtgtaagtggttttaacttgcaacatgatgccaaaaaacttagaacagggagctgccatcttgcatccccgtgtgtgtgcacctaatctcagctggttccccccagaccccctgagcaccaaccctagtcccccgcgcagccccttatccgctgcgacaagatgaaagaaacaatcatgaaccaggaaaaactcgccaaactgcaggcaaaagtgcccattggtggaactgctcacagaaagaaggtggttcacagaacagccacagcaaatgataaaaaacgtcagttctccttaaagaagttagaaatctctggcattgaagaggtgaatatgtttacaaaccaagcaacagtgatccgttgacctgcaggtgacctcgaggggggg

SEQ ID NO: 100 - DNA, 444 bp, Homo sapiens
  modified_base (417)..(417): a, c, t, g, unknown or other
  modified_base (440)..(440): a, c, t, g, unknown or other
ctttgagtttcagcaaatgtctttaggttgaaggaattacctatgtcatgaaggacctgtctgtggtttttcaatggagtctttaagcatgatcttttttctgtctagtacttgttttcattctggccagcagttctacattaaatcaccttgtcaagggctctgtttacatctatacattttgaagatgaaatttttagccttaaagtttatattctcaagtccttttacaatcagtgtgtctcctgaactagcacacaggctgtagaaacagtcttagaaatcattgaaagatttgattatgaaagaatagcaaaattatatttcttgacatataaaaagttggtttaatgcctttatttccctttaaggaccagaaccaggaatactatatcgaaaaattagtctgtggatttnacactgacttagcatatagcttnaagt

SEQ ID NO: 101 - DNA, 2965 bp, Homo sapiens
gggcatggagagatggcgcaactgcggcgcggacactcgacattcagggacgtggccatagaattctctcaggaggagtggaaatgcctggaccctgtgcagaaggctttatacagggatgtgatgttggagaactacaggaacctggtctccctgggaatctgtcttcctgacctgagtattatctccatgatgaagcaaaggacagagccctggactgtggagaatgaaatgaaagtagcaaaaaatccagataggtgggaaggtatcaaagatatcaacacagggaggagctgtgcagtgagaagcaaagcaggaaacaagcctattacaaatcaacttggattaacctttcagttacctctgccagaactggagatatttcaaggtgaagggaagatttatgaatgtaatcaagttcaaaagttcatcagccacagttcttcagtttcgccacttcaaagaatttactctggggtcaaaacccacatatttaataaacataggaatgactttgttgattttccattgctgtcacaagaacagaaagcacacattaggagaaaaccttacgaatgtaatgagcagggcaaagtcttcagagtgtcttcaagccttcctaatcatcaagtaatccacactgcagataaacctaacagatgtcatgaatgcggtaaaaccgtcagggacaagtcaggcctcgcagaacattggagaattcgtacaggagagaaaccttacaaatgtaaagagtgtggcaagctcttcaatcgaattgcataccttgcacgacacgagaaagtgcatactggagagagtccttacaaatgtaatgagtgtggcaaggtcttcagtcgaattacataccttgtacgacatcagaaaattcatactagagagaaacctcataaatgtaacaaatgtggcaaggtttatagtagcagttcatacctagcacaacattggagaattcatacaggagagaaactttacaaatgtaataaatgtggcaaagaatttagtgggcattcaagcctcaccacccatctgttaatccacactggagagaaaccttacaaatgtaaagaatgtgacaaagcttttaggcacaagttctccctgacagttcatcagagaaatcataatggagagaaaccttataaatgtcatgaatgtggcaaagtcttcactcaagtttcacatcttgcacgacatcagaaaattcacactggagagaaaccttacaaatgtaatgagtgtggcaaagtcttcactcagaattcacaccttgcaaatcatcagagaatccacactggagagaaaccttacaaatgccatgtgtgtggtaaggtctttaggcacagttcatggtttgtacagcatcagagaagtgttcatgagagagtccttacaaactgagtttggcaaactctatcataagttctagcagtaatcaacatccgagagtctatactagaaagaaatcatttaaatgtactatatgtggcacaggctgtatcgagacctaccaaatcactagacatcgaaacattcatccttggtgaaaccacacaaatggattgtgtgtgccaaggccaacaagtcaaaatatgttgaacctaatgatatgatgtgtataaagggtgcaaggacacgtggaaatgatctgtaatattcgggttattaaaaatgtaattggctgggcgcagtggctcacacctgtaatcctagcactttgggaggttgaggcaggtggatcacaaggtcaggagtttgagaccagcctggccaatatggtgaaacaccatatctactataaatacaaaaaaattagccaggcgtggtggcacatgcctgcaatcccagctactcgggaggctgaggcaggagaattgcttgaatccaggaggcagaggttgttgcagtgagctgagatcgcgccactgcactccaacctgggtgacagagcgagactccgtctcaaaaaaaaaaaaaaaaaattatttgggtttgaaaggccaggggcagtggttcatgcctataatctcagcacaatagaaagccaagacaggagggtcacttgatgcctggagatcaagataagtatgggcaacgtagcaaggcccatccctacaaaataaaaaaaataagccaggcccttggcatgtgtctgtagttccagctactcaagaggccgaggcaagaggattgctcaagcccaggagtttgagagtttgagcagtgagctctgatcttgccatttgtactccagcttgggtgacagagcgagaccctgtctcaaaagaaaaaaaaggctagtttttatgacttcaacctgaactttgaaatttcttcatgtgccttccctacaggcctttcactgtggtctgggaaagaatcagtaagatgacagggctgacttcattagatgaggagcgtttctatccagtttcctggaggaataaggacactgccttttcagattaaagattgtctgatttagagaccatggaggtggacagagaataacaaaaccgtgatggcagtcatcatgcttattgcagttagcacacacttttcctgacaggcacagtgctgctgtgctctacaaatgaccatgaaatagagcacgccatgactttaggacacagggatttttatgggaagagagttcatcagggactgattacgtaggagagacgatgcaggggaaatggtggccaccgtctccattgaatagcaatagctgctgtttagcaaagactgattaaaaagtactctgatttttcaaatggaagagagaacagttaaatcagagtagagagtttaatcaaaactaccagtggaacatgttcttgagtaggattcacatttaactgctggcataatttgcaactgttggattttctcatgtttggaacaataaagttgaaattttccaaagtgaaaaaaaaaaaaaaaaaaa

SEQ ID NO: 102 - DNA, 3249 bp, Homo sapiens
cagttgcgcccggcagcgacgggaaacgtctctgaattaggtgttccgctcgcctcttgtgcggtgtggagctgcgcgccccccgccgaggcgggcccaggtgccttctccaagagaggcagcagggagggagaaatggcaaggaggttgctgccagcccatgtacaggagtccgtgacgttcagggatgtggccgtgttcttcagccaggacgagtggttgcacctggactctgcccagagagccttgtaccgggaggtgatgctggagaactacagcatcctggtctcactggggattctcttttccaagccaaaggtcatctcccagttagagcaaggagaagacccctggatggtggagagtggagttccccaaggcgcacatctcggatgggaaagcttgtttggaaccatagtttctaaagaagaaaatcaggaagtcatgaaaaaactcataattgatggcacatttgacttcaagttggagaagacctacataaatgaagataagttagagaagcaacaaggcaaaaagaacagacttttcagtaaagtgttagttaccatcaaaaaagtctacatgaaggagaggagctttaaaggtgttgaatttgggaaaaatcttggtctaaaatcatcgcttattagaaaaccgagaatagtttccagaggaaggagaccccgttcacagcagtattcagttctctttaaacaactgggggtcaacacagtgcgtaaatgttataaatgtaatatctgtgggaaagtcttcctccacagttcctccctgagtaaacaccagagaatccacactggagagaagctctataaatgtaaggaatgtaggaaagccttcagccaaagctcatccctaactcagcacttgagggttcatacaggagagaaaccttatatatgtagtgaatgtggaaaagccttcagtttcaccacatctcttattggacaccagagaatgcatactggagagagaccttataaatgcaaggaatgtggaaaaacatttaaaggtagttcatctcttaataatcaccagcgaattcacacaggagagaagccctataagtgtaatgaatgtgggagggccttcagtcagtgctcatctctcattcagcaccacagaattcatactggggagaaaccgtatgaatgtactcactgtgggaaagccttcacttcaatatcgcggctaagtaggcaccatcgaattcatactggagagaaaccctttcattgtaacgagtgtggaaaagtattcagctatcactcagcccttatcatacatcagagaattcacactggtgagaaaccatatgcatgcaaagaatgtgggaaagccttcagccaaagctcagctctcatacaacatcaaagaattcacactggagaaaaaccctacaaatgtaatgaatgtgggaaagccttctcttggatttcacggcttaatatacatcacagaattcacactggagagaaaccatataattgtaaggaatgtggaaaagccttcagttcccactcaggcgttaatactcatcgaaaaattcatactggagaaaaaccttataaatgtaatgactgtgagaaagccttcaaccaaagctcagctctaattcagcaccagagaattcatactggagagaaaccatataattgtaaagtgtgtgggaaagccttcagacagagttcatcccttatgacacacatgagaattcatacaggggaaaaaccttataaatgtaaagaatgtgggaaggcttttagtcagagctcatctcttactaatcatcaaaggactcataattgagaaaaactgtataaatgcatgtaggaactgaagttatattccatactgagtatcaaaaaattcattgtggggagaaagtgatgaagagtagttaatcataggtaaaacttcagcattagacctcatcacacatcagagacttcatgatgcagggtaaccttgggaatgctagaaaagcttctataaaatgtttattcatatgttcttaagttattaccatgaaatggagaatttttaagattgcagggttagtatttgattgtctagtgatgtacgataacagccaccagctttcctgagcatcactgggaagcctgctgtttatgtacaagtacagccataaaatccagacacagataaatctaggaatctattttttgaaactattatgcaagccagtggtactagaaagaatgttttagaaaagaaatatgtacaggtgacccatagctacctcactgtcactaaaatgttttttaataatcttaaagcagattctgcacttcatggtaaagactttgaattgtttctctgctttctaagccattcacctgagaagaaaatcactccataaactatgcagacgtactgtctttgcgttttcttcctacttgttccaaactctgagtcagatctaaagtcactttaagtcacagaacgcatggtatttcacttgtttttctcattaaaagtgattacctttgctgtattaaattgataagtaaaggtcattcagacaaccactgcttttgcaatttactgaaaaatgttataaattatctcagaatgtagccaatagcaagcacagctcagctcccagggtctgcctgcttctgtgagccttctggttaccagccaccagaaggcccaggaacaatgtagaactcaggtcatcatccttggaggtaaaatgaaccagatgattttcacccttacttccactttttcaccttcatcagacaaggttcactttctccccacactctaaaggtcactgggcaaatatttaggctctgagttcagatactctttcttccagcaaatggacttacactcttcaacaagtgatttagctcatttcagcatttctaaaatgtgaatcataagattagcaagctaaaaacagttatctcacaagtcaaaattgttgggctttacagaggctaacatctagtttagccaagtttatcaggagggggcaagcacttaagggctgaaacgacccatttcataaagtgctaagtttttctgccaaggaactttaaaaaatagaaaactggctgggtgcagtggctcacgcctgtaatcccggcactttgggaggccaagacgggcagatcatgaggtcaggagatcgagaccatcctggctaacatggtgaaaccacgtctccactaaaaatacaaaaaaaaaaaaaaaaaa

SEQ ID NO: 103 - DNA, 1554 bp, Homo sapiens
ggggagggggcagtgtcctccgagccaggacaggcatgttgttgggactggcggccatggagctgaaggtgtgggtggatggcatccagcgtgtggtctgtggggtctcagagcagaccacctgccaggaagtggtcatcgcactagcccaagcaataggccagactggccgctttgtgcttgtgcagcggcttcgggagaaggagcggcagttgctgccacaagagtgtccagtgggcgcccaggccacctgcggacagtttgccagcgatgtccagtttgtcctgaggcgcacagggcccagcctagctgggaggccctcctcagacagctgtccacccccggaacgctgcctaattcgtgccagcctccctgtaaagccacgggctgcgctgggctgtgagccccgcaaaacactgacccccgagccagcccccagcctctcacgccctgggcctgcggcccctgtgacacccacaccaggctgctgcacagacctgcggggcctggagctcagggtgcagaggaatgctgaggagctgggccatgaggccttctgggagcaagagctgcgccgggagcaggcccgggagcgagagggacaggcacgcctgcaggcactaagtgcggccactgctgagcatgccgcccggctgcaggccctggacgctcaggcccgtgccctggaggctgagctgcagctggcagcggaggcccctgggcccccctcacctatggcatctgccactgagcgcctgcaccaggacctggctgttcaggagcggcagagtgcggaggtgcagggcagcctggctctggtgagccgggccctggaggcagcagagcgagccttgcaggctcaggctcaggagctggaggagctgaaccgagagctccgtcagtgcaacctgcagcagttcatccagcagaccggggctgcgctgccaccgcccccacggcctgacaggggccctcctggcactcagggccctctgcctccagccagagaggagtccctcctgggcgctccctctgagtcccatgctggtgcccagcctaggccccgaggtggcccccatgacgcagaactcctggaggtagcagcagctcctgccccagagtggtgtcctctggcagcccagccccaggctctgtgacagcctagtgagggctgcaagaccatcctgcccggaccacagaaggagagttggcggtcacagagggctcctctgccaggcagtgggaagccctgggtttggcctcaggagctgggggtgcagtgggggactgccctagtccttgccaggtcgccagcaccctggagaagcatggggcgtagccagctcggaacttgccaggccccaaaggccacgactgcctgttggggacaggagatgcatggacagtgtgctcaagctgtgggcatgtgcttgcctgcgggagaggtccttcactgtgtgtacacagcaagagcatgtgtgtgccacttcccctaccccaacgtgaaaacctcaataaactgcccgaagcagcttgaaaaaaaaaaaaaaaaaa

SEQ ID NO: 104 - DNA, 5745 bp, Homo sapiens
cacagggcctgcagagaggggacccaccgggcaggatgcactggcttccagcaggccacgacatcaacggtgccctggagccctccaacatagacaccagcatcctggaggagtacatcagcaaggaggatgcctccgacctctgcttccctgacatctctgctccagccagctcggcctcctactcccacgggcagcctgcgatgcctggctccagcggggtccaccacctgagcccccctgggggtggaccctccccggggcgccatggtcccctcccacccccgggctacggcaccccgctgaactgcaacaacaacaacggcatgggcgctgcccccaagcccttcccggggggcaccgggccccccatcaaggctgagcccaaggctccctatgccccaggcacactgccggactctcccccagactcgggctccgaggcctactccccccagcaggtgaatgagccccacctcctgcgcacgataacccctgagacactgtgccacgtgggagtgccctcccgcctggagcatccgcccccacctccagcccacttgccaggccccccgccacccccaccacccccacctcactaccctgtcctgcagcgggatctgtacatgaaggccgagcccccgatcccccactacgctgccatggggcaggggctggtgcccactgatcttcaccacacccagcagtcccagatgctgcaccagctcctgcagcagcacggagctgagctccctacacacccctccaagaagaggaagcactctgaatccccccccagcaccctcaatgcccagatgctgaatggaatgatcaaacaggagcctgggaccgtgacagccctgcctctgcaccccactcgagccccatcgccaccctggcctccccagggtccgctctccccgggccctggttccttgcctctcagcattgcccgtgtccagacaccgccttggcacccgccaggtgccccctccccaggcctcctgcaggacagtgacagcctcagtggctcctacctggaccccaactaccagtccatcaagtggcagcctcatcagcagaacaagtgggcgaccctgtacgatgctaactacaaggagctgcccatgctcacctaccgcgtggatgcggacaagggcttcaacttttcggtgggcgacgacgcctttgtgtgccagaagaagaaccacttccaggtgacagtgtacatcggcatgctgggcgagcccaagtacgtcaagacgcccgagggcctcaagcccctcgactgcttctatctgaagctgcacggagtgaagctggaggccctgaaccagtccattaacatcgagcagtcccagtcagaccggagcaagcggcccttcaacccggtcacggtcaatctgccccctgagcaggtcacgaaggtgactgtggggcggctgcacttcagcgagaccaccgctaacaacatgcgtaagaagggcaagcccaacccggaccagaggtacttcatgctggtggtggccctccaggctcatgcacagaaccagaactacacgctggccgcccagatctcagagcgcatcattgtgcgggcctccaacccaggccagttcgagagcgacagcgatgtgttgtggcagcgggcacaggtgcccgacaccgtcttccaccacggccgcgtgggcatcaacacagaccggccggatgaggcgctggttgtgcacgggaatgtcaaggtcatgggctcgcttatgcacccctccgacctgcgcgccaaggaacacgtgcaggaggtggacaccaccgagcaattgaagaggatctcgcgcatgcggctggtgcactacagatacaagcccgagttcgccgccagcgcgggcatcgaggccaccgcgccagagacaggtgtcatcgctcaggaggtgaaggagatcttgcctgaggctgtgaaagacaccggagacatggtctttgccaatgggaaaaccatagagaacttcctggtggtgaacaaggagcgcatcttcatggagaacgtaggggccgtgaaggagctgtgcaagctgacagacaacctggagacgcgcattgatgagctggagcgctggagccacaagctggccaagctgcggcggctcgacagcctcaagtccaccggcagctcgggcgccttcagccatgcagggagccagttcagtcgggcgggcagcgtcccccacaagaagaggccccccaaggtggccagcaagtcatcgtccgtggttccggaccaggcctgcatcagccagcgcttcctgcagggaaccatcattgccctggtggtggtcatggccttcagcgtggtgtccatgtccacactgtacgtgctgagcctgcgcacagaggaggacctggtagacactgatggcaggtccagccagagctttgggaccacgcagctccgacagtcccccttgaccacggggctaccaggcatacagccctctttgctgctggtgaccaccagcctcaccagctcggccccaggttctgctgtccgcaccttggacatgtgttccagccacccctgccctgtcatctgctgttcctcacccactaccaaccctaccactggtcctagtcttggccccagctttaaccctggccatgttctcagcccaagtcccagccccagcaccaaccgctcaggccccagccagatggcccttctgccagtcaccaacatcagagccaagtcctggggtctttcagtcaatggcattggccactccaagcatcacaagagtctggagcctctggccagccctgcagtccccttccctggggggcagggcaaagccaagaacagtcccagccttggtttccatggccgggcccgccgaggggccctccagtccagcgtgggccctgctgagcccacctgggcccagggccagtcagagccagtgccctccctgacctccatccaggtgctggagaattcgatgtccatcacctcccagtactgtgctccaggggatgcctgcaggcctgggaacttcacctaccacatccctgtcagtagtggcaccccactgcacctcagcctgactctgcagatgaactcctcctcccccgtgtctgtggtgctgtgcagcctgaggtcaaaggaggaaccatgtgaggaggggagccttccacagagtctccacacccaccaggacacccagggcacctctcaccggtggccaataaccatcctgtccttccgtgaattcacctaccacttccgggtggcactgctgggtcaggccaactgcagttcagaggctctcgcccagccagccacagactaccacttccacttctaccgcctgtgtgactgagctgccctcctgaggcagcaccacaccagggaccaggggtgcccaggcaccccccaacactggatgcaatggtgttacactggagcccgctgcaggccagctctgctgttcactggccctacccgagactggtgaaactggaagtcttcacactggagttgctgttccagctggtcgcccctcacggcacagagggaacctgagagccagagacttcttgggccttcctgcctgccaccccctaggggccaggacaggaccagtttacctctttccagatatggtggttggagggctggttcaggtgccctggagggaaggggaagcctgtggccctgatttgttcagagcccattctcccttgcctccccttttgagactggagccaacccttttggagagaggacctgcccacctttgagatcagcagggggctcggatccagccctaagagacttgggtggacccccatgagtcaatggagggcagacggctctcccccttaaagctgttccctgggggatggcttggtagtggactttctggggtttgcctgttacgccagactcggacttctaagctttaagtgtggcccaggaggtttcttctccctgggagggcttggctcccaagaagtcccagggcagccgaggccagccctgcctgggttggagaaactgactttgtgccttaagtctactcagtgcctggtgaagccaccctcagcccttcacaggcctgaaccagtaggggccagtgggccaggtaagccctagagccttgaaccaggaatatccaggaagaggaaattccctttgagcccccagatggtattgcagcttcactgcctgcgttcctgggagcgtctggagctcacagtgatcagtgaccacatcattctctctgagcagaggagcaggaatccctcaagcagcagcctggtcttggctggtgggcagatgcaaatagcttttgctgttattaatgaagtaattactaaatgcacttaaaccagggcaggaaggaatggaaggatggagctagaaagctcagagtgggccagagcaggggtgtgacacttgcaaagacagggctctgactctgatccctcccagggagcctccgacacccatcccactcccaaccaccaagaccctgggttagggaagaagttgtatcttaagtgccaccttcaagtttcttagtggtgcctggtgcattccgaggctacatccaggctcatggaaggagtgtagtattcatttagccatgtctgccatgggtccagaaatgggaaagggaattgctgtccttgccctgtggtatgctgccacctctttgggaagcaggccttgcccctgtcccaccactcattctcagctttgaatgggaggcctttctatagtggaggcctttccttgaagcctatgaactgcaggcccccttttgccattgatctcaaagcacttgtcctcaggatagggaagagcagggggatgcaggaatagcagggatagcttgctcccagccccctccccaatttggttccgttgacataggaattttacgattcccaaaccatgcaggggctgagccttccttatgatgactttgttctccctcccactgggggaatcctccctatgccttaaaactgccgagccccactccatgtaataggattcctgggcttcctcaatgggggttcatgttcttggactgcgggccctcagtccttaactggaaagtgaccgtccactgccccatggagcccatctggacacagcacagccccaaaaccgttagcagctggctctgtttccaagcctggggaggggttcctcagtgcaggagttggggacaggctggggatccaagctgcttgagggggtcaaccttggaccaaagttgccttaagcctgtggtaaaagggcttcagggaaggtaagtgggccacctgctggaagctgccagctgcccggctggcaatggtgtgagtgtcttggccctgtccctgccctggggtccagcaggtcatccctcccttcttctctctcctttggcgtttgttcctgtagtcactgggctaatctccccctagcttcaagctgtacatagggcctcccagtgcaaatcctcctgcccataccgtgcacccttagaagcctgcgtgtgcatagagcgccccctacttcccagttaactcccagttcttctccctgagcttggtatttgtcatgtgccaactctgactctgaggtgggcagtgagggaagcagccccgggcctgcttgcttcctgtccccgaaatgttcgtttcttctgaagtaaatatacatatataaataaatgtataaatactgctttgtatctg

SEQ ID NO: 105 - DNA, 4278 bp, Homo sapiens
ggctcgacccggaagccgccgtggccgccgcacaagctgcgctcgtctctcggctggggagctccgtgtcgcaccgggttcttgggctggccgtgtccttctccctcggtcgccactggcccatgagtccccatggcgacggcaggggccaggcccaggggcgggcagtccgagtggggctgcggcgctccgggggcatccgcggcggcgtggcggtgttcgccgccgtggccgcagtgttcaccttcaccctgcccccttcggtaccggggggagactccggggaactgatcacagccgcacatgagcttggagttgcccatcctcctggctatcctttgttcacgctggtggctaaactggcaattacactgtttccttttggttcaattgcctaccgcgtcaatcttctctgtggcttatttggagcagtagctgcatcattactttttttcaccgttttcaggctttctggctcatctgctggaggaatccttgctgcgggggtgttttcattttctcgtctaacatggcagtggtccattgcagcagaggtttttagcttaaacaatctctttgtggggctgcttatggctcttactgtacattttgaggaagcagcaactgctaaggagagatcaaaggtagctaaaattggtgctttctgctgtggccttagtttatgtaaccagcacacaataatactctatgttttgtgcataataccttggattctctttcaacttttaaaaaagaaggaactctccctgggctctttgttgaagttgagcctgtacttctctgctggtttgctgccctatgtccaccttcccatctcatcttaccttaatcacgcccggtggacctggggagaccagacaacactgcaaggatttttgacacattttctcagggaagaatatggaaccttcagcctggccaaatctgaaataggatccagtatgtctgaaatactgctttctcaagtaacaaatatgaggaccgaactctcattcaacatccaagcccttgcagtttgtgcaaatatatgtttagcaacaaaggacagacagaatccatcattagtatggctttttactggaatgttttgcatttattcattgttctttgcttggagagcaaatttagatatttcaaaaccacttttcatgggtgtggtggaacgattctggatgcagagcaatgcagtagtggccgtcctcgctggcattggtttggctgcagttgtgtctgagactaaccgagtgctgaatagcaatgggcttcagtgtctggaatggctttctgcaactctttttgtagtttaccaaatatattctaattacagtgtttgtgaccaaaggaccaactatgtgattgataagttcgcaaagaaccttctcacctctatgcctcatgatgcaattatcttactcagaggagatttgccaggaaattctctccgttacatgcattactgtgaggggttgaggcctgacatttcattagtggatcaggaaatgatgacttacgagtggtatttacccaagatggcaaagcacttgccaggtgtcaactttcctgggaaccggtggaatcctgtggaaggaatattacctagtggaatggtcacatttaatctttatcattttcttgaagtaaataaacaaaaagaaacatttgtttgcataggaattcatgaaggcgacccaacctggaaaaagaactattcactttggccatgggggtcttgtgacaaattagttcctttggagattgtattcaaccctgaggaatggattaaacttacaaaaagtatctataactggaccgaagaatatggaaggtttgatccatcttcttgggaatctgtggccaatgaagaaatgtggcaagcgaggatgaaaacaccgttcttcatctttaacctggcagaaactgctcacatgccttcaaaagtgaaagctcaactctacgctcaagcatatgacctttataaggagattgtctatttacaaaaggagcacccagtgaattggcacaagaactatgccatcgcctgtgagcggatgctgcgtcttcaggcaagagatgcagatcctgaagtgctgttatcggaaaccatcagacatttccgtctgtactctcagaaagcaccgaatgacccacagcaagctgatattttaggtgctctaaagcacctaagaaaagaactgcaaagtctgagaaataggaaaaatgtctgagacagcaaaatatgaaaaacctgctcatcgttcagcttccaaaattctgaagtctggaagtttttccttcaagaaaagaaactgcataaaaaatttaaaactaagtcatctcccagatataagtatcatggtccagcagtactgtttaatggggtattcagtgactaaggtctgctatttatgcaaaattctgtttatcccgtgttaccaaattaccatttcagtgagaagcttttgaaaagtcttctgacttccagtctttcaccagatgactgcactggattagattctagaagagaatgaaccattttcatataactaaatattggtcatgaactgtgtaagggccatgcttattgggatcagttttaaagttaaattcttttgatattaataccagaccaaagacattttctgtttcctggaaaaaaaaaatgaatcatgttaggctttaggtgagagtacattttttacaaagtagctatagttgttacatagtcttacacttcaagctaaacaccaaatgggtgatattttgaaaaaagtttgtgttttactgtcttagatcgttcttggaaatcactaaaaaaaaaaaaagttaatttgatgtttgcttatttcagttgcagaaactggcgagtaaaaaagattttgcatttacttaattaattttatatttatgttttatttctatttggactcagagatctagacccaataattagtaggctcctgctgccaaaatgcaaaggggaaaaaaaggcagggattgggggggatggggaagtggcccaataaattcatttctgttacaagcatcttttatacatattactaaagagaacatagtaagaaatgcaaataatagttctttattttattatgacagttaattaatagcaacctgttttaatgaataaagtcactcagagtccttcagcacttcctaagtagaggccagaatctgtagggcttcttttccccccaattgtatagctcctagactccaagcactatataggcccctgtatagaaatgctcactaatgaagagggagggctagaagcttgtctgcattcaaagatcactggtgagtcattcagcaagaaaaggccccttaccaggaatagtcacagttccgtggcattgtactagcaaaagggtctgatcaaaggtctcctgtggagcttgcatggttccctttcatactacgaccataattaaaaccactaattctcttttaaaatgctgcaggatgccatgtaggcatctgtctggagtgtcctttgtgatgtcataagctgttaaggaccagtgccgagggcttttgagtgaaatgccagtcatgaaggtgcttcaagacaagggtgcctctaaaagcttgacagggccttgactgcacaattcgagctgaatttgccccttgtcagctgccagtaaataaatctcaaagggggaaaagctgaagtttcattacctgatccatggggctttgttggttttggcatcacacaggggaagctcttgcccctccattctctggatttgaagatgtccattggagcctgcagtgcctggacagggttcagagcggaaccttttgaagagtgtcaatagttgtaacagttcagctgttaggaagacaaataaatggaggagctcattaatccgcttttggctctcagtgccttttgcccttttatcacagccttattaggctcctactcatcttgaaccagaaaaaaatgaattgaagttgttgagtactaattggcaaagacttttaatcatgggccaagaactttcactgacttgaaagtaacttctccacagggaaggaccaaaaacctggtttaccttaaaacaaaaacctgttggagttcagcgtggtgtaaaaatgtaaggaagcattgataaattgtctaagtttatccatttgaaagaaattgtgtaagattatgatattctcttttctttaaaaaaaaaagtacaataaaattcaaacattccttaggaaaaaaaaaaaaaaaaa

SEQ ID NO: 106 - DNA, 4792 bp, Homo sapiens
caactagaggagctcgccccctgcctgtgacagcttagggtcgcctactttttgtggacacactgccgtccacggagtgcagaggccgcctgcagttttcttgcgtccctgtgagacgcacggtggcgcaattcccgagcgtgccaatcccgggctggctggagggcgggctcttcaaatttgaattgcggaagtgttttgtgtgttagagaacgtcgcggaggaggtaagcgtcgcttggcgcctggccgccgcgggcaggatacaccgtgggcctgaggcgcgagcccggcggcgtgcggccctctctccgcgcggagccgagccggaactgcggcagtctctccctgccaggctcttcatccaaggtttctgtggatcccttctgaagttctatctgaaaattgcgcttaagtgaattttctgttagaagaacttggttgctactttcttgtcaagatgattgcaacacctttgaaacattcaagaatttacttacctccagaggcatcttctcaaaggagaaatctacccatggatgcaatcttttttgacagcattccttcaggcacacttactcctgtaaaagatttggtgaaatatcagaactcctccttaaaattgaatgaccataaaaagaatcagttcctaaaaatgacaacttttaacaataaaaatatatttcaatcaactatgctaacagaggctactacctctaacagttctcttgatatcagtgctataaagcccaacaaggatggattaaaaaataaagcaaactatgaatcaccaggaaaaatatttctaagaatgaaagaaaaagtactgcgtgacaagcaagaacagccatcaagaaacagtagtttgttggaaccacagaaaagtggaaataatgaaaccttcactcctaacagagttgaaaaaaaaaaattgcagcatacctacctatgtgaagaaaaggaaaacaacaaatcattccagtcagatgacagttcactaagagcctcagtccaaggagttcctctagaatcatcaaataatgatattttcctcccggtcaaacaaaagattcagtgccagcaggaaaagaaagcaccactgcacaatttaacttacgaacttccaactctgaaccaagaacaggaaaattttttggctgtagaagcccgaaacaagacattaactagagctcagttggctaaacaaatttttcactcaaaggagagtatagttgcaaccactaaatccaaaaaggacacgtttgttttagaaagcgttgattctgctgatgaacaatttcaaaatactaatgctgagactctcagtactaattgtattcctattaaaaatggcagcctgttaatggtttctgatagtgagaggacaacagaagggacttcgcaacagaaagttaaggaaggaaatggaaaaacagtgcctggagagacaggtcttccaggttccatgaaagatacatgtaaaattgtacttgcaacaccaagacttcatataacaatacctcggaggtcaaaaagaaatatttcaaagctttctcctccaagaatatttcaaactgttacaaatggacttaaaaaaaatcaggtagttcagctacaggaatggatgattaaaagcatcaataataatactgctatatgtgtagaaggaaaattgatagacgtcactaacatatattggcacagtaatgtaattatagagcggattgagcacaacaaacttaggactatatcaggcaacgtttatatattaaaaggcatgatagaccaaatttccatgaaagaagcaggatatccaaattatctcataaggaaatttatgtttggatttccagaaaattggaaagagcacattgataattttctggaacaattaagggctggtgaaaagaacagggaaaagaccaaacaaaaacagaaaactggaagatctgtccgtgacataaggaaatcaatgaaaaatgatgcacgagaaaaccaaacagatactgctcaaagagccaccaccacttacgattttgattgtgataatttggaactgaagagtaataagcacagtgagtcaccaggagctacagaattaaacatgtgccacagtaattgccaaaataaaccaacattaaggttcccagatgaccaagtaaataatactattcaaaatggaggaggagatgacttatctaatcaggaattaattggaaaaaaagaatataaaatgtcttcaaagaaactaaaaattggtgaaagaacaaatgaaaggataataaaaagtcagaagcaagagacaactgaagaattggatgtatccattgatattctaacctcaagggaacagtttttctcagatgaagaaagaaaatacatggccatcaatcagaagaaagcttatattttagtaacaccacttaaatctagaaaagtgatagagcaaagatgcatgaggtataatctgtccgctggcaccatcaaagcagtaacagattttgtaataccagagtgtcaaaaaaaaagtcccatcagcaagtccatggggactttagaaaatacatttgaaggtcataaaagtaaaaacaaggaagattgcgatgaacgtgacttacttactgtcaaccggaaaataaaaatatctaaccttgaaaaggaacaaatgctcacctctgactttaagaaaaataccagactattaccaaaattgaagaaaatagaaaatcaggtagctatgtcattttataagcatcagtcctcaccagatttgtcaagtgaagaaagtgaaacagaaaaggaaattaaaaggaaagctgaagttaagaaaaccaaagcaggaaacaccaaagaagcagtggttcacctgagaaagagcacaagaaacacaagtaatattccagtgattttggaacctgaaactgaagaaagtgaaaatgaattttatatcaaacaaaagaaagctagaccttccgtcaaagaaactcttcagaagtctggtgttaggaaagagtttccaattactgaggcagtaggatctgataagacaaataggcatcccttagaatgcttacctggtttaattcaggataaggaatggaatgagaaggagttacagaaacttcattgtgcttttgcatctcttccaaagcacaaacctggtttctggtcagaggtagctgcggctgtaggttctcgatctcctgaagaatgccagaggaaatacatggaaaatcccagaggaaaaggatcccagaaacatgtcactaagaagaagccagccaattccaaaggccaaaatggcaagagaggtgatgctgatcagaaacaaactattaagataactgccaaagtgggaactcttaaaaggaagcaacagatgagggaatttctggaacagttgccaaaagatgaccatgatgattttttcagtacaacacctttacagcatcaaagaatactgttgccaagtttccaggacagtgaagatgatgatgatattctgccaaatatggacaaaaatccaacaactccatcatcagttatctttccattggtaaaaactcctcaatgtcagcatgtcagtcctggcatgctaggttctataaataggaatgactgtgataaatatgtttttcgtatgcaaaaatatcataaaagtaatggtggtattgtctggggcaacatcaagaaaaaattagttgaaactgatttctcaactccaacaccaagaaggaaaaccccatttaacacagacttaggagaaaactctggtattggaaaacttttcactaatgctgtggaatctttagatgaagaagagaaagattattatttttcgaactctgattctgcatagtaaaatgagaaaatatgattcctgggatttttaccataaagcagacagtgtttgtattttcaactggagtacatgtattttctttgtaaagtagcttcctatgaaaatgtggacttttttgaaggtttcatatgtttgtgttcaaagtaaaatatcctcattgctgcagcttactaaaaatgtaaagaaaattgtttttgctcgtgtagatatctgtaaatttgtttttgcatattaaaatatatatagataattttttaataagcatccaagtctgtttactttaagaaaaccatttcccaaacagatttttttttatttcaagaaaattttgctaccatttaagtaagagaaggtgagaaggatgacagaggttgtattggtagctattgaattcatgaaaacttttaagttagcatttgttagcagttattatccaagccagagtaggatttgttaccagttgttatccaaacctaatgtttaaattacacattgttgaaattaaattacacattgttgacatgcttctctcctgattgtttttattttaaacttgtgataggcatatctatgaaacctttgtaaatttagtttattgctttaccattattttactaggtaaaattagagaacagattttgttctctaatttttaagccttatttacatatgcagaaacagcttaaatattttgactagattagacaaacagttaatagatccaccattaggaatcaatatattatgtcataataaacatcctttttctttcactgaaatttcttttagaaataaacttatttttgcttgttatgttttgaaacttgacataggatattttccctctggctacacattcacctacccttgttctctatttagattattcaaataaagttagtttgcttttatagtaaaaaaaaaaaaaaaa

SEQ ID NO: 107 - DNA, 2211 bp, Homo sapiens
tcctggcggagccatggctgcgcagcgggctggccgggggtctcctgaacccgggccccgccgccccgaccgcccggccccgccgccggggctgtccccgccgcgtccgtagcgcgtcctgccagggctgaaatctctttaatgatggagggaagcaggcagacgcgagtgtctcggccatacaagatcagcgaatcatcaaaggtataccgctgggccgaccactcaagcacggtgctgcagcggctgaacgagcagcgtctccgcgggctcttctgcgacgtcgtcctggtggccgatgagcagcgtgtgccagcccatcgcaacctgctggccgtgtgcagcgactacttcaactccatgttcaccatcggcatgcgggaagctttccagaaggaggtggagctgatcggcgcctcctacattgggctcaaggccgtggtggacttcctgtacggcggggagctggtgctggatggcggcaacattgactacgtcctggagacggctcacctgctgcagatctggacggtggtagacttctgctgtgagtacctggagcaggaggtgagcgaggacaactacctgtacctgcaggagctggcctccatctacagcctcaagcggcttgatgccttcatcgatggcttcatcctgaaccacttcggcacgctgtcctttacgcccgacttcctgcagaacgtctccatgcagaagctgtgtgtctacctgagcagcagcgaggtgcagcgggagtgtgagcacgacctcttgcaggccgccctgcagtggctgacgcagcagcccgagcgcgaggcccacgcccgccaggtgctggagaacatccacttcccgctcatccccaagaacgacctgctgcaccgcgtcaagccggccgtgtgctcgctgctgcccaaggaggccaactgcgagggcttcatcgaggaggccgtgcgctaccacaacaacctggcggcccagcccgtcatgcagaccaagcgcacggcgctgcgcaccaaccaggagcgcctgctgtttgtgggcggcgaggtctccgagcggtgtctggagctcagtgacgacacctgctacctggacgccaagagcgagcagtgggtcaaagagacgccgctgcccgcccggcggagccaccactgtgtcgcggtgctggggggcttcatcttcatcgccggcggcagcttctcacgggacaacggaggggatgcggcctccaatcttctttataggtatgacccccgctgtaaacagtggatcaaggtggcctccatgaaccagcgccgtgtggatttctaccttgcctccatcgaagacatgctggtggccatcggcggccggaatgagaacggagcgctctcttcagtagagacgtacagtcccaagactgactcctggtcctatgtggccggcttgccaaggttcacgtacggccacgcgggcaccatctacaaagacttcgtgtacatctcggggggccacgactaccaaattggcccctaccgcaagaacctgctatgctacgaccaccggacagacgtgtgggaggagcggcggcccatgaccacggcgcgcggctggcacagcatgtgcagcctgggtgacagcatctactccatcgggggcagcgatgacaacatcgagtccatggagcgcttcgacgtgctgggcgtggaggcctacagcccgcagtgcaaccagtggacccgcgtggcgccgctgctgcacgccaacagcgagtcgggcgtggcagtgtgggagggccgcatctacatcctgggcggctacagctgggagaacactgccttctccaagaccgtgcaggtgtacgaccgcgaggccgacaagtggagcaggggcgtcgacctgcccaaggccatcgctggcgggtccgcctgtgtctgcgccctggagccacggccagaggacaagaagaagaaaggcaaaggcaagaggcaccaggaccggggccagtgaccctagctgcgcctcttgggaccatcctcaccgtcacctcccagggctctgtagaccagcagcaacttcttagtattccggaaacattatgtacaacttagcagctttttttacttttatgattcttggtatttctatgatatcacagtaaccaattaaatactatctgtaactttaaaaaaaaaaaaaaaaaaaaaaaaaaaaaaaaaaaaaaaaaaa

SEQ ID NO: 108 - DNA, 3209 bp, Homo sapiens
attcccatcccccttctctagtccccgacctgcggcagccggagctcggggagcggagcgtggtggggaggggagcgggacaggcgacacaggagacagcggcgccgcggcctctccccaccaggcggccccggatcctactggacgccctgagggcacaccgaccgcgcctctagagtcaccccacgccgacccctcccctcttctctagacttatttccatccttcccgcttttaccctccccacccctccctgggctccaggccgccgccccctcctcactcctggaccggcccttctcggtgcccctcttccctagggagatgcgatgagccggtgcccccgcgtcctcatcgtcgccccgggcacggtgcccgtccagtgcccgtggtggggagggagcactccgcggtccctccgtgacgcccctcgcttggccccccccacagctggcgtccctcggccatgccccaggggacccagccagggggtgggctctagagcgagtggggtggagaggagaaaggacggggccttgggcgcctctgagatgctcccaagtgccagggagggccgagcgaggcgcaggcaaccgggcagcaggcatgatgccctcgcctagtgactccagccgctcgctgaccagccggcccagcaccaggggccttacccacctccgcctccaccgaccctggctgcaggccctgcttacgctggggctggtccaagtgctcctgggcatcctggtggtcaccttcagcatggtggcctcttccgtcaccaccaccgagagcatcaagaggtcctgcccgtcttgggctgggttctcgctggcgttctccggggtggttggcattgtgtcctggaagcggccattcactctagtgatctccttcttctccttgctttcggtgctctgtgtcatgcttagcatggctggctctgttctctcctgtaagaatgctcaactggcccgagacttccaacagtgctctctggaaggaaaggtctgtgtgtgctgtccctctgttcccctcctccggccctgtccagagtcggggcaggaactgaaagttgcccctaactccacctgtgatgaagcccgaggggccctcaagaacctgctcttcagcgtctgtgggctcaccatttgtgccgctataatctgtacactctctgctattgtctgctgcatccaaatcttctccctggacctcgtgcatacgctggcccctgagcggtcagtctcaggcccactgggacctctgggctgcacgtccccgcccccagcccctctcctacacaccatgctggacctggaggaatttgtcccgcctgtgcccccaccgccctactatcccccagagtatacctgcagctcagaaacagatgcacagagcatcacgtacaatggctccatggacagcccagtgcccttgtaccctaccgattgccccccttcttatgaggcagtcatgggactacgaggagacagccaggccactctctttgaccctcagcttcacgatggctcgtgcatctgtgaacgagtggcctccattgtagacgtgtccatggacagcgggtctctggtgctgtcagccattggtgacctccctgggggctctagcccgtcggaggactcgtgcctgctggagctgcagggctccgtgcgctccgtggactacgttctctttcgctccatccagcgcagccgtgccggctactgcctcagcctggactgtggcctgcggggccccttcgaggaaagccccctgccacggcgccccccacgggctgcccgctcctattcctgctctgcccctgaagctccacccccactgggtgcccccacagctgcccgcagctgccaccggttggagggctggccgccctgggtgggaccctgcttccccgagctgaggcggcgggtcccccggggagggggccgcccagccgcagccccgcccacccgagccccgactcgtcgcttcagcgatagctcaggttccctcaccccaccggggcaccggcctcctcatccggcatccccaccaccgctgctgctgccacggtcccacagcgacccaggcatcacgacctccagtgacactgctgacttcagggacctttataccaaagtgcttgaggaagaagctgcttctgtttcctctgcagatacagggctctgctctgaagcctgcctcttccgcctagcccgctgcccttcccccaagttgctacgtgcccggtcagccgagaaacggcgccctgtgcccaccttccaaaaagttcccctgccctcgggccctgcacctgcccactccctgggggacctaaagggcagctggccaggtcggggcctggtcactcgtttcctccagatatccaggaaagccccagaccccagtgggactggagctcatggacataagcaggtgccccggagcctgtggggccggcctggccgagagagcctccaccttcgcagctgcggagatctgagctctagctcttccctgcggcgtctcctgtctggccgcaggctggagcgtggtacccgcccccacagcctcagcctcaacgggggcagccgggagactgggctctgacctaggcttcttgtcacactgaacacatccagccacaggcaccagctggttgggaccagcagcccccagcatcctcttgcactggctggcacaaaaagaaacctgctgtataccccccaaagtgtccctttccctcctacctctggggtctcttgctgcttgcctctgctgctctggactgggagagcttctgtcctgtgctgcatgggtatttagactgtgggggagatgccccttcttatagcactggaggaggaaaacaaattcttgtccccctcagaatgagagtggctctttctgatttgcaagggcactatggtcagggcaaaggcatggcccaggtgtttaagtacagggtgacgtgtgcctatgcaatggggtggtaaggcaggcacgaagagtccaaaaaatctaggtggcctctcagctctgccacctctagctgcatgaccttgggcaagctatgtaaccccaattgcctgctccattaaagactgtgaaggtagaatgtttgtaaagctcttaacagtatgtaagccttcaataaatttcagttttccccttgttttcttgatcaaaaaaaaaaaaaaaaaaaa

SEQ ID NO: 109 - DNA, 1936 bp, Homo sapiens
tcttcctttgggtccaaaggaacttttccccaccatgacattgctacctctgtggctgccgtttgtatttctctgccagtgagaacagatcacatagcccaggaaattcacagtgctgaatcacgagaccacagccagactgcagggaggactctgacatcaagctccccagacagcaaagtcacagaagagggcagagcacagaccctcttgccagggagaccttcatctggacaaagaatttcagattcggttccactggagtcaactgaaaaaactcatcttgaaataccagcttcaggaccaagttcagctagttcacaccacaaggaagggagacacaagacgttttttccttccagaggccagtatgggtgtggggaaatgactgtcccctgcccctctttaggaagtgacggtaggaaacgtcaggtatctggattaatcactcggaaagattctgtggttccttctaagccagagcagcccatagaaattcctgaagccccttctaaatccctcaagaagaggagtctggaaggaatgagaaagcaaactcgagtagagttcagtgacaccagcagcgacgatgaagaccgattagttatagaaatatgaagcttccagagaaacatggtgtctggtcaaaaagactgttgacgcttcacaagtaaatgttgtcaggctggcggaagaactaaactctatctgtgaaacacctacagattaggaaagccattttgagttatttacaagccaactccaaccaacttctgacccccaactcagccgcagcgttccccagctccccttgggagtgctctgctcatcttcaaatggtgccaggcagggcagacatggcaaggaagcaaactctgcaaatggtcaacgtgcacagtgactgggccttgactcccagcctcgtcttctgcacctgtcccccactgcctctctgcaatcaaatggcactaaccaagaaagccaccatcaacacatttctccacaagtggaccccacacagtcgaggcaactggctttctccattagtaaactgaggatttgcttccaaggtggagagcacacttgggataattggagtagcttgacaaagagacgggggtgtgaactgggcacaaagatacttctgttcattttggagacaaaattcagatacattaaaaaactgaagcttgttcagagtaattcacgtccttggtggagttgtaaatacacttcaaaatgcctatgatccggtgacatgctgattacttttaaatgttgcacaaatggtcaatgcttatttatggtcagatgatgcaagcacatgctcttgtgcctggtgcgtttgctgtggagatctctgagactgtcggtttttctagttcttgcaaaggaacggtgttaaaagttaatagaactgtctctctgtaatgagtcattttttgagagggaaaaattcacttattttcctctgattcttcttgtcatattgtgctctgagcaatttcaattagagggttacattttagtaatctgtacagcttcaactgatgcctgctcgtcgtgacgggagccttttagatttccttcagaagcttcaaggatacaaaactaattggagttttgacgctgttttacatctcggtaattttattttcggggcttagtgttactttgctgtcaaattaaatcagcctctgtattgtgcacgtcagaactgcacagagaaaattccccagtattccaagccggtgcgcccctgtgcagaagaaaacagatctacgtcagccagcccggggggcaaagcctcagttccactgccttcctctccctctccttccacgggagaggagaaacttaaagaggtttacattgctgcatttcaataaaattttatacttgcttttggtaaaaaaaaaaaaaaaaaaaaaaaaaa

SEQ ID NO: 110 - DNA, 3001 bp, Homo sapiens
gaggacttggattgcttaaggacaccaggcaggcgcgacagccttcagcctctccctctgcagttttggccggttcctttaacttgccttcatctggggctgtttggtatttccacgtgccttgggcccgcccactgcagcctccatcttggaagcggccgccggcgcctagaactgtatttcagaaaaaagaaactacagttttagcatgcagaaaggaaaagggagaacaagccggatcagaagacgaaaactctgcggaagttctgaatcaagaggagtgaatgagagccacaagtctgaatttatagagctgaggaagtggctgaaagctaggaagtttcaagattcaaacttagcgcctgcttgttttccaggtacaggaagagggctgatgagtcaaacatccctgcaggagggacagatgattatttcgttgcctgagagttgcctgctcaccacggacacagtgattcgaagctacttaggggcatacattactaagtggaagcctcctccatctcctctgctggcgctgtgcacctttttagtttcagaaaagcatgctgggcaccgatctctttggaagccttacctggagattttacccaaggcgtatacctgccctgtttgtttggagccggaagtggtgaaccttcttcccaaatctttaaaagcaaaggctgaagagcagagagcccacgtgcaggagttctttgcttcctccagagactttttctcttctctgcagcctctgtttgcggaggctgttgacagcatcttcagctacagtgccctgctgtgggcttggtgcaccgtcaacaccagagccgtgtacctgaggcccaggcagcgggaatgcctttctgcagagccggacacctgtgcactcgctccgtacctggacctgctgaatcatagcccacatgtccaggtaaaagcagcgtttaatgaagaaactcattcttacgaaattagaacgacttcacgttggagaaagcatgaagaggtattcatctgttacggccctcacgataatcaacggctgttcctggaatacggatttgtttctgtccataatcctcatgcttgtgtttatgtctcaagagaaatacttgttaaatatcttccatcaacagataaacagatggacaaaaagatttctattttaaaggatcatggctatatagaaaatttgacatttggatgggatggaccatcttggaggctactcacagcccttaagttgttatgtctggaagctgagaaatttacatgctggaaaaaagtacttcttggggaggtaatttcagatacgaatgagaagacaagtttggacatagcccagaaaatatgctattatttcatagaagagactaatgctgtgcttcaaaaggtgtctcatatgaaggatgaaaaagaggccctgataaaccaactaactttggtggaatccttgtggacggaagagctaaagattctcagggcatctgccgagaccctgcacagtttgcaaacagcttttacctgatttcaccgaagcgcatttggtcacctcctctgaaacaaaagttaattttgaagagcatcatcatgggctggggtggtggctgcccccaggacatgcaggatttctgcagggggcagcacaggttctgggattgtgaggctgtgagtgaaggtggacaagctgtctggatggcaggtctaatgctcttccgaataaagtgctgaactgtgaggagagaggcggactgtgaggcagccaggagccagctgcgtccgtgtgtggtctgtcaccacggggcctgcttcttatctgacacagcagctatcagagtctagtggttgtgcttttaagatgctctgataccattgggttaaggggcagattggcggtgggtgtggggcagtgtgaggtagtcctggatccccgccagggtggcccagacgccagcccttccctgtgtggctgcactgaggtgggtgttgaagagccccctaggggacacacagcttccaggaggagggaatgtcctctaagcatgctcctggcctctcaaggtggcgcttgtctaattattcacttgggaagaatgactagctcagccagcggctctttctgctttgttctggcgactttcctgggcaggcctttccacctggggagctggctcatcctgcacagctgggccgtggtgggcctgtctgcttgattctggggttcagtgtaggtcagctgatggcgaaccatggtggtggtttggcttctgttcttattcttgagttttgataccacgcagaccttgggtggggagagcttcctgcacagctctcagcggcctgtggccttggaactgcctgcgtaagtaacggaggggctgctggtcctgttcaggcccgtgctggggacgccgcttagacaatgttgcccagagtcctgtttaccctcccagggttcattcttcccaagaactcaaattcctttctcattggagcctagtgaaaccaaatgaacgggacctgctggcctcaggaggcaggcagagtttaaaataaaactttctcatgatttcttgaacatctttccctgtttgtatatacactttgtgtttatttttcagtagctgcagtatattttttttcaatattcagtataatgcagtgtatttcatcatatgctgtatggagagtgggcagacttctgtggagggcccgatagtaaccatttgaagctttctggacctgtggtcttagtcccagcgattctgcagagcggccatcggcagcatgtcaaccatttgcatggctgggctccagggaaactactgacaacgacaggtggtgggccatagtttcctgacccctgtgctatgccagaatttctttttcctcttccctatgagtggacctaaatatgttaattccttttcacctttcaaaacggacagccccttgaacattaaaaacttcgcagaccctaaaaaaaaaaaaaaaaaaa

SEQ ID NO: 111 - DNA, 3338 bp, Homo sapiens
gcaggggccagacccggacggctccagagcctccagagcctccgggtctgggcggcgcttcggctcctcccgagccgcctgctagccccgcgccgcactccatccccacaggctggggacgggcccggtgcggctgtgtgggttcgggagcggagttgcagaatccaaggacccattttgttctttctccgcactgctttatgggaggcattatggcccccaaagacataatgacaaatactcatgctaaatccatcctcaattcaatgaactccctcaggaagagcaataccctctgtgatgtgacattgagagtagagcagaaagacttccctgcccatcggattgtgctggctgcctgtagtgattacttctgtgccatgttcactagtgagctctcagagaaggggaaaccttatgttgacatccaaggtttgactgcctctaccatggaaattttattggactttgtgtacacagaaacggtacatgtgacagtggagaatgtacaagaactgcttcctgcagcctgtctgcttcagttgaaaggtgtgaaacaagcctgctgtgagttcttagaaagtcagttggacccttctaattgcctgggtattagggattttgctgaaacccacaattgtgttgacctgatgcaagcagctgaggtttttagccagaagcattttcctgaagtggtacagcatgaagagttcattcttctgagtcaaggagaggtggaaaagctaatcaagtgcgacgaaattcaggtggattctgaagagccagtctttgaggctgtcatcaactgggtgaagcatgccaagaaagagcgggaagaatccttgcctaacctgctacagtatgtgcggatgcccctactaacccccaggtatatcacagatgtaatagatgctgagcctttcatccgctgtagtttacaatgcagggatctggttgatgaagcaaagaagtttcatctgaggcctgaacttcggagtcagatgcagggacccaggacaagggctcgcctaggagccaatgaagtgcttttggtggttgggggctttggaagccagcagtctcccattgatgtggtagagaaatatgaccccaagactcaggagtggagctttttgccaagcatcactcgtaagagacgttatgtggcctcagtgtcccttcatgaccggatctacgtcattggtggctatgatggccgttcccgccttagttcagtggaatgtctagactacacagcagatgaggatggggtctggtattctgtggcccctatgaatgtccgacgaggtcttgctggagccaccaccctgggagatatgatctatgtctctggaggctttgatggaagcaggcgtcacaccagtatggagcgctatgatccaaacattgaccagtggagcatgctgggggatatgcagacagcccgggaaggtgccggactcgtagtggccagtggagtgatctactgtctaggaggatatgacggcttgaatatcttaaattcagttgagaaatacgaccctcatacaggacattggactaatgttacaccaatggccaccaagcgttctggtgcaggagtagccctgctgaatgaccatatttatgtggtggggggatttgatggtacagcccacctttcttccgttgaagcatacaacattcgcactgattcctggacaactgtcaccagtatgaccactccacgatgctatgtaggggccacagtgcttcgggggagactctatgcaattgcaggatatgatggtaattccctgctaagtagcattgaatgttatgaccctatcatcgacagctgggaagtcgtgacatccatgggaacccagcgctgtgatgctggtgtttgtgttctccgcgagaagtgaccattgttggagcaccatccagagctagtgaccagtccagtggacagttagtgggagtatcaaaaatcctttccagaatgtctgtttctcactatgtgcaccgggtgattacaggcaccagtgcagtgatgattgtacttatttgacacatactccccgtcgtcctggttcttgttcctgagaagggtgggtaacagatattccaggaaaaagaatgcacattgaatggatgtgagagaccacattgcctctcccactgctttggggagcactttcctgtcatttctaacttaccacatgcttggtgtactatatgtacgttgtgcctcatatgttgcaaagaactaaggtgagtatagcctactagatatgggcaatatccagcctagatgattggaaagataccagtttaagtaaacttggtaaaatccaagtctttttttttttttccaggaacaactacattttctcatatacaggtagctaggggcaacacagttccattctagagggaaacaaaagggagagccccacaaaactttggggacaagggagagagagactcatctgacacttcttttggaggtcaggatttgtatatcagaattgaagttagaattaagtgaattaaactgaatttgattgtgagtgaacctagaacagcactgaagtattacataacctggaagactgagaagggtatattatttgaaggatctttttatttccccgaggtctttcgcactggagacagcataaaagagtgaacaaatgttgggatgagagaagatgacatcaatgtgggagttcagtataactggggataaactagaagaacctgtgattttacagtcatcttattacctgccagggctcatctagccatggcaatgtttgccttgaatgggggtgaaagcctttctttgttggatcaaatactactacactattacacttccacactatttatttggggatgggctgggagtgacagtagcctagtagttcagctacctgattactgccccattcttttagaagcacatgtctgccaaggagtggtttgtactgctgtgtttggtacatctagtcttttttctgctataagttttccttacctgtcctttagtgtagattttattcatcacaggacagaataatcaaggacaaccaaaatccttttgttagtttcagtacctcagctatcaacatttctgagctaccattcaatgttcctctgtgtcatggagtgaaattcttgttttgtgggtattaggagtgtgggaatgtgataacctaaacaacctttgctctgaaattccatttttccctctttccctgagttgtattgacctacagagttaatttcctttgtatttttttaagaaaatattaaaaatcaacggtctcaaatgccgagagtttgtggct

SEQ ID NO: 112 - DNA, 6830 bp, Homo sapiens
gcggggcccaggctgcggctccgctcccggccacggggggcgctgcgctgcgccggtggttggtggtggctgttggggggggtgggggggaacggcggccgcgggtggtgcggagggaggccttgcgggcggatcgggcgcttggcggcggaggtggtgggaggcggcgggcgggagcgcgggtcaggccggccccggcgatggcggacgcggcggcctccccggtgggcaagcggctgctgctgctgttcgcggacactgcggcctcagcctcggcctcggctcccgcggcggcagcggcgagcggagatccggggcctgcgctgcgcactcgagcctggcgggccggcacggtgcgggccatgagcggggcggtgccccaggacctagcgatctttgtagaatttgatggctgtaactggaagcaacactcctgggtaaaagttcatgctgaggaagttatcgtgcttctgctggaagggtctcttgtatgggcgccccgtgaggacccagtccttctccagggcattcgagtctccattgcacaatggccagccctgacttttactccccttgtagataaactgggtttgggttctgtggttccagtggaatatcttctggatcgagagcttcggttcctgtcagatgccaatgggttgcatctgtttcagatgggaacagatagccaaaaccagattcttttggaacatgctgcactgagagaaacagttaatgctttgatcagtgaccaaaagctacaagagatattcagccgaggtccctacagtgttcaaggtcacagggtcaaaatatatcagccagagggggaagaagggtggctctatggtgttgtgagccatcaggactccatcactcgtcttatggaggtgtctgtaactgagagtggtgagatcaagtcggtagatcccagactaatccatgtgatgctgatggataattcaacgcctcaaagcgaggggggtacgttaaaagcagtaaaatcttccaaaggaaagaagaagagagaaagcatagaggggaaagatggccggaggaggaaaagtgcttcggactctgggtgtgaccctgcatcaaagaaattaaaaggagacaggggtgaagtagacagtaatgggagcgatggaggtgaggcaagccgagggccctggaaaggagggaatgccagtggagagccagggctggatcagagagccaagcagccaccgtctacatttgtcccccagataaaccgcaacattcgctttgccacttacaccaaagaaaacggcaggactctggtggtgcaggatgagcctgtaggtggggacacacctgcatctttcactccatattctacagccacaggtcagacacctttggccccagaggtgggtggagccgaaaacaaagaggcaggaaaaacactggaacaagttggccagggcatagtggcttccgcagctgtggtcactaccgccagctccaccccaaacacagtgaggatctcagacactggccttgcagcagggactgtgccagaaaaacagaaaggcagccggtcgcaggcctcgggagagaattcaagaaattctattctggcctcttctggatttggagcacctctccctagttcatcgcaacctttgacttttggaagtggaaggagccagtccaatggtgttctagccacagagaacaaacctttgggcttctcttttggctgtagctctgcacaagaggcacagaaagacactgatctctccaaaaacttgttttttcaatgcatgtcccaaactttacctaccagtaactacttcactactgtttcagagagtttggctgatgattcttctagtcgggactcattcaaacaaagccttgagagcctgagctcaggcctgtgtaaaggcagatccgttcttggaacagacactaagccaggctctaaggctggcagctctgtggaccggaaagtgcctgcagagtccatgcccaccctcactccagccttcccacggagcctcctaaatgcccgtaccccagagaatcatgaaaatctatttttacagccccccaaattgtcccgagaagagccttctaatcctttcctggcatttgtggagaaagttgaacacagccctttcagtagttttgcatctcaggcatcaggtagctcctcttctgctaccactgtcacctccaaggtggcacccagctggcccgagtctcactcctctgcagattcggcatctttagcaaagaagaaacccctcttcattacaactgactcctccaagctagtatctggtgttctgggctcagctcttaccagtgggggcccaagcctctctgccatggggaatggccgctccagctcgcccaccagcagcctcactcagcccattgagatgccaactctctcctctagccccacagaggagaggccaactgtggggcctgggcagcaggacaatcccctcctcaaaacctttagtaacgtctttggcaggcactcaggcggctttctgtcctccccggcagatttttcacaggagaacaaagctccttttgaagctgtgaaaaggttctcactggatgaacgaagcttggcttgcagacaagactcggactccagcaccaacagtgacctgtcagatttgagtgactctgaggagcagctgcaggctaagacaggcctgaagggaattccagagcacctgatggggaagctgggccccaatggggagcgcagtgctgagctgttgctgggcaaaagcaaagggaagcaggcccccaagggccggcctcggactgcccccctgaaagttggccagtcagtgctgaaagatgtaagcaaagtgaagaagctgaagcaatctggagagcccttcctgcaggatgggtcatgcatcaatgtggcacctcatctgcacaagtgtcgtgaatgccgcctggagcggtaccggaagtttaaggaacaggagcaagatgattctactgtagcctgccgtttctttcacttccggaggttgatcttcactcgaaaaggggtactccgtgtggaggggtttttaagcccccagcaaagtgaccctgatgccatgaacctgtggattccctcttcctccctagcagaagggatagatctagagacctcaaaatacatcctggccaatgttggggaccagttctgccagctcgtaatgtctgagaaggaggccatgatgatggtggagccacaccagaaagtggcatggaagcgagctgtgcgtggtgtacgggagatgtgtgatgtgtgtgaaacaactctcttcaacatccactgggtttgtcgcaaatgtggatttggggtctgccttgactgttaccggctcaggaaaagccggccacgcagtgagacagaagagatgggtgatgaagaagttttctcctggttgaagtgtgcaaagggacagtcccacgaaccagagaatctcatgcccacacaaattattcctggcacagctctttacaatattggagacatggtacatgctgcccggggcaagtggggaattaaagcaaactgcccttgtatcagtcgacagaacaaatctgtattgagacctgccgtcaccaatgggatgtcacagcttcctagcataaaccctagtgcctcttctggaaacgaaactaccttctctggtggaggaggaccggcaccagtaacaactccagagccggaccatgttcccaaagccgacagcactgacatcagatctgaagagcctctgaaaacagacagttcggcatcaaatagcaatagtgaactgaaagccatcaggcctccttgccctgacacggccccaccctcctccgccctgcactggttggcagatttagcaactcagaaggctaaagaagaaacaaaagaagcagggtccctgaggtcggtgctcaataaagagtctcattcaccctttgggctggactcgttcaactccactgcaaaggtctctccgctgactccaaagctttttaacagtctgttgctgggtcccactgcctccaacaacaaaaccgaagggtctagccttcgagacctccttcactccgggccgggaaaacttcctcaaacccccttggacacaggcataccctttcccccggtcttctctacatcctcagcaggagtgaagagcaaggccagcctacccaactttcttgaccacatcattgcctcagtggtagaaaataagaaaacctcagatgcttcaaagcgggcctgcaacttgactgatacccagaaggaagtgaaggagatggtgatggggttaaatgtgctagatccccatacttctcactcctggctttgtgatgggaggcttctgtgtctccatgaccccagcaacaaaaacaattggaagatcttccgggagtgttggaagcaaggtcagccagtgctggtttcgggggtacataaaaagctcaagtctgagctctggaagccagaagcctttagccaggaatttggagaccaggatgtagacttggtgaactgcaggaactgtgctataatttccgatgtgaaagttcgggatttctgggatggtttcgagatcatatgcaaacgactacggtcagaagatgggcagccaatggtgctcaaactcaaggactggcctcctggggaagattttcgagacatgatgccaaccaggtttgaagatctgatggagaaccttcctctgccagaatataccaaacgagatggcaggctcaatctggcctctaggctacctagctactttgtaaggcctgatctgggccccaagatgtacaacgcctatgggttgataacagcagaagatagaagagttggtacaacaaatcttcacttagatgtgtctgatgctgttaatgtgatggtgtatgttgggattcccatcggggagggtgctcatgatgaagaggtactcaagacaattgacgagggagatgccgatgaggtgacgaagcagaggattcatgatggaaaagagaagccaggtgctttatggcacatctatgcagccaaggatgcagagaagatccgggagctgctccgaaaggttggagaagaacaaggccaagagaacccccctgatcatgacccaattcatgaccaaagttggtacctggaccagaccctccgtaagcgactctatgaggagtatggcgtgcaaggctgggctattgtgcagttcctaggtgatgctgttttcatacctgctggagccccacaccaggttcacaatctatacagttgcataaaagtagcagaagactttgtatctccagaacatgtaaagcactgtttccgcctgactcaggaattcaggcatctctctaacactcatacaaatcatgaggataaactgcaggtgaagaacatcatttaccatgcagtgaaagatgcggttggcaccctcaaggctcatgaatccaaactggcaaggtcctaggcatggagaaactccaagctcctctgtgaagcaggtctttcactcacaacacttaacagggaacggcagggctctttgctggagcagaggcccttcacccagagccagtgtggtcagtattccaaactctccagccactctcttctacgctgcctcaacactgaaggttgacacaggaaagtcgtactgttcacacacacagtttgagactccaagccaagagtgccacatccctatcctgtggccttttggaaatccaaattgcctgaacatggcggggctttcctgcacattctcctgatttgagattcacgggcacacctttcttttcttttcctcttgtgcctagttaagtggaaatgtgtttggagataggggaaatcacataactggtacaagtatggggtaattgcttaaacatgcctggtggaagtctgatagcgtctctgcacgtgacctctgacaaagcccatcccaggagacggggtgaagctattccccacactctcctgtgaacactggagtcttgcaagacccagggagaacccactgcttttcccaggaggctccaggattaggaaatgtgtgtatttagtgaaaaataggtttgtagtgaaatagttactatttcatgaaagtagatatttttagaatttttgaaataccacagttgttttcctggattataaggaaaggcacattacatttagtcttcctttcgatataaaactctttgaagaaatatgatttttagaaatcagctacccattatagcacaaaatcagccaaagcagaatttttaaaaattggcttttttaggattctttttctccccctcccatcttagtcttaccttgagggaacagtcatatgagaaggaactttgtcacatctaagctgtggtgtgttccccatgtgtgtgtacaacactggtgactccaggaaccattttcacctattaccagtgttccctggggactcctcttaatgtttccaaatgggaaggacagttgatttccaacatgaggttttttgttttttatccagaaatattttcagcaaaactttccaactgagtggagtctgattaaggatttatttgaaaatggtgggattcattggcccataggtacattggaaaatgtatatctctccagctgtactgtagtgccctgcaggctgtttatatgttcacagttacttttttttttttttttaaataaaagtcatttaatgtagaatacttttaatttcactttctgtattttaattttgttgaagggctgattgggatttccatgttcttattaaaaatctaacaaatctgaaaaaaaaaaaaaaaaa

SEQ ID NO: 113 - DNA, 1320 bp, Homo sapiens
gattatggagtttctgagcgagaagtttgccctcaagagccctccgagtaaaaacagtgacttttacatgggcgcaggaggtcctctggagcacgttatggagacgctggacaatgagtccttttacagcaaagcgtctgcaggcaaatgcgtgcaggccttcggacccctgccccgcgccgagcatcacgtgcgcttggagaggacctcgccctgtcaggacagcagcgtgaactatgggatcactaaagtagaaggacagccccttcacaccgaactgaatagagctatggacaactgtaacagtctccgaatgtctcccgtgaaagggatgcaagagaagggagagctggatgaacttggggataaatgtgatagcaatgtatccagcagtaagaaacggaggcaccgaaccaccttcaccagtttgcagctagaggagctggagaaagtctttcagaaaactcattacccggatgtgtatgtcagagaacagcttgctctgaggacagagctcactgaggccagggtccaggtttggtttcaaaatcgaagggccaaatggagaaaaagggaacgttatggccaaatacaacaagcgaaaagccattttgctgccacctatgatatatcagttttgccaaggactgacagctacccacagattcagaacaatttgtgggcaggaaatgcaagtggtggttctgtggttacttcatgcatgttaccacgtgacacttcctcctgtatgacaccttattctcactcgcctcggacagattccagttacacggggttttcaaaccaccagaaccagttcagccacgtgcccctcaacaattttttcactgactctcttcttactggggcaaccaatggacatgcatttgaaacaaagccagagtttgaaaggaggtcttccagtatcgcagttcttcgaatgaaagccaaggagcacaccgccaatatttcatgggccatgtaacatacagtactcttttatttttcttttaatagcaaagttaaacattcttatttctcatatttaaaggataccacaataagctgctgtgtgtggaattgctaaaggtcaagatattcagtgagaccagcttaaatgaatagttgttatttaacattaaaatctaagaatgaacctctgaaaagactaaataggtttaccatgtgccagtctccacaaaccctgttttagtagtaaggttttctttttctattgtacaagtcaatgaaatatgatcacgcaacttattaaagaataaatgtgttaaacaaaaaaaaaaaaaaaaaaaaaaaaaaaaa

SEQ ID NO: 114 - DNA, 3341 bp, Homo sapiens
tgagtttcacgcgcgtatgctttgcccgccatggccgcagtcaaggagcctttggagttccatgccaagcggccttggcgccccgaggaggcagtagaagatccggacgaggaggatgaggataatactagtgaagccgagaatgggttctccctggaggaagtgttacggctcggaggcaccaagcaagattaccttatgctggctactttggatgagaatgaggaagtgatagatggaggcaaaaaaggagcaatcgatgaccttcagcaaggtgaattggaagcatttattcaaaatcttaatttggcgaagtatacaaaagcttccttagttgaagaagatgaaccagctgaaaaagaaaattccagcaaaaaagaagtaaaaatacctaaaataaataataaaaatacagcagaaagtcaaaggacatcagttaataaggtgaaaaataagaataggccagaaccacattctgatgagaatggcagtaccacaccgaaagtaaagaaagataaacagaacatctttgaattttttgagagacagactttgttacttaggcctggaggcaaatggtatgatctggagtacagcaatgaatattctttgaaaccccagcctcaggatgttgtatctaagtacaaaacccttgctcagaagctgtatcagcatgaaatcaacttattcaaaagtaagacgaatagtcaaaagggagcctcttctacctggatgaaggcaattgtgtcatcggggacactaggtgacaggatggcagccatgattcttcttattcaggatgatgccgttcacacacttcagtttgtagaaactcttgtgaaccttgttaaaaagaagggcagcaaacagcagtgccttatggccttggatactttcaaagagttgcttatcacagaccttttgccagacaatcggaagctgaggattttcagccagcgtccttttgacaaactggaacagttgtccagtggcaacaaggactcaagagatagaagactgatattatggtattttgaacaccagctgaaacacttagtggctgaatttgtgcaggtcttagaaactttaagtcatgatacattagtaaccactaaaactcgagcccttaccgtggctcatgagctgctttgtaacaagcctgaggaagaaaaggctcttcttgtgcaagtggtaaataaactgggagatcctcagaacagaattgccacaaaagcatcccatctgttagagacattactttgtaaacatcccaatatgaaaggagttgtgtctggtgaagtagaaaggctactcttccgctcaaatatcagctccaaagctcaatattatgcaatttgctttttaaatcaaatggctctgtcccatgaagaaagtgaattggctaacaaattaataactgtttacttttgcttttttcggacttgtgtcaaaaaaaaagatgttgaatcaaaaatgcttagcgcccttttaacaggtgtgaatagggcatacccttattcccagactggtgatgacaaagtaagggagcagattgacacactgtttaaagtgttgcatattgtgaattttaataccagtgtccaggctttaatgttgcttttccaagtaatgaattctcagcagacaatatcggatcgatattacacagcattatacaggaagatgttggatccagggttgatgacgtgttccaagcaagctatgtttcttaaccttgtctacaaatctctgaaagctgacattgtgttgcgccgggtgaaggcttttgtgaagaggttacttcaagttacttgtcaacagatgccaccatttatatgtggagctttatatcttgtgtctgagatccttaaagcaaaaccaggtttaagaagccaactagatgatcatccggagtctgatgatgaagaaaattttattgatgcaaatgatgatgaagacatggaaaaattcactgatgcagacaaagaaacagagatagtgaaaaaacttgagacagaggaaacagttcctgaaactgatgtagaaaccaaaaaaccagaggttgcttcctgggtgcactttgataatttgaaaggtgggaaacagttaaataaatacgatccattcagtagaaaccctctgttctgtggagctgaaaatacaagtctttgggaactcaaaaagttatctgtgcattttcatccctccgtggccctttttgcaaagaccatccttcagggaaactatattcagtattcaggggacccactgcaggatttcactctaatgagatttttggatcgatttgtataccgaaatccaaagccccataaaggcaaagaaaacacagatagtgttgtgatgcagccgaaaagaaaacattttattaaggatattcgtcatcttcctgtgaacagtaaggagttccttgcaaaagaagaaagccaaataccagtggatgaagtgtttttccacaggtattataaaaaagttgctgttaaagagaaacaaaaacgggatgcagatgaagaaagtatagaagacgtggatgatgaagaatttgaagagctgattgacacatttgaagatgataactgtttcagctctggaaaggatgatatggattttgctggaaacgtgaaaaagagaacaaaaggagctaaggataacacattagatgaagattcagaaggtagtgatgatgaacttggtaacctggatgacgatgaagtttctttaggaagtatggatgatgaagaatttgctgaagttgatgaagatggaggaacattcatggatgtgttagatgatgaaagtgagagcgttccagaacttgaagtccactccaaagtcagtactaagaaaagcaagagaaaaggtacagatgattttgactttgctggctcatttcaagggccaagaaaaaagaaaagaaacttaaatgattccagcctatttgtatctgctgaagagtttggccatctattggatgaaaatatgggatccaagtttgataacattggcatgaatgccatggctaacaaagataatgcaagtctcaaacagcttagatgggaggctgaacgtgatgactggctacacaacagagatgcaaaaagtatcatcaagaaaaagaaacattttaaaaagaagaggattaaaaccactcaaaaaactaaaaaacaaaggaaatgagttattaatgtaaattatagattaaaattctacttacatctaatttttgctgttcaaccatgttttttgatctagctctctgattccatacattccagacttctcagtggatttgtaataaactataaataaaaaaaaaaaaaaaa

SEQ ID NO: 115 - DNA, 3463 bp, Homo sapiens
tgaataaattattcggcatttagcttatcattctgaatttcactttttgctttttggtgctctgaaacttgcagagagaggtggagtgctaaggggagggtaggggttgtgatactttgcacacacatccctgtcattgttctgcctaaagagacagggctgggttcaaggccacatgtgctcctgtcatcctccacatttctgctccaagtgcaatccggagtgtcagctctccatctgtctctgcctggcaggcgcacgcgcccagcaccctgcctccggcgatgccgccccagcccctctgatggccctcctctctgctgccactcattccagaacaggaggcatgagcccggaacgcgcttgcttttaggagacagccactttctgtgtggtacgctggattcaaggatgcctgatcgtactgagaagcactccacaatgccagactcacctgtggatgtgaagacgcaatctaggctgactcctccaacaatgccacctcccccaactactcaaggagctccaagaaccagttcatttacaccgacaacgttaactaatggcacgagccattctcctacagccttgaatggcgccccctcaccacccaatggcttcagcaatgggccttcctcttcttcctcctcctctctggctaatcaacagctgcccccagcctgtggtgccaggcaactcagcaagctgaaaaggttccttactaccctgcagcagtttggcaatgacatttcacccgagataggagaaagagttcgcaccctcgttctgggactagtgaactccactttgacaattgaagaatttcattccaaactgcaagaagctactaacttcccactgagaccttttgtcatcccatttttgaaggccaacttgcccctgctgcagcgtgagctcctccactgcgcaagactggccaaacagaaccctgcccagtacctcgcccagcatgaacagctgcttctggatgccagcaccacctcacctgttgactcctcagagctgcttctcgatgtgaacgaaaacgggaagaggcgaactccagacagaaccaaagaaaatggctttgacagagagcctttgcactcagaacatccaagcaagcgaccatgcactattagcccaggccagcggtacagtccaaataacggcttatcctaccagcccaatggcctgcctcaccctaccccacctccacctcagcattaccgtttggatgatatggccattgcccaccactacagggactcctatcgacaccccagccacagggacctcagggacagaaacagacctatggggttgcatggcacacgtcaagaagaaatgattgatcacagactaacagacagagaatgggcagaagagtggaaacatcttgaccatctgttaaactgcataatggacatggtagaaaaaacaaggcgatctctcaccgtactaaggcggtgtcaagaagcagaccgggaagaattgaattactggatccggcggtacagtgacgccgaggacttaaaaaaaggtggcggcagtagcagcagccactctaggcagcagagtcccgtcaacccagacccagttgcactagacgcgcatcgggaattccttcacaggcctgcgtctggatacgtgccagaggagatctggaagaaagctgaggaggccgtcaatgaggtgaagcgccaggcgatgacggagctgcagaaggccgtgtctgaggcggagcggaaagcccacgacatgatcacaacagagagggccaagatggagcgcacggtcgccgaggccaaacggcaggcggcggaggacgcactggcagttatcaatcagcaggaggattcaagcgagagttgctggaattgtggccgtaaagcgagtgaaacctgcagtggctgtaacacagcccgatactgtggctcattttgccagcacaaagactgggagaagcaccatcacatctgtggacagaccctgcaggcccagcagcagggagacacacctgcagtcagctcctctgtcacgcccaacagcggggctgggagcccgatggacacaccaccagcagccactccgaggtcaaccaccccgggaaccccttccaccatagagacaacccctcgctagacgtgaactcagaactgtcggaggaaagacaacacaaccaacgcgaaaccaattcctcatcctcagatgctcaaagttgttttttttgtttgtttgtttattagatgaattatcctatttcagtacttcagcaagagagaacctaactgtatcttgaggtggtagtaaaacacagagggccagtaacgggtcgtaatgacttattgtggataacaaagatatcttttctttagagaactgaaaagagagcagagaatataacatgaaatgatagatttgacctcctccctgttattttcaagtagctgggattttaaactagatgacctcattaaccgatgctttaccaaacagcaaaccaagagattgctaattgctgttgaaagcaaaaatgctaatattaaaagtcacaatgttctttatatacaataatggaaaaaaaaaaaagaggaaaaccctcaagggcatgagcattggatacagcagtagacattttaacaagaagatgaatggcgtccgtgggttgctaactgaactttgaagacccgctacaaaacgcgcagatgtgcagcagattggaaggagacacagatgttcggtttttttcctgtttctgaaaagaaataataatatccaggtcaacagaatgaaaaatgaaagatgatttgcaatgggatgtatgaatacagcagcaagaaaaaaaaatgccataatacaaaaggctccatatatatatatatatatatatatatacacacacacacacgcacatatacacacacacacacacacacacacacacacacacacacacacacacacacacacaagtaagagactcagcctgcagttaattagcattctggcagttttgacatcagccagctgccctaaataacccttcaacgtttcttcacttttgcaaggttccacagagtaagacattgggtctattccagctcattcattttatattgaaaaaaataattttaaaaatggtggcttcagctccagcccctttccaaaatttttcaaccccaccctgtttggatttttaattaaaaactagtagttctcttggtgttaaaacacttctgtcctgtgaggtttcccaatggtgtttttcttgtaaatgtgttggacaaatgtgaagatgcattgtagtttaaccatatgcccacatttagtctctttattcctagttggtgagaaacctgtatctttctatgctgcttttatatctgtatgtattagtgatatttctctagtagttaaaaaaaaaaaaaggaaaaaaagactctttttggttgtcctcaag

SEQ ID NO: 116 - DNA, 7737 bp, Homo sapiens
ggagggagaaaaagagagagactgactgtatctggggattctggcaaggtgaagagctggtctgtttggcaggaccttcccatctgggatccatctgtgtttccctggaatgggacaggcagctctagtcagtgagaaatcgcagatgtgagagagctgacacatgtccagctaatgaaaggaggaggaaggctggtctccgattgagctttgaagattaggaggagaaaaagaggagctttggaatatctatttcaaataaatttggtgtatttaagaatctggattgtttataatttgggcatttgggaggtggggttttgccatgttgcccaggtgggtctcaaactcctgggctaaagcgatcttcccatgttggctgcccaaagtgctgggattacaggcaagagccaccataccagttcctgtctagatattatgatgaagattgaggatggtagtttttgtggagcacaatcctgactgtacctgtgatgttgcattcatcttttggaacataagcagatcaccaggtgaatggctaaagaatctggaataagcttgaaagaaatacaggtcctggcaaggcaatggaaagttggtcctgagaaaagggtgccagcgatgcctggatcgcctgtggaagtgaagatacagtccagatcctcacctcccaccatgccacccctcccaccaataaatcctggaggaccgaggccagtgtccttcactcctactgcattaagcaatggcatcaaccattctcctcctaccctgaatggtgccccatcaccgccacagagattcagcaatggtcctgcctcctccacatcatctgcactcacaaatcagcaattgccagccacttgtggtgctcgacaactcagcaagttgaaacgctttcttaccactctgcaacagtttggcaatgacatctcccctgagattggggagaaggtgcggactcttgttcttgcactggtgaactcaacagtgacaattgaggaattccactgtaagctccaagaagccacaaactttccccttcgtccttttgtgattccatttctcaaggccaacctgcccctgctgcagcgggaactgctgcactgcgctcgggcggccaagcagaccccatcccagtacctggctcagcacgaacaccttctgctcaacacaagcattgcatcgcctgctgactcgtcagagttgctcatggaggtgcacggaaatgggaagaggcccagtccagagaggagagaagagaatagttttgatagagacacaattgctcctgagcctcctgccaagagagtatgtaccatcagccctgctcctcggcacagtcctgctctcactgtgcccctcatgaatcccgggggccaattccatcctacccctccacctcttcagcattacaccttagaggatattgcaacttctcacctgtatcgggaacccaacaagatgctagagcatcgagaagttcgtgatagacaccacagtcttggtctaaatggaggctatcaagatgagttggtagatcatcgtttgacagaaagggaatgggctgatgaatggaaacatcttgaccatgcgctgaattgcattatggaaatggtagagaaaacaaggcgctctatggcagttctgcggcgctgtcaggaatcagatcgtgaagaactcaactactggaaaagacggtacaatgaaaacacagagctgaggaaaacggggaccgagttggtctccaggcagcacagccctgggagtgcagattctctcagcaatgattctcagagagagttcaacagcaggccaggtacaggatacgtacctgtggagttttggaaaaaaacagaagaagctgtgaataaggtgaaaattcaggccatgtcagaagtacagaaggccgtcgctgaggcagagcagaaagcctttgaagtgattgcaacagagagagcacgaatggagcaaaccatagcggatgtcaagcggcaggccgcagaggatgctttcctcgtcatcaatgagcaagaggagtccacggagaactgctggaactgtggccgcaaagccagcgagacatgcagtggctgcaatatcgcgcgatactgtggctctttctgccagcacaaggactgggagcggcaccaccgcctctgtggtcagaacctgcatggccagagcccccacggccagggccggccgctgcttcctgtaggcaggggctcctctgccaggtccgccgactgcagcgtgcccagcccagccctcgacaagacctcggcaaccacatcgcgttcctcaacacctgcttctgtgacagctatcgacaccaacggactctgagccccggactctgcttaccctgatggctgctcagcaccacagagtgcttgggctgagggactgactgttggaacccgtgcatgtagctgccgggtcatcagcaagaaatgaattggaggcaggaagagtccaagcctgaataataacaccccacagcctctctgtgcacttgctgtctgcggagccagtgtgccattctctgcacatgggcagccagcctgagctgcctcctccatggctttcctggtttgttcctctctccactgaagctgacttagccggccccttttcagtgtagaccaccagctcccctccccatctccttgagtcagcagactgtccaatgtgctcagccaggctggaggcggcaggcggcaggcagcaggctgtggaggaggcccctcggtcagggagcggcctgcctcacccctgaatagctccttcggccccatctccatcctcagcagatgacactgattggcctcacggggacttgggtaagcaacaggcggcattcaggactcttctcaaccctgctgttcagacttgataagatctcagagtccacaggaaagaagtcactgttgcaataaaagcacccgtagtagcaaaaacataaaacaaataaaacttcccccacatcacagatgattttggacaagattttccaaccttgctggctactttagtttgggacctgttttttttctcatttgattttgcttgtgcagaaaatagtttccagcacatggattgatctgagagagaatgaggctcagttgtggatagtctgttttctctgagcatgttggccaactagtatcgtcaaattattgagtggatcatctcttggaaatgcagaacttctgccaccacttggctatttgcacagtcatcttgttctgtgtccttttatctctcagaccacacacatctggaacgctgtgggcatcttctgcccatgggctccatttggcacctgctgagccacagttgtcctgctggatgtgctgtgcaggttggtaggacttgcccccactgtcaaggcctggtctcatctgaaaagccctcctggacctcaaagaattcttcagacctcatagttacaggtcattatatctactatgttgatttatcatcaggcacacaacttctgtttccttctcttgtgttatctgatagcgtccctccttgagctcatcagaaaggttttatgaaatgtgaaccattttgggaaaagctgatcaatttttcttcctagcttcccattttcaaatgggacatcactcatatccctttcagaatgttaggaactgcctcccacattcttccctgtctttttgggttttgttttttgttgttgtggtggttttttaacacaaagtctcactctgttgcccaggctggagtgcagtggcatgatcttggctcactgcaacctctgccttccaggttcaagcaattctcctgcctcagcctcccgagtagctgagattacaggcgcccaccaccacgcccagctaatttttgtatttttagtagagacagggtttcaccatgttggccaggctgatctcgaactcctgacctcaggtgacctgccttggcctcccaaagtgcagggattacaagcgtgagccaccatgcccggcctgtctttttggttttgatgggagtctgaggaccccgacccctcctgctctccatctttgagcctctggcatcctctcacacccagaaatcagttggagtaagtttaattggccctgctccagctggcctttgaagcacaagtttaaatctccaccttctgtgcactgaccagagtctaaaataaaagttgtcagtaccataaaggaaaagggatccacacaggtagccttctccttggatacaggtacatcttactgtaagaatttcaagtcctggctgggcgcagtggctcactcctgtaatcccagcactttgagagaccgaggcaggcagatcacttgaggtcaggaattcaagaccaacctggccaacatggtgaaaccctgtctctaataaaaaaaaaatagaaaaatcagccgggtgtggtggcacacacctgtaatcctagctactcaggaggctgaggcaagagaatctcttgaacctgtgagccagaggttgcagtgagccgagattccaccactgcactccagcctgggcaacagagcaaaactctgtctcaaaaaaaaaaaaaaaaaggcaaaattaaagaatttcaagtccctaatttactctaaccaagcattttcagtcttacaaagaaatctagtgcacgacacctttaaaatgcctagatttccattgcctaaagtaaggtgtgaccagtgaaacaacagcagagaatcatgttcctttgctgtggaacacataagccccacagttttccagtcagcctaatacatgggtatcccccgaccccatctgcctccttaagccacagtccttggtggggaactctaagggggacggagtcagtaccccggacagggccacatttgcatgagacatggctgtctcacaggtcacagagccattacaacagcttactagtttttcatggatttgttggattaacaccttaagcaggttttttattgttattttgtttgtttgtttgttttgagacgggagtttctctcttgtctcccaggctggagtgcaatcgcgcaatctcggctcacggtaacctctgcctcccaggttcaagcgagtctcctgcctcagccttctgagtagctgggattacaggcatgcgccaccacgcccaactaattttgtatttttagtagagacggggtttctccttgttggtcaggctggtctcaaaccccggacctcaggtgatccccccaccttggcctcccaaagtgccaggattacaggcatgagccactgtgtccggtcttgagcaggtttttaaaatctccagtggccataaaactagccagggtagctcatgcttttactggttggaataaggagccaaaaccaacaaaataatatttattagggctcgatgcccatttctgtggctaaggcttaggtttggtgtgcagagcctggcctgctcttgtgggctgtggttgctgtgacagtttcgttttctgaatctttgtaatgctcttccaccctgctcgtgctgcccagaggctgatctgcaaacctgggcagtattccacactgaagctcagtttgcaaaccttctgctgtgttaattctggtcagtttcacacagaagtcacgagggcctctgcccaggaccttctattcacatttcaagaatccctttctgaaattctccaactctctggtcaggaggaggagcaccattggggcggggtaggcagctagaggcgcaggagcgaatccaggttccttgcgtggttcccagcctctgctgacagcacctcagctaccaggtggggagtggaaattcagcctgcttagaggactgacctctacagttcatatttgcagtgacataaaaggcaaagaggagctggcatggtggtacagaaggtatcagtcaagcgcaggctcttcagaaacctagaaactaaaaagagatgcaacatgtgactggccatcagccagacatgtctagggtgagaccagtgctcagcaccacccgccaaggaacactgatgagttgtgggacattatggtcggccaagtgaggaatgattgcagggaccagagaagaccaaagatgccagatgtccccagagtttcttgagggctgggtttcacgtctttgcttgtcctttttgtccccacttgcctgcaccgtgcctgactcatccagtggggaaggtgactcaagaagttgtttaagcctaggcctaggcagtccacttcgggaggtgggggcactccacactggggggccctgcagctccagggctggtgctctagcagatccgctcaggcacggttgggtgaccgtggggtcaccgattgcgtagattatttctagggcagtgctgggttagaaatgtctgtctggaaacaggacacatcttgccaccacaagtccacacctggccttggctgctgcccgctctctgcagcgtggatttcctttgcccatttgggccagaaggtcaccaggagttcatcactgcttagtgtcaacttgacatcttcagcttccagacagaaaacccatgctttactttgtacagccctgtcccagagttagtaagcctcggcttgtcacctgcttgcaaagggtatagacatcattctgggtagttctagaggatatcgcaacaagtgcgtttgaaggttcagcacagctggaattgtacggtagtgagctcttcaaaatgaaaacagaatgaccggatggccatctgtcctggaaactgtagaattgaataaatcactgaaaatagaacacttcttggaggctttcttcagaactgaactagaaacaaggtttccaggctcccaggtcagtagaccaaaccaacttccttagatttttttttttaagctgtttgcagaaaactgggtggtagcgtgtctgaaccaaacggaagaatagccagcggagcatggactgttccagcacgggccagatggccagctgtcgagagcagccctgcccagattgcggtgggggctgtgccagcggctccgcagggcccttccaactctggagtgtctgtagttcttgtgaaaccaaaacgttgactacctgcctctttcctcgggcatcgacgtgctcatttccaaagatgatggtgcaggtgaccttttccatcgtgagctaagagaaggttaggaggcctgaggggcgggccttgtgtcccctcctccccctccacagcccctgaggtggagcttccctcacagaccccatctggtcgagcctacggctgcccagtgtacactcagtgatgcttataccaaatagggcatgtgcgctggtgtctgttggggacagccccatccctaccttggagtcggcagagaagcagcaataagcattaggcgaatgattgaaagggctgctgcgccaagaggccttcagtccccttaacgtggctttccaacttcctgacgaggctacaaaggctccgctcacaaaagaaagccaataatgtaaataaatagaaaacgaagcctccacgcgtggtttttaaagggggatgatgaatgtgacaccacccacagaatgcattagaatctggtttttctgtgctttgtcattttactctgataggaatttttgttacctaactctgtgcataacttatttaatgtactgtataaatgaaccaaaactgttaaatatgtatttagtttgttctacttaaagtagtcaataaaaaggctatattcctt

SEQ ID NO: 117 - DNA, 4265 bp, Homo sapiens
agggcagaggacacccagttggtggccgggagggcctcggctttccagggacagaggcccaactccaggacgccccagctggcccagcccctcctctttccctcaaggctgcaggaggtcgggaaaggcagtcctggtagaggcctgtcctgggctccaggttggcccctgagggtggccctcctcatgccggcttcaagactgagggacagggcagccagttcagcctcgggatccacctgtggctccatgtcccagacgcaccctgtgctggagagcggcctcctggcatctgccggctgctccgcaccccggggtcccaggaagggcggcccagccccagtggacaggaaagctaaggcctcagcgatgccggactccccagcggaggtgaagacgcagccccggtccacaccccccagcatgccgcccccaccgcctgccgcatcccagggggccacacgccccccctccttcacgccacacacacatcgagaggacgggcctgcgacgctgccccacggccgttttcatggctgcttaaaatggtctatggtctgtctcttgatgaacggcagcagccactcaccaacagccatcaatggtgcaccgtgcacacccaacggcttcagcaatggcccggccacctcgtccacagcctccttgtccacacagcacctgcccccagcctgcggggcccggcagctcagcaagctcaagcgcttcctcaccacactgcagcagtttggcagcgacatctccccagagattggggagcgcgtgcgcacactggtgctgggcctggtgaactcgacattgacgatcgaggagtttcattccaagcttcaggaggccaccaacttccctctgcggccgtttgtcattcccttcctgaaggcaaacctgcccttgctgcagcgggagctcctgcactgtgcacgcctggccaagcagacgcccgcccagtacttggcccagcatgagcagctcctgctggacgccagcgcctcctcccccatcgactcctcagagctgctactggaagtcaacgagaacggcaagaggaggacgcccgacaggaccaaagagaacgggtcagaccgcgacccgctgcaccccgagcacctcagcaaacggccatgcaccctgaaccctgcccagcgctacagccccagcaacgggccaccgcagcccacaccgccgccgcactaccgcctggaggacatagccatggcccaccacttccgagatgcctaccgccacccagacccccgggagctacgagagcgccatcggccgcttgtggtgcctgggtcccggcaggaagaagtgatcgaccacaagctcacagagcgtgagtgggcagaagagtggaagcacctcaacaacctcctgaactgcatcatggacatggtggagaagacgcggcgctcgctcacggtgctgcgcaggtgccaggaggccgaccgcgaggagctcaaccactgggcgcggcgctacagcgacgccgaggacacaaagaagggccccgctcccgccgcggcccggccccgcagcagctccgccggtcccgaagggcctcagctagacgtgcctcgcgagttcctgccgaggaccctcaccggctacgtgcctgaggacatctggaggaaggctgaagaggccgtgaatgaggtgaagcggcaggccatgtcggagctgcagaaagccgtgtcggacgcggagcgcaaagcgcacgagctcatcaccacggagcgtgccaagatggagcgggccctggccgaggcgaagcggcaggcctccgaggacgccctgacggtcatcaaccagcaggaggactccagcgagagctgctggaactgcgggcggaaagccagtgagacgtgcagcggctgcaacgcggcacgctactgcgggtccttctgccagcatcgggactgggagaagcatcaccacgtgtgtggccagagcctgcagggccccacagccgtggtggccgacccggtgcctggaccgcccgaagccgcccacagcctgggcccctccctgcctgtgggtgctgccagccccagcgaagccggctctgcggggccttctcgccccggctcccccagcccacctggcccactggacaccgtgccccgctgaccccactggcccctggcctgccggacacagcaccgtgccaaccccacccagctccaggcccaccggatgctgtgcctggcctccgatgcctggcctgccagacactgcgccccgcctgacctgggggagccgaccaattagtcactgctgctactgcccctctccgaaagaagacacagaaccaacaaaaccgcattcagtgcacctgcctcagctacctaatgattccgcgcggagacctcctgacaacgtctcttcaagcatcctcagaagcctcgactgagctttagacagcagagcagatgccgcaggcgcggcggctctgcccacctctcttttcctctctgtctgtctctccccctctgtcttctctatcctctctctctctatgactatcacacactttctcttcaatgaaaaaatcgaattggtggcttatattttcagcaaagaattttggggggttttgtgtgttggcaaaagagctactcagaaatggacaaagaaaacgggggggttctccccctcctgattaaaaagggagaaagaaaactgcgattttatagctggagatctgaacccagctgtgcccctcccccaggggcgtgaggctgatcagcgaagacgggaggaaagatttcgatttctgactcaagatgcatttttggtttcagatttttttttcctgtaatgttaaactctttggctttaagtaaaaatccaaaaagtttttttaaaaaagcaaaggaagcatacttgtgaactaccttgctagctagccagccaaggataccggacacacctctgctccaaaggaaatccaaaaaagcaaacacaagaaatcaaaatccaaaatttgtttgtcactgccaaagtatttttttcactgtttcacttgctcttgggtttgtttggatgtgggtctttttctcttctgttctgattttgtttgtgggtgtcgggatatttgggtgcagagggtttgtgcccagttagaagcgacttttgttctcttctgcgtaggcgttggtgcgtccgccgcgtgtgcgtggtccgtgtgccgttgctccggcctgcgtctccatatgtgtaggaaaggacacgccgtctgtcctcacgccccctgtgacttttcatatttccgttttccacttgtggaaaaaaagtgctaaagttttcttcccagagagagcataattccgaaacaaaactgtgacaatcttttgggttgattctcgactgcttttcgagcatgcggagccagcaggcctccctgaaacactgcttctcggccagcccgtcctcctctacctctctcctctccgcgccctccgacctctctcggccccctcaccccagctccgacctctctcagccccatcgccccaactccaacctctcggccccatcgccccaccgcagctactcccctttcttccaaacttttgcagaaaaaacaaaaaaactacaaacaaaagcagccctctgcctcctccccagggaagaccctgaccgtgtacatagccctggtgctcctgcccagccacccctcagatgcgttcgcctctggccctggggtgtgtctcggtgacgttttctatcagacgtgctccctcccatcctccagccctgcccaccctccctccactcctctcaactgcctcagcgatttcaagaaggaaataaagggataaagaaattcatgcttgcaccgagtacaaggacagacagcaggcacggcccgcagcctggcatctgtgcgtgtggcgtggcccgtggcttggcatctgtgtgcgtggtgtggcccgtggcctggcatctgtgtgcgtggcgtggcccgtggcctggcatctgtgtgtgtggcgtggcccgtggcctggcatctgtgcgcgtggcgtggcccgtggcctggcatctgtgtgcgtggctatcaggagttctaggaactcagtgcaatacgggagtgacccagctactgaaccagccacgaacagcccgccagaggcctgaagctgagcgtgtacgttaatgtgaatgtatatagtctttgcagaggtccaaatgatattcatgatggtaataaacgagatgtttgccaaataaaaaacagaaaccgc

SEQ ID NO: 118 - DNA, 2443 bp, Homo sapiens
gtgagggaacgcgctttcgaggcggaggttaggagcggggagcgcgcccgggtccagcgtcctgcttctccgcttcccgcgctgagctcttcgcctgtcgctgaggcgtcggtgccagctgcgtgaaggatggagagggcggggcgcgaatcctgagccagagactgagtgcttgggggtgggccgagcacttgggggccgctcttcggggcccgggtggtctggaacaatgttgcttggctgggcggctgcgggatagggcggaaggggacaggcttgaggcttggataggcgtgaggaggcgcatacgaccgcacaacccgaggtttgtaactgtattcggaagacgccgggtccggctgggactgccagaggaacctggctttgcaggactacggaggagtaacgtcgagtgaattggaagagggcccagggccgcacaagcagcgtcaccctttacaccagaaagctggcgggcactatggggaaaaaacaaaacaagaagaaagtggaggaggtgctagaagaggaggaagaggaatatgtggtggaaaaagttctcgaccgtcgagtggtaaagggcaaagtggagtacctcctaaagtggaagggattctcagatgaggacaacacatgggagccagaagagaacctggattgccccgacctcattgctgagtttctgcagtcacagaaaacagcacatgagacagataaatcagagggaggcaagcgcaaagctgattctgattctgaagataagggagaggagagcaaaccaaagaagaagaaagaagagtcagaaaagccacgaggctttgctcgaggtttggagccggagcggattattggagctacagactccagtggagagctcatgttcctgatgaaatggaaaaactctgatgaggctgacctggtccctgccaaggaagccaatgtcaagtgcccacaggttgtcatatccttctatgaggaaaggctgacgtggcattcctacccctcggaggatgatgacaaaaaagatgacaagaactaacgctcctgagtaccagcccctgtcacatctgactgtgggtttcaagtgggaagggaaggagttctacttgtcttgacaccatagaggtggcttgagaagatgtcctttgaagagccagtatagtttctgtgccctgcagcagcccaagtgctttaaagccgtttcaagctgtatagtttgcacacccatcccagtggaggggaaaggggataagtgtttcaaggcaaccttttctgcactttgctgcgaaaagcaaagggccttctatgaaggacaaaacttgcagaattgggtgtgtgggagagcaaaaaaatactgtagatcttcaaagagcatctccacaacccacagccttcttcccaatagtgttaactctgcatttttacagcgtagcatgtgtgtagtttttggctattactggtgtattatttgggggagggagggatggggaggggagaaagggagatgggtagcatcattttgattaacatttggggcctgataggggaaatggtgaagcaatggaaaagaacagacaactaatgatttgcttctatgtccagaatattttacctttaaaaaaatgtcattggcaccataaataaggactgtgagagactgtttaaaagctgtgaaagtctgaaacctataagccaaggtgttccctgcctaaacttattgctgttcccacaaaggactaagcctgttcataagttaccaaagttgccattttggagatggaaattgacgaggagggaaggtcttttattggagagtatacagtacaagcagatcattctgccttagaggtgctaattcccgaaattagaagaccctttcttttccagtaacgaagttataaatatcagcttgttcatccaagccactggctgaggtgttaggaagaggaagagggtggtagaggaggtaagacagtagggaaagacaagggcccatgctcttagtggggaaaactcttggagccgtttactttgagctttgaacactgaaaccattgttggcagggttcagtcactgacagcacaagtttcactgaattgatccaagagtttagtgatttcaaaagccttggtctcaggagaagattaaactttcatattgggcagtggttcactttaaaacacacacatacacacacaaaacaattttttaagaaatcctaataagtaacatacccaaaatgctctgtcttgagtcatgagaaccatcagttcttgatattgtctagacttgcatctagagctacgttgtaaaattcttttaggcatgtgttagatttctgtgtaaactttgtttaaatgtaaacttcatactacattgtcagtttttgtcttaataaaactatagatttataatccctgaaaaaaaaaaaaaaaaaaaaaa

SEQ ID NO: 119 - DNA, 356 bp, Homo sapiens
ctgccagagatgagtgcaggtgaggagagtagcagctcggactccgaccccgactccgcctcgccgcccagcactggacagaacccatcagtgtccgttcagaccagccaggactggaagcccacccgcagcctcatcgagcacgtatttgtcaccgacgtcactgccaacctcatcaccgtcacagtgaaggagtctcccaccagcgtcggcttcttcaacctgaggcattactgaagccccggcgccaccagctgcgcgtcttactccccttccctgcctatggtgtcgcttggctaagtgactcccagcccaagccccctcaagagtctgatcgtcgggggaggaggagtggg

SEQ ID NO: 120 - DNA, 1837 bp, Homo sapiens
cgctgaggagactccggtcactgtcctcgccccgcctcccccttccctccccttggggaccaccgggcgccacgccgcgaacgtaatagctcttcaagtctgcaataaaaaatggcctccaacaaaactacattgcaaaaaatgggaaaaaaacagaatggaaagagtaaaaaagttgaagaggcagagcctgaagaatttgtcgtggaaaaagtactagatcgacgtgtagtgaatgggaaagtggaatatttcctgaagtggaagggatttacagatgctgacaatacttgggaacctgaagaaaatttagattgtccagaattgattgaagcgtttcttaactctcagaaagctggcaaagaaaaagatggtacaaaaagaaaatctttatctgacagtgaatctgatgacagcaaatcaaagaagaaaagagatgctgctgacaaaccaagaggatttgccagaggtcttgatcctgaaagaataattggtgccacagacagcagtggagaattgatgtttctcatgaaatggaaagattcagatgaggcagacttggtgctggcgaaagaggcaaatatgaagtgtcctcaaattgtaattgctttttatgaagagagactaacttggcattcttgtccagaagatgaagctcaataattgttcacattgttcttttatatatatttatatatatatataaaaattgggtcttagattttgatttactagtgtgacaaaataactacatcctaatgaaaatcaagtttgatatgtttgttttgaaagtagcgttggaagagttgttgggggttttttgcatccatagcactggttactttgaacaaataaataaaagctttctgtagttgcttcctttatcagaaaagaacatttgataccatggtatatcatttcctcttcattaaagaacagcttttctaaatgttgggggaaatgtccatagtcattactcagtcaaaacttgtgttctcatgagcctaaggaccattctagatttattacgtgttttttgtgtgtgtgtgtgtgtgtgtgtgtgtgtgtatccataaaatgcatatgtaaatttttttttgtttttaagcattcacccaaacaaaaaaatcacaggtaaacccatgtttctgagatgccattattccaagcaaaataagagataatcccttcaagttaaattgaaaattttcctgaaaccatacatttcaagtgaaataagtaattctagataggacaatttaaattggataattttaaagtgtctataattgcagtggtttatttgcaaaattcctaaaaggaaaaattttatcactgccatcacagcaggtttcctcatccagatgaggaaactagacaaatgctagtgtgttttaactagctaaacaaaactaagttaaatgaacatttaaaagtttccctagcgggccattccttagcaaaatgttggaatccctgttgctacattgactaaaaggtcatgatgaatggaatatgtaagacttggctcatagaaacctaatcagatggttagaggtgttggcagtttaggacctgctgtcataaatgtgtgaacaaccttttgtaacctaacctattgacctgcatgttttttctttaccccaattcattacatggaggctcaatcttgagtttgctttactggttcagcaaaagccaggaagaacaactttgtagtaatcaaaatgttatccaactgtatattgtttactttattgtaaatactggtgaacagtggttaataaatagttttatattcctttatgcaaaaaaaaaaaaaaaaaaaaaaaaaaaa

SEQ ID NO: 121 - DNA, 2655 bp, Homo sapiens
agccggggcgggcgcgggcagcggcgggccggccgggctgtgcggggcgagcggcggcggcggcgggggcgcttcggccggggcggcagctgggcgccggcgggagctagcagcgtctgcagccgcgccggccgccagcgccccggcgcgctccggctcggccatggagctgccagctgttggcgagcacgtcttcgcggtggagagcatcgagaagaagcggatccgcaagggcagagtggagtatctggtgaaatggagaggctggtcgcccaaatataacacgtgggaaccggaggagaacatcctggaccccaggctgctgatcgccttccagaacagggaacggcaggagcagctgatgggatatcggaagagagggccgaagcccaaaccgctagtggtgcaggtgcctacctttgcccgtcgttccaatgtcctgaccggcctccaggactcctccactgacaaccgtgccaagctggatttgggcgcgcaggggaagggccaggggcatcagtacgagctcaacagcaagaagcaccaccagtaccagccgcacagcaaggagcgggcgggcaagcccccgccgccgggcaagagcggcaagtactactaccagctcaacagcaagaagcaccacccctaccagcccgaccccaaaatgtacgacctgcagtaccagggcggccacaaggaggcgcccagccccacctgcccggacctgggggccaagagccacccgcccgacaagtgggcgcaaggtgcgggggccaaaggctacctgggggcggtgaagcccctggccggtgcggcgggtgctccaggcaaaggctccgagaagggcccccccaacggaatgatgccggcccccaaagaggctgtgacgggcaacgggattgggggcaagatgaagatagtcaagaacaagaacaagaacggacgcatcgtgatcgtgatgagcaaatacatggagaacggcatgcaggcggtgaagatcaagtccggcgaggtggcagagggggaggctcgctcccccagccacaagaagcgggcagccgacgagcgccaccctcctgccgacaggacttttaaaaaggcggcgggcgcagaggagaagaaggtggaggcgccgcccaagaggagggaggaggaggtgtccggggttagcgatccgcagccccaggatgccggctcccgcaagctgtccccgaccaaggaggcctttggagagcagcccctgcagctcaccaccaagcccgacctgcttgcctgggacccggcccggaacacgcacccgccctcacaccacccgcacccgcacccccatcaccaccaccaccaccaccaccaccaccaccacgccgtcggcctgaatctctcccacgtgcgcaagcgctgcctctccgagacccacggcgagcgcgagccctgcaagaagcggctgactgcgcgcagcatcagcacccccacctgcctggggggcagcccagccgctgagcgcccggccgacctgccaccagccgccgccctcccgcagcccgaggtcatcctgctagactcagacctggatgaacccatagacttgcgctgcgtcaagacgcgcagcgaggccggggagccgcccagctccctccaggtgaagcccgagacaccggcgtcggcggcggtggcggtggcggcggcagcggcacccaccacgacggcggagaagcctccagccgaggcccaggacgaacctgcagagtcgctgagcgagttcaagcccttctttgggaatataattatcaccgacgtcaccgcgaactgcctcaccgttactttcaaggagtacgtgacggtgtagccggagggcgtcggaaggggaagcgccattcccgcgggggggcggggagctgagcacctggggcctcggggcgggctcccctctcgccaacccgccaaccgcgagagacccaggctggcccccagggtgaggacgcccggagcggaggtaaccatgttccccctgcggcggctgtcagacctgggcggaggccccttccacgcggtgccggcggggctcgccctctcctgcccttccccgctggagatggacccccggaacggacagggcagctctgcgcccggcctcagagttctagtattatattttaaccgtgctaacttgtcaagtgctgactctactcccgtttgtacgtggtgttattattgaaatgtattgtttgagctcaaaaggcccgaccaccccccttcgggctgctatatatatatttatttgtaggtatttatatattgaaatataaaaacctagatttatggagtttcctctagatcatgttatattctatatcagacaaactattttcttttgacctttcttcccctccatccagtatttcggttgatttcattttctcccctctcttccccttccacgaactgcaataccagtaaccttggtatatattttttgatactgtacacatggatgtcttgtttctatgtgcaaaaaaaaaaaaaaaaaaaagtttgttaaaaggctacacgagctctctagaaactgctgctactagaaatgtctaaactataagcttccaactattacctgcttgaatgtaaatattaaatggagatgttgaaggtgcaaaaaaa

SEQ ID NO: 122 - DNA, 11571 bp, Homo sapiens
gaaggatccgttttggcgggcggttggcgttgcgcagaaggcggcggcggtggtggcttgtggtgcggcctcaccatacaggaacagggcagacgttagcgtgagtgatcactctcaatcccggggacctggtggccttagtctttcaggtggaacggtgtgcgacatgggaaagaaaaccaagcggacagctgacagttcttcttcagaggatgaggaggagtatgttgtggagaaggtgctagacaggcgcgtggttaagggacaagtggaatatctactgaagtggaaaggcttttctgaggagcacaatacttgggaacctgagaaaaacttggattgccctgagctaatttctgaatttatgaaaaagtataagaagatgaaggagggtgaaaataataaacccagggagaagtcagaaagtaacaagaggaaatccaatttctcaaacagtgccgatgacatcaaatctaaaaaaaagagagagcagagcaatgatatcgctcggggctttgagagaggactggaaccagaaaagatcattggggcaacagattcctgtggtgatttaatgttcctaatgaaatggaaagacacagatgaagctgacctggttcttgcaaaagaagctaatgtgaaatgtccacaaattgtgatagcattttatgaagagagactgacatggcatgcatatcctgaggatgcggaaaacaaagagaaagaaacagcaaagagctaaaggaggggatggtctctgtcatttctctttgtacataatacattcacctccctgcctcctctcctttctacccacccctttctatcctaaacacatccataaaaaatgtgcttatcactgtgctccacaggagaaatgttggtattggttctcttgtaacataactgatggtctgattaatgataagtgtctctctgtgaagaccaggcatttacatactgagtgtaatacccacaatttttttttcctttgccctgatctcttccttctgcttccctgtgacctcaagatgagtttcaactttttaatcaccttagagtcttgatcttttcagggttggtcgctttttaggttgggggattttgttacaatgatgttgaattttggtttcttgctttggttcttagaacatgttgctgactagctggcctttgttctgacatgttgagatggaaaggatgttgcccatctgttaaaaagccaatagcaactgcctacctgttggggctttcccaaccttgttcagctctacccaggagaatacagggtttctggtgtggtcttctgggccaccctctgttgttcatcctcactcatcctcccagaattactccatcctttggaagatttgaaattttacactgaaatctgtcaagacactctttttagccccaggactttcggtattgcttttagcactccccacttctgcttctgtaaagtgatatcaatttgtgataaaatgacaagattattaactgtgcagatttgtagctatagtacatgaggatgatggggtagggtacaattgtctttattatcatatatggtatgtatgtatgatttctttccattcctcatatttagactgtatatttatgtaggtgtgagtgattgcctggtgcttgcttgtgccaaggtgctaggcaccctccaaccctgccaacttttgtggcctcccaaagcattcctgttaccaaagaggcttcaaacctgaccctcacttctcagtggacccgagtttcccttccatgccattattttcagtggggaagttttagaggtgagctgttggccacaatatcaattttaagtgttcatagcagttatgtctcctgcattcttggctcctggatttaccaccaagagtccccaaaatattaatgctcttccctttttctaccctcaaacttatagttgtatcttattttttaaaatgaattttcatggccaggcacagtggctaccgcctgtaatcccagcactttgggaggctgaggcaggagaattgcttgaagccagaagtttgagaccagcctgggcaatgtagtgagaccccctgtctctaaaaaatataaataaaaataaaggcatgttcctgaaagactgtcaccttggaaagtgacaggccctggcattagcatgttgacacacccttttcttcttactcagcaaaatacttcgttttggtttcttcttgtgttgctattgagaaatttgtctgatcatatccttctgcctttgtcccccaagaaatgccctactttatccttttctttttgtagttgaggagggctagagaatcacaattaaaagtaaggaaatagcagggttttgaggatccttgtcccagccccaaagctgaggaaataagaataaatgcttaatatagccttaattctagagcgcaccagccatgaggctgcttttcttgttgtttttgatttttaaaacatacagctgtctggccaggagcatctaccatttctagattattcagagtaatgaggggaatggatggattgctccagtccacagatgagccacataatatgcaaatcatatacccattcatagcatttgttaacattgcttccctgctcagctgctgattgaattctgtgtgcttatataaattatgtcaaaaattatactgcataattgaggtgacagctgttgctgcagtgacatgacagactggaacaatgaagcttttggtttaagtcagccaggaaaatccttctgaatggtaatgtgattgggcaagagctcataaaccatacctcaagtgggtgggagttttatctctatattccttctctctctgaaggaattaaaggcctagatcaagtgctggataattgacaattgcttgtacttaatctgatcggtatctaaaagaaggaaaggatggtcaggaaacatttatcataaatgtagccaaggatatcaattagggtagacaagaataggacaaaaataggccagagctcctgaggaggtgatatgggtctcttgatttgcagaaaatgacagcctatccaagtggcccagtgtatgcctcccagtagcagtgggcatgtaaactgcagcgaccttatttttaaaaccaaaaacctagtatgtggacaaagaacatgacaatatttggtactgagattggttctgagaaacctggggcatgtggctgctgtggttataggtaatatttaagacattcataaaaatctgatattcttttaccgaaataaccccagtatcatctactacttaccatctgttaatagactttactctgtcttttttgtcttcggtttattgtactgagtgccgccaaaacaacttttgttctcttcctgcctacctgcagctggttctataggaatgtagggagccagaggccagtattgatttcagcccttagcacaaaggaaatcagatgcctgcttccagcatttgttagtgttgagtagatgttcttgccctagaagaattacagcctcaaacagaaacctgtttcatggagctttctcccctcagaagagttaatagttaagagctaagcactcttaaacacctaagtctcaaatgctaaaaatttatttttcttgtgtttagtcctctttcaagacatctttctaagcctttcagtaatcaacattaaaagatctccctttcttcagagttatagcacagctttgcccagtagaggctaccaaggacagcttagcagccctttgattgctgggctgggcagatggccttcaagttaagatcaaatgccgggaaaatcagcctacatgggagcacccattttaaacctggagagaaccatgatgttttcttcttcaaataacaatctagttttttttcccccagtactaaaattgtattgtctttcagacaatataatttttatttaaaattggaacatactatcttcatgctttctaagctaaatcttcatttagatttcactcctcagtagatcccagagaagaagctatataggatccagattcaaatttaacagtgtcttctacttttttagttatgttttctatcaactcctgctgccttttcaaatacggatatttttcaggagactcttctacttgtccactgactgtattttttcctttttgatccgtagccctggttaaatggctgacatccttccgtggatgattcttggaggtagtctcagaattccaaagtgattgtctgtcttcttcttgtcttgatcctaatgcagacattcacctctattatttatttattttttttagacagagtctcgctctgtcaccaggctggagtgcagtggcacaatcttggcttactgtaccctccacctcctgggttcaagcgattctcctgcctcagcctctcgagtagctgggactacaggtgtgtgccaccatgcccagctaatttttgtatttttggtagagatggggttttaccatgtttgccaggatggtctcgatttcctgaccttgtgatctgcccaccttggcctcccaaagtgctggaattacaggcatgagccaccgtgcctggccacctctattaaatttttgtggacaaaaataaaattgtcattatttgtttgctctcatggagcactttcagtaatacaattttttttaaattccagttgccctctttgttgctctgtcctctgtaatacctgactttgctaaagacttgaggggtggtttcagaggagggtcaggtgatgggaaggcaggatgagaaaagccctggacttgcatgtttgagaaggcttccaaccacatcttcactcagactcttggaattcctgtccccaaaacaagcttctgttttttgctcacaatgctatatttctaaatttttcctgaattactgagaagcagtcattagctttgttaagtttggtttggggacattgttggtatcaaaaatcgaagtcttattcatttgatgtaggccatgaatcatcaataactggttgctggaaagcttgactaccatccactggggtgctattttgagaaggatttttgggtatctttatagtctgcaattagttgatgattgctttctagtttatcaactgcatttatatttgcttttctgttcatggaaaatcctttatttgctggggttttttgtttgtttgtttgtttttcccacttacagcaagtaaaagtggtctgaggttatccttgtttttcttcgcggtttgccatgtgtgaaagtagatttcctgctattgatatattctcattatagacagaatagtggagaacagtgttgccatggacaaaatccagttttggtccactctggggagcatttggacctgtggtgcttctaacaattaaaagtctagatggtccttgactgtcccccagccatactgcatactactttgtgcattctactttgtgtcattaatgaaagattggttctgtccctgtaacttaggcatttattattcttaactcttcattcctgttctgtagccacccagcagtccattttccctatgttcaggccaaaccacagggcattggggaaggtttttgggattttcttattgagattttgttgaatctgtagtttaccccagctttcctaaggtacagtgaggggttggagggatctgtgtttggcccggggagcaattgtctctaccttaaggttcagttttgagggcataaaatactactttgcaatgtcatgagaacaccgttagatctgaaatgtggaaatggtttctcacaatttaaaggaaaaacccactttgcacccatgatcccatcattttggttgagattttagaataaaaaatatagtgttgagatccgtacttttgtaatcagaccaccaagcatgcctgtggcaaggcagagaggaaaggtctggagccagtgtattgcagtttcatgctacctttacctgctaatcataaaaattatgttttcaaaagtagatgatactagccttacacccaaaaacatgttctgaattagatgccccctcacccaatttttattaagctttctaaattccagccacattgctgtacatcaacattggtttcattcaacagacatttttttggcctgaagatacaaggttcagaaagaggccatccctgccctcaaataactttcatactggtgtatgatgaactgaccattaatagtttaagtgcttacaagctatgtttctgttcaaaaaaaaaatagtttggtataataaatgctataaaccaatacacatttctgacttgggggcagagacagactggctgatgttgtatagtttgtagccctggagtaagaagttgacattaatttcggcctatatgtggaaaagacctataacattgggtgaactgagccagctggccatagaacacaagaacatattccaggaaataaatatagctggagggttggaaatgctgttattactgagagagaaaacaggtgagttgggattgagaactcctgattttcatccctggtttagattcttggccaaagtagtggtagagttaatctttgcttgtggaaagcattaactatgttgcagattcagttgtgttacattattgtgggttctataacaacatattcctcatggacactttaccagagttgctcacacctttttcaatttctcatcccttttggaggaatgaacatgagacttaactgcctttaagcctaaaacggacatgctttccaatgacaagagattttctaaagagaagtcttggagcacatctgttaatacctgagcatctactctgagcagtgcagttttattcaatactggagagagggtgatttctttttttttgagacggagtcttgctctgtctcccaggctggagtgcagtggcgcaatctcggctcactgcaagctccacctcccgggttcacgccattctcctgcctcagcctcccgaggagctgggactacaggcgccggccaccacgcccggctaattttttgtatttttagtagagacggggtttcaccttgttagccaggatggtctcaatctcctgacctcatgatccacccacctcggcctcccagagtgctgggattacaggcgtgagccaccgccgggccgagagggtgatttctaagcagagaattgtatcagttatgtggaaacctttgccagaaatacatataccttgtatattaaatctgagtctcagatttaatcatcgaagcgtagctgggttaagaaacagtctgatcgtaaggatgttgtcgattctgacccatggatgaccacaagaaaaagatatttatttctgcctggataattgagagttgactaactttggaagtcagaattcccaggaattagagtaactgctctggaaagttaaagtgtgaagttttttagatagtttcataaaaacaattctggtttctttttgcttgtgctgactttcttggattttaatctacctcatcttgtctttttagagttacttcaacttgtcactttaacattgtgcttgactttggttgttttctaagatggaatttttcctgttcattgacagcttgttctcttgccttttcattctgatcctcatttcatctaacatcatctcatattgctcctctgtcaagagaaatgttttaaaatagtttaaagtcttgttttatgggaagaaagtgatcctccaatgctatttgtttctgaggtcagtaagagaaggagttaaaacaaggcagtggggaagggaatgaatcctgcactggaggcaaaagctgacaaggaaagagccattaattaagacaatttcaaagtcaactgattgtgatcattaatgtcacaatagatcaaaacctaattatcacagcctaggtaagagccatcagtattaatcggaaaatctaataggaaactattatcaagaaattaggccaaattgaatgcagtgaactttttatcttggcattctctatttttttgtgatgtcccctggcattggcaggtgtgaccctaacagtcgattcaaggccaagtggtcagtttgtcagccttttttaagggatttctttttatttttaggaattccaaacagagttaacctaaactgtcattgccaaaagatcagtcttaaactttcttagcacctgtacctgtttaatgtgatcagctatcagtgaggaaaaaaaaaaaaatctatttaggtcttggaatggttcctgtacctagagtatccatattgaaccttttttttttttttttttttttttttttgagatggaaacttgctcttttgcccaggctggagtgcagtggcgtgatcttggctcactgcaacctccgcctcccgggttcaagcagttctctgcctcagcctcctgagcagctgggattataggcgcctgccaccatgcccggctaatttttgtatttttagtagagacagggttcaccatcttggccgtgctggtcttgaactcctgaccttgtgatccgcctgcctcggccactcaaagtgctgggattgcaggcgtgagccagcacccggccacagtatctttattacagctcactgcagcctcaatctcctgggctcaaatgatcctcctgcctcagcctcccaagcagctgggactacaggcgcacaccacggtgtctggctaattttattatttaaaaaatgttttgtagagacagtctccctgtgttgcccaggctggtctccaactcgtgagctcaagtgatccacgtgcctcagcctcccaaagtgctgggattacaagcataagccaccgcacccggcccctagtgaacattttactgtatgtgttgataaatcatcttttgagtttctgttgtatgtggggacttcctacactggctgctgtgaagaggtatggaagaaaggagaggctttctgcctagaaattctttgagaacacctgaaaagacagtttaatcatgtcacaacactcttaaggctcaagtcagtgttctggtttccggtagctttaggattggattctaaacgagggctggtggtgagtttggtgtttgtctcgtgtcaccctcacccctcacctcctcagtttaggataagagacataatgatttctaccagaatccaaagtaaatccaaagggggagaaaagacataactgttttttcttctaccttttttttgttaaagagttacatctctcacaggaggaaagaattcaagagtctatatgattagttacagagaatattttcatcccctctccctgaatagaaaagcaggggtcaccatttgtatccttacccttgaggtgtttttgaagatgctgtaactcttgaagttgagctgaggcagaaaggttggaaaaatgcagccctctgggtattgtggggagggatgtgatgtagtaagagggtgttttgtggtgctaggattcccacgccaccaacttgcagctttataagagcgctaccaagaaccaccactggggaaaaggttcttattcattgtttctgttggaatgtgatcttgctttctggattttaggaattcaggttactcagtataaaactctgagaaatcagtgtgacttagtccttcacctcctaagataaagtgaatatttctttacaaaataattcatgtccttaatgttaaagatgtaattttattttcaaaacatctataacatgactttcagaagcagttcatttttccaagattcctcacattatactagataaataataggccctcagttaatacccttcagttattgaattaatctagtttgtggaatgaggtgtatcctgccaacttccctctgctcccaagtacactctgagaggtaaaatgctctgggaaatggaacaagaatcgagtggatgctgactctgtgtgcccacctcctcaactgattgataatggttgaccttgggcaagtcacttctttcaatgcctcagttccccatctgtcaaatggggttaataatactgacctacctcacaggggtgttgttgtgaggcattgtaaatcaaagttaatagaatacttcagggtcctctgtggaggatgtcttgagccagagtttaagcctgacacacaggctttggtcctcactgagctgtctccaagactggaactacttagtgactcggcaaattttctgccccccacccctcatcaaagctgctagttcagatgttgacagtgttttcatgaatgttggaatcttactagtccagacttacttaggatgttgttggggaaggcacttgggattttctgtgtcttgcattcacagagggaggccatttcagattcaagagcattggattagggaatcgtgaggcagggatgctactgcgtatttctctctgcaggttggggattaaagttcctttccccatgggtttgaagcagactcagactgtctcaggatcaaagcaaccctcaatggttttgatttatgtcattgcttaccactccccaaccaatcccaggacagctgggtcactgtacccctttgtggtatctgtacctgggcctctccttcctcatagggaccagctgattgaataaatgtgaccaccttatttccaccccccacccccaaaagctacattggaattatttttcctagaaatgtgtataacactcagaattgggcattgatccttaaagcttcatcccattcaccgtattcaacatctgtcatctcttagtgtctgcagtctgaacctaaccttgaccttttttccctctggtttgagaaaactttggacactatttctacttggccaggtgtgggctcaagagccttactctttccatctcagtttaggggcgcagccagctcctcttcccaatagggctctttctgctttccctctccttggccctagatttgtaatccatgaaaaagcacaaggtcctggctccttgcggtcacattctggttctctgtgttttgtggactctgctctcactgttcacccagcactagcagtaccagatggttctgtggagtcctggggaatggagagagcacagtctgactccctgccaagtagccaggagttgacttgcccatggtccgctggctttcccaccacttcctacaggatgggatctaagagactcaagagctgggtttctttcagcactctgtactgtcccaaatagcaaacaaatcactttgtagccagatttctgaatggaaatgagaaattgaattctccatggacttttaggtttatgggggagttttagctgtgtttcttggttttatttcagccaaacatgtctgcttttgattttttttttaaagtataagtggtctatatatatgttcaccttttaaatgtaaatgtttaaaaagtaagcatttatgtgtttccataactgacatctgatgcagacctcattctctccccctcttctaccctcctcttttcccccttttcatactcttgtattggttctaataaatggttgcttttcaaaaaaaaaaaaaaaaaaaaaaa

SEQ ID NO: 123 - DNA, 3284 bp, Homo sapiens
gagcggtgccgcaccggccgcgggcgcagggagtattatgggctgtgggtgccgctgagcaagatggagctgtctgcagtgggcgagcgggtcttcgcggccgaatccatcatcaaacggcggatccgaaagggacgcatcgagtacctggtgaaatggaaggggtgggcgatcaagtacagcacttgggagcccgaggagaacatcctggactcgcggctcattgcagccttcgaacaaaaggagagggagcgtgagctgtatgggcccaagaagaggggacccaaacccaaaactttcctcctgaaggcgcgggcccaggccgaggccctccgcatcagtgatgtgcatttctctgtcaagccgagcgccagtgcctcctcgcccaagctgcactccagcgcagccgtgcaccggctcaagaaggacatccgccgctgccaccgtatgtcccgccgtcccctgccccgcccggacccgcaggggggcagccccggactgcgcccgcccatttcgcccttctcggagacggtgcgcatcatcaaccgcaaggtgaagccgcgggagcccaagcggaaccgcatcatcctgaacctgaaggtgatcgacaagggcgctggcggcgggggcgccgggcagggggccggggcgctggcccgccccaaagtcccctcgcggaaccgcgttataggcaagagcaagaagttcagcgagagcgtcctgcgtacacagatccgccacatgaagttcggcgcctttgcgctgtacaagcctccgcccgcccccctggtagccccgtcccccggcaaggctgaggcctcagccccgggccctgggctacttctggccgcccccgccgccccctacgacgcccgcagctctggctcctccggctgcccctcgcctacaccacagtcctctgaccccgacgacacgccccccaagctcctccccgagaccgtgagcccatccgcccccagctggcgcgagccggaggtgctcgacctgtccctccctcccgagtcggcagccaccagcaagcgggcaccgcctgaggtcacagctgctgccggcccggcacctcccacggcccctgagcccgccggtgcctcctccgagcccgaggctggggactggcgccccgagatgtcaccctgctccaatgtggtcgtcaccgatgtcaccagcaacctcctgacggtcacaatcaaggaattctgcaaccctgaggatttcgagaaggtggctgctggggtagcaggcgccgctgggggcggtggcagcattggggcgagcaagtgagggggctccaccaaggaggggggcttgggggggccctcctgcccgaagtcatactcttgctcccaccccacccttgcccccagccctctctccctgtgctttgcttgtctcaaatggctcggtgttgacccagggatggggctgggtagttggggtcccagaaagccgggggtaggggccaccctggaatggggcaggggaagggcacaccccctgcccatgcatggtagcccactgggtggtttctggaaagccctagaaactagggttcctctgccccttccacatcccacctgtctctctagcttgcttcctgctctcctgtgcggcgtctgatttctcggtgctaacctggcagctgtggggcccttaggagccccccaccgagggtggacacagtccctttccttcctgcagatgcctaggcaggaggagggcttcctgcctgtttggcaaagtcccaggcagaggccaaggatgaggcctgactcggctcctccctccacatcagccagggcatcagaagttgggccagggcggggtcttccctgctcgattttggacgaggcctaagtagaccccctatgccctgccccagccctggctctttcctaaccccctcaacggtgggaggaactggcagagggtgcgcctggccacagcctccccgcatctaaaggccccttcagttcttgaccaaaggtgctacgagaacctgccgtggaaacttccagttgtgcgtctgccccactcgctgtgtttgtccgtgggttcatacatgcattgggtgctaggccccaggctgccgggtggcaccctttacagttcctttgaacaggggcattgaaggcctggactgcctctcgcctcagtaggcctggggaccaggcttgggtctggaggtttgctgtggaagtcaccaggcctcccctcctggcccaggtgtgctgggggcaccgtgccccccacccccctgccctcctcagggtggtcagcccaacctgtcggaccttcacttcacatcatggtggggaccgagatagagagggagaccccattccaagctccctcttcctcccggtgtttggggaggatgctgaagaatccattcccgagggcctcccggcttgtcccagcccctcttttgcttctgaccacggaggctttctcacagcccagcctgcctgaagcaaaggaggctcccgtgtcctgggcagcttctgtttccctctgctgcctgggagctgaggcacccgtgccagtggcagaggccacagccccagccttaggccaggccctgggagggcaggcaggcaaaggggagaccagagggtctgtgttctccaggagaatgagggtgttggtcccagaattgggaccggggccccgctggccagccctgggccacttcccgggtctccattgtgcgtgggtggcgtgttccaggcgtggctggagctggcttcctggctgtgctgccatgggcccctccctcagaagcacgttggcaggaggccgatcagaaccctagcgcctttggtcctaagaatgggaggctgccttccttcccaatctccctgccagggcccacagcgtggccctagccctcccctccccgggatgtagaacggggaccctcgcagggttggggcgggggctgatactcctcggcccctccctaccctgccctgtgtgttggctttgtggccgtccaagtgccaattggcttttcgcccaaataagggctggtatttctcctctgtccttggaggtgatttccccctgaccccctcccccaggtgagtgaccacctgggtgccagttacaggtgtttccagagaccatagaaatgtgttttcctgagagttcgtgtcattcgtgacttttttgtaaagaagttgtgttttcagaggtgattttatgacaggaaagtgaaagaattagttttgcaaaaaaacaaaaacaaaaaaaaaaaaaaaaaa

SEQ ID NO: 124 - DNA, 3964 bp, Homo sapiens
ccagccccagcatcgcgcgccgcagccgcggccccgcagctccgcccccggcccggcccggccccgggcccgctcgcccgccgccccgcatggagctgtcagccatcggcgagcaggtgttcgccgtggagagcatccggaagaagcgcgtgcggaagggtaaagtcgagtatctggtgaagtggaaaggatggcccccaaagtacagcacgtgggagccagaagagcacatcttggacccccgcctcgtcatggcctacgaggagaaggaggagagagaccgagcatcggggtataggaagagaggtccgaaacccaagcggcttctgctgcagcggctgtacagcatggacctgcggagctcccacaaggccaagggcaaggagaagctctgcttctccctgacgtgcccactcggcagcgggagccctgagggggtggtcaaggcgggggcacctgagctggtggacaagggccccttggtgcccaccctgcccttcccgctccgcaagccccgaaaggcccacaagtacctgcggctctcgcgcaagaagttcccgccccgcgggcccaacctggagagccacagccatcgacgggagctcttcctgcaggagccaccggccccagacgtcctgcaggcggctggcgagtgggagcctgctgcgcagccccctgaagaggaggcagatgccgacctggccgaggggccccctccctggacacctgcgctcccctcaagtgaggtgaccgtgaccgacatcaccgccaactccatcaccgtcaccttccgcgaggcccaggcagctgagggcttcttccgagaccgcagtgggaagttctgaatcaccgtttttactcttcttaaactgttttcttttgggcttggggtgggacttccagagatagggatgggttgggggcggggtaattattttatttaaaaaaataccgagcagcaaaaggggagaagatcccactactctcccaccacctgccctttctctgagggacgtttaccacgaggcctcaggctggggatggagagagttgctctgggagttggggtaccacccccagggcaggatggggacaggatcacctgcccgggacaccaccattatcattctcctctagtgacgcagcagctggttctgggagttaaaggagcattggaaggcccaaaccctctcccttgagtggccaccccagcctggttggctggttttccccttttctcttgtttcaattgggtctttaccttgaactctcctctctggctttgcggtgggctgtggaggctggttttgaccaaaagtgagtggggcgggaggaaggggcaggaggaagggttgaggttacttggggcgagtcccttccccttcagagaggcttctatccttcccagggaggaggcgccgctgagacccttctgctgagagctctgccctcccctcatcacctggcctgtgcagaaacgctcatgcacacctggctgcacaggtgtgcacgcattacccttcgcgtgtacgttcccatgtgccccgtgaaagcatgtgtggctgcagacgtgtccacatgggccttgcgaacctgggttagaaaccctggccaggcgaacgtggggtgattcacagcacaaaagacctcaccaccacacctgcactcaccccaccttgcatgcaccttgctacctgcttgcggctttcagtggagggcaggggtctggcacaggtgcgatggcaccccatgctccaggcatacagatgtggtttctcggctgcaccgggccaggctgcgggtgtgcaggcgtctgctaagttgtgtgatgtatcagcacaggctttgagacgtctggaccctgtccttcctcccgtgaggggttcttgttctttctgactcaggtgacttttcagcccttccaattcccctctttttctgccctcccctccaactcagccaacccaggtgtgggcagtcagggagggagggagtgtcccaccacgttctcagggcagcccttgactcctaagccccttcctccttccattctgcatcccctccccatccaacctaaatgccacagctggggctgagctgtattcctgtggagggacctctgccgtgcctctctgaggtcaggctgtgctgtgtgatgggcaggctttgccccagcccacccctggcaaggtgcacttgttttctggtttgtacaaggtgtcctgggggcccgtggcttccctgccagtgaggagtgacttctccctctcttccagtcctgtaggggagacaaaaccagattggggggcccaaggggagcatggaaaaggccggctcccctgtctttccttggctgtcagagtcagggtaacacacaccaagagtggagtgcggccagcaagtttgagacctgcccgccctcctcgcagctctgctctgtgtcctcaggaagtcacagagtctactgaggcaaggagagggtgattctttccccaaatcccttcttccctggttcccaaaccaaagacagcctgcagccctttctgcatggggtgctctgttgacaggcttcccagatccctgagtctctctttccttcctcctcgatctttagttgtccacggtcaattcagtgcttccattgggggacagtcccctccgggatgacctgattcacctccagcccagggaatggaatctagaggaatacgtggggtgggtctggacaaggagcggcaggaatcaccacccatctccagctgtggagccctgtggaggggaaggggaagcttggggttcagaggggactcttccaggagaggggtgcccagcggaggtaaagatgatagagggttgtggggggtctctagttgaatgttttggcccatgactttggaacatggctggcagcttccagcagaagtcacgctccccatcccccaggggacataggacctttttcctgcttcctggtcactttcaaagaactatttgcgcaatctgtgggtctgtggattcacggggctttctgtgtgggtgctgcagttgcttttgtctgcagcagcaggacacatctttcctcttactcagccctttatggcccatggggaactccgtggctcagggagagctgaactccaggggtgtgacctgggacgggtgggcctgaggtgcccagctcagggcagccaggtggctcatgggctgtagtgagccagctccctgggggaaaaggctgtgggccgttaggaccatcctccaggacaggtgacctctatgaggtcacctacggctgtggccgtgcaggcctccttccagcccagagtggcccagtagagcaaggcagacagtgacctccacccccgcagccctcttaaaaggccagtactcttgggggtggggggagggtttagaaagcatttgcccatctgcctttctttcccccagcccccacccgctttgaatgtagagacccgtgggcacttttccttttgtggtggggggtgcggaggaggtacccccacccctggcacagccgcctggaatgcaggactgtcactgctgttcgggtgatgacctcgttgccaagctcctcctgtccccttgttctgggggcaggcgctgtgcttctgtgaggtggtttagcttttgctttcgaagtggccagctgcggccaccaggtctcagcacaagagcgcttcctttgcacagaatgagcttcgagctttgttcagactaaatgaatgtatctgggaggggtcgggggcacgagttgattccaagcacatgcctttgctgagtgtgtgtgtgctgggagagtcagagtggatgtagagcgcggttttatttttgtactgacattggtaagagactgtatagcatctatttatttagatgatttatctggtaaatgaggcaaaaaaattattaaaaatacattaaagatgatttaaaaaaaagaaaa

SEQ ID NO: 125 - DNA, 1772 bp, Homo sapiens
aggacagccgagttcaggtgagcggttgctcgtcgtcggggcggccggcagcggcggctccagggcccagcatgcgcgggggaccccgcggccaccatgtatgtgggctatgtgctggacaaggattcgcccgtgtaccccggcccagccaggccagccagcctcggcctgggcccgcaagcctacggccccccggccccgcccccggcgcccccgcagtaccccgacttctccagctactctcacgtggagccggcccccgcgcccccgacggcctggggggcgcccttccctgcgcccaaggacgactgggccgccgcctacggcccgggccccgcggcccctgccgccagcccagcttcgctggcattcgggccccctccagactttagcccggtgccggcgccccctgggcccggcccgggcctcctggcgcagcccctcgggggcccgggcacaccgtcctcgcccggagcgcagaggccgacgccctacgagtggatgcggcgcagcgtggcggccggaggcggcggtggcagcggtaagactcggaccaaggacaagtaccgcgtggtctacaccgaccaccaacgcctggagctggagaaggagtttcattacagccgttacatcacaatccggcggaaatcagagctggctgccaatctggggctcactgaacggcaggtgaagatctggttccaaaaccggcgggcaaaggagcgcaaagtgaacaagaagaaacagcagcagcaacagcccccacagccgccgatggcccacgacatcacggccaccccagccgggccatccctggggggcctgtgtcccagcaacaccagcctcctggccacctcctctccaatgcctgtgaaagaggagtttctgccatagccccatgcccagcctgtgcgccgggggacctggggactcgggtgctgggagtgtggctcctgtgggcccaggaggtctggtccgagtctcagccctgaccttctgggacatggtggacagtcacctatccaccctctgcatccccttggcccatctgtgcagtaagcctgttggataaagaccttccagctcctgtgttctagacctctgggggataagggagtccagggtggatgatctcaatctcccgtgggcatctcaagccccaaatggttgggggaggggcctagacaaggctccaggccccacctcctcctccatacgttcagaggtgcagctggaggctgctgtggggaccacactgatcctggagaaaagggatggagctgaaaaagatggaatgcttgcagagcatgacctgaggagggaggaacgtggtcaactcacacctgcctcttcctgcagcctcacttctacctgcccccatcataagggcactgagcccttcccaggctggatactaagcacaaagcccatagcactgggctctgatggctgctccactgggttacagaatcacagccctcatgatcattctcagtgagggctctggattgagagggaggccctgggaggagagaagggggcagagtcttccctaccaggtttctacacccccgccaggctgcccatcagggcccagggagcccccagaggactttattcggaccaagcagagctcacagctggacaggtgttgtatatagagtggaatctcttggatgcagcttcaagaataaatttttcttctcttttcaaaaatgtataaaaatcattatacatagcattaaagaaacatttttgagaagtacaaatca

SEQ ID NO: 126 - DNA, 2090 bp, Homo sapiens
gggaccgcctcggaggcagaagagccgcgaggagccagcggagcaccgcgggctggggcgcagccacccgccgctcctcgagtcccctcgcccctttcccttcgtgccccccggcagcctccagcgtcggtccccaggcagcatggtgaggtctgctcccggaccctcgccaccatgtacgtgagctacctcctggacaaggacgtgagcatgtaccctagctccgtgcgccactctggcggcctcaacctggcgccgcagaacttcgtcagccccccgcagtacccggactacggcggttaccacgtggcggccgcagctgcagcggcagcgaacttggacagcgcgcagtccccggggccatcctggccggcagcgtatggcgccccactccgggaggactggaatggctacgcgcccggaggcgccgcggccgccgccaacgccgtggctcacggcctcaacggtggctccccggccgcagccatgggctacagcagccccgcagactaccatccgcaccaccacccgcatcaccacccgcaccacccggccgccgcgccttcctgcgcttctgggctgctgcaaacgctcaaccccggccctcctgggcccgccgccaccgctgccgccgagcagctgtctcccggcggccagcggcggaacctgtgcgagtggatgcggaagccggcgcagcagtccctcggcagccaagtgaaaaccaggacgaaagacaaatatcgagtggtgtacacggaccaccagcggctggagctggagaaggagtttcactacagtcgctacatcaccatccggaggaaagccgagctagccgccacgctggggctctctgagaggcaggttaaaatctggtttcagaaccgcagagcaaaggagaggaaaatcaacaagaagaagttgcagcagcaacagcagcagcagccaccacagccgcctccgccgccaccacagcctccccagcctcagccaggtcctctgagaagtgtcccagagcccttgagtccggtgtcttccctgcaagcctcagtgcctggctctgtccctggggttctggggccaactgggggggtgctaaaccccaccgtcacccagtgacccaccgggttctgcagcggcagagcaattccaggctgagccatgaggagcgtggactctgctagactcctcaggagagacccctcccctcccacccacagccatagacctacagacctggctctcagaggaaaaatgggagccaggagtaagacaagtgggatttggggcctcaagaaatatactctcccagatttttactttttcccatctggctttttctgccactgaggagacagaaagcctccgctgggcttcattccggactggcagaagcattgcctggactgaccacaccaaccaggccttcatcctcctccccagctcttctcttcctagatctgcaggctgcacctctggctagagccgaggggagagagggactcaagggaaaggcaagcttgaggccaagatggctgctgcctgctcatggccctcggaggtccagctgggcctcctgcctccgggcaggcaaggtttacactgcggaagccaaaggcagctaagatagaaagctggactgaccaaagactgcagaacccccaggtggcctgcgtcttttttctcttcccttcccagaccaggaaaggcttggctggtgtatgcacagggtgtggtatgagggggtggttattggactccaggcctgaccagggggcccgaacagggacttgtttagagagcctgtcaccagagcttctctgggctgaatgtatgtcagtgctataaatgccagagccaacctggacttcctgtcattttcacaatcttggggctgatgaagaagggggtggggggagtttgtgttgttgttgctgctgtttgggttgttggtctgtgtaacatccaagccagagtttttaaagccttctggatccatggggggagaagtgatatggtgaagggaagtggggagtatttgaacacagttgaattttttctaaaaagaaaaagagataaatgagctttccaga

SEQ ID NO: 127 - DNA, 855 bp, Homo sapiens
atgtacggaagctgtcttttggagaaagaagcaggcatgtacccgggcactctcatgagccctgggggcgacggcacagctgggacaggcggcacagggggcggtgggagtccgatgccagcctccaatttcgctgcggcaccggctttctcgcactatatggggtatcctcatatgcccagcatggatcctcactggccgtctctgggagtctggggctcaccctacagtcccccgcgagaagactggagcgtgtatcctgggccgtctagtacaatgggcacagtgccggtgaacgacgtgacctctagccccgccgctttctgctcgaccgactacagcaacttgggccctgtgggcggtggaactagcggcagcagcctaccaggccaggctggcgggtcgcttgtcccgacggacgcaggcgccgccaaggccagttcccccagcaggagccgccacagcccctatgcatggatgcgcaagacggtgcaggtgacggggaaaaccaggacaaaagaaaagtatcgtgtagtttacactgatcatcaaagattggagctggaaaaggaattccattgcaatagatatatcaccatccagagaaaatcagagctggcagttaacctgggcctttccgagagacaggtgaaaatctggtttcagaatcgcagagccaaggagagaaagatgatcaaaaagaaaatctcccagtttgagaatagtggaggctcggtgcaaagtgactctgactccatcagccctggggaactacctaacacttttttcaccacaccatctgctgttcgtggatttcaacctattgagatacagcaggttatagtctccgaatga

SEQ ID NO: 128 - DNA, 2591 bp, Homo sapiens
cggaggtgcgcgggcgcgggcgagcagggtctccgggtgggcggcggcgacgccccgcgcaggctggaggccgccgaggctcgccatgccgggagaactctaactcccccatggagtcggccgacttctacgaggcggagccgcggcccccgatgagcagccacctgcagagccccccgcacgcgcccagcagcgccgccttcggctttccccggggcgcgggccccgcgcagcctcccgccccacctgccgccccggagccgctgggcggcatctgcgagcacgagacgtccatcgacatcagcgcctacatcgacccggccgccttcaacgacgagttcctggccgacctgttccagcacagccggcagcaggagaaggccaaggcggccgtgggccccacgggcggcggcggcggcggcgactttgactacccgggcgcgcccgcgggccccggcggcgccgtcatgcccgggggagcgcacgggcccccgcccggctacggctgcgcggccgccggctacctggacggcaggctggagcccctgtacgagcgcgtcggggcgccggcgctgcggccgctggtgatcaagcaggagccccgcgaggaggatgaagccaagcagctggcgctggccggcctcttcccttaccagccgccgccgccgccgccgccctcgcacccgcacccgcacccgccgcccgcgcacctggccgccccgcacctgcagttccagatcgcgcactgcggccagaccaccatgcacctgcagcccggtcaccccacgccgccgcccacgcccgtgcccagcccgcaccccgcgcccgcgctcggtgccgccggcctgccgggccctggcagcgcgctcaaggggctgggcgccgcgcaccccgacctccgcgcgagtggcggcagcggcgcgggcaaggccaagaagtcggtggacaagaacagcaacgagtaccgggtgcggcgcgagcgcaacaacatcgcggtgcgcaagagccgcgacaaggccaagcagcgcaacgtggagacgcagcagaaggtgctggagctgaccagtgacaatgaccgcctgcgcaagcgggtggaacagctgagccgcgaactggacacgctgcggggcatcttccgccagctgccagagagctccttggtcaaggccatgggcaactgcgcgtgaggcgcgcggctgtgggaccgccctgggccagcctccggcggggacccagggagtggtttggggtcgccggatctcgaggcttgcccgagccgtgcgagccaggactaggagattccggtgcctcctgaaagcctggcctgctccgcgtgtcccctcccttcctctgcgccggacttggtgcgtctaagatgagggggccaggcggtggcttctccctgcgaggaggggagaattcttggggctgagctgggagcccggcaactctagtatttaggataaccttgtgccttggaaatgcaaactcaccgctccaatgcctactgagtagggggagcaaatcgtgccttgtcattttatttggaggtttcctgcctccttcccgaggctacagcagacccccatgagagaaggaggggagcaggcccgtggcaggaggagggctcagggagctgagatcccgacaagcccgccagccccagccgctcctccacgcctgtccttagaaaggggtggaaacatagggacttggggcttggaacctaaggttgttcccctagttctacatgaaggtggagggtctctagttccacgcctctcccacctccctccgcacacaccccaccccagcctgctataggctgggcttccccttggggcggaactcactgcgatgggggtcaccaggtgaccagtgggagcccccaccccgagtcacaccagaaagctaggtcgtgggtcagctctgaggatgtatacccctggtgggagagggagacctagagatctggctgtggggcgggcatggggggtgaagggccactgggaccctcagccttgtttgtactgtatgccttcagcattgcctaggaacacgaagcacgatcagtccatcccagagggaccggagttatgacaagctttccaaatattttgctttatcagccgatatcaacacttgtatctggcctctgtgccccagcagtgccttgtgcaatgtgaatgtgcgcgtctctgctaaaccaccattttatttggtttttgttttgttttggttttgctcggatacttgccaaaatgagactctccgtcggcagctgggggaagggtctgagactccctttccttttggttttgggattacttttgatcctgggggaccaatgaggtgaggggggttctcctttgccctcagctttccccagcccctccggcctgggctgcccacaaggcttgtcccccagaggccctggctcctggtcgggaagggaggtggcctcccgccaacgcatcactggggctgggagcagggaaggacggcttggttctcttcttttggggagaacgtagagtctcactctagatgttttatgtattatatctataatataaacatatcaaagtcaa

SEQ ID NO: 129 - DNA, 1837 bp, Homo sapiens
gagccgcgcacgggactgggaaggggacccacccgagggtccagccaccagccccctcactaatagcggccaccccggcagcggcggcagcagcagcagcgacgcagcggcgacagctcagagcagggaggccgcgccacctgcgggccggccggagcgggcagccccaggccccctccccgggcacccgcgttcatgcaacgcctggtggcctgggacccagcatgtctccccctgccgccgccgccgcctgcctttaaatccatggaagtggccaacttctactacgaggcggactgcttggctgctgcgtacggcggcaaggcggcccccgcggcgccccccgcggccagacccgggccgcgcccccccgccggcgagctgggcagcatcggcgaccacgagcgcgccatcgacttcagcccgtacctggagccgctgggcgcgccgcaggccccggcgcccgccacggccacggacaccttcgaggcggctccgcccgcgcccgcccccgcgcccgcctcctccgggcagcaccacgacttcctctccgacctcttctccgacgactacgggggcaagaactgcaagaagccggccgagtacggctacgtgagcctggggcgcctgggggccgccaagggcgcgctgcaccccggctgcttcgcgcccctgcacccaccgcccccgccgccgccgccgcccgccgagctcaaggcggagccgggcttcgagcccgcggactgcaagcggaaggaggaggccggggcgccgggcggcggcgcaggcatggcggcgggcttcccgtacgcgctgcgcgcttacctcggctaccaggcggtgccgagcggcagcagcgggagcctctccacgtcctcctcgtccagcccgcccggcacgccgagccccgctgacgccaaggcgcccccgaccgcctgctacgcgggggccgcgccggcgccctcgcaggtcaagagcaaggccaagaagaccgtggacaagcacagcgacgagtacaagatccggcgcgagcgcaacaacatcgccgtgcgcaagagccgcgacaaggccaagatgcgcaacctggagacgcagcacaaggtcctggagctcacggccgagaacgagcggctgcagaagaaggtggagcagctgtcgcgcgagctcagcaccctgcggaacttgttcaagcagctgcccgagcccctgctcgcctcctccggccactgctagcgcggcccccgcgcgcgtccccctgccggccggggctgagactccggggagcgcccgcgcccgcgccctcgcccccgcccccggcggcgccggcaaaactttggcactggggcacttggcagcgcggggagcccgtcggtaattttaatattttattatatatatatatctatatttttgtccaaaccaaccgcacatgcagatggggctcccgcccgtggtgttatttaaagaagaaacgtctatgtgtacagatgaatgataaactctctgcttctccctctgcccctctccaggcgccggcgggcgggccggtttcgaagttgatgcaatcggtttaaacatggctgaacgcgtgtgtacacgggactgacgcaacccacgtgtaactgtcagccgggccctgagtaatcgcttaaagatgttcctacgggcttgttgctgttgatgttttgttttgttttgttttttggtctttttttgtattataaaaaataatctatttctatgagaaaagaggcgtctgtatattttgggaatcttttccgtttcaagcattaagaacacttttaataaacttttttttgagaatggttacaaagcc

SEQ ID NO: 130 - DNA, 1269 bp, Homo sapiens
aggtgacagcctcgcttggacgcagagcccggcccgacgccgccatgagcgccgcgctcttcagcctggacggcccggcgcgcggcgcgccctggcctgcggagcctgcgcccttctacgaaccgggccgggcgggcaagccgggccgcggggccgagccaggggccctaggcgagccaggcgccgccgcccccgccatgtacgacgacgagagcgccatcgacttcagcgcctacatcgactccatggccgccgtgcccaccctggagctgtgccacgacgagctcttcgccgacctcttcaacagcaatcacaaggcgggcggcgcggggcccctggagcttcttcccggcggccccgcgcgccccttgggcccgggccctgccgctccccgcctgctcaagcgcgagcccgactggggcgacggcgacgcgcccggctcgctgttgcccgcgcaggtggccgcgtgcgcacagaccgtggtgagcttggcggccgcagggcagcccaccccgcccacgtcgccggagccgccgcgcagcagccccaggcagacccccgcgcccggccccgcccgggagaagagcgccggcaagaggggcccggaccgcggcagccccgagtaccggcagcggcgcgagcgcaacaacatcgccgtgcgcaagagccgcgacaaggccaagcggcgcaaccaggagatgcagcagaagttggtggagctgtcggctgagaacgagaagctgcaccagcgcgtggagcagctcacgcgggacctggccggcctccggcagttcttcaagcagctgcccagcccgcccttcctgccggccgccgggacagcagactgccggtaacgcgcggccggggcgggagagactcagcaacgacccatacctcagacccgacggcccggagcggagcgcgccctgccctggcgcagccagagccgccgggtgcccgctgcagtttcttgggacataggagcgcaaagaagctacagcctggacttaccaccactaaactgcgagagaagctaaacgtgtttattttcccttaaattatttttgtaatggtagctttttctacatcttactcctgttgatgcagctaaggtacatttgtaaaaagaaaaaaaaccagacttttcagacaaaccctttgtattgtagataagaggaaaagactgagcatgctcacttttttatattaatttttacagtatttgtaagaataaagcagcatttgaaatcgaaaaaaaaaaaaaaaaaa

SEQ ID NO: 131 - DNA, 1250 bp, Homo sapiens
gagagaggccacacaggagtgggtgacagaggagactgcagagggcaggtctagggcagaagatcgagagagggcaggcccaggtcaggaggaggtagagagagggcagccggagcaccccaaggggtgcctcaagagcaggtgggggcggggagccgagggggcgggccggccatgtcccacgggacctactacgagtgtgagccccggggtggccagcagccactcgagttctcagggggccgagctgggcccggggagctaggggacatgtgtgagcatgaggcctccattgacctctccgcctacatcgagtctggggaagagcagcttctctccgatctctttgccgtgaagccagcgcctgaggccagaggcctcaagggccccggaacccctgccttcccccactacttgccgcctgaccctcggccctttgcctaccctccacataccttcggcccagacaggaaggcgctggggcctggcatctacagcagcccagggagctacgaccccagggctgtggcggtgaaggaggagccccgggggccagagggcagccgagctgccagccgaggcagctacaatcccctgcagtaccaagtggcacactgtgggcagacagccatgcacctgcccccaactctggcagcacccggccagcctctgcgcgttctcaaggcccctttggccactgccgcacccccctgcagtcccctcctgaaggcgccctccccggctggccccttacacaagggcaagaaggcagtgaacaaagatagccttgagtaccggctgaggcgggagcgcaacaacatcgccgtgcgcaagagccgagacaaggccaagaggcgcattctggagacgcagcagaaggtgctggagtacatggcagagaacgagcgcctccgcagccgcgtggagcagctcacccaggagctagacaccctccgcaacctcttccgccagattcctgaggcggccaacctcatcaagggcgtggggggttgcagctgaggctggctggtggattgtgggcaccaggctccctggcacggcctaactctgcggacccccatcctgctgggggcctagaaccctgagacatagaccatggataaatggcaaccggggtggcaaagagggcaggacccagcataatgattatatggctgaataaagttgcactgtgactgggaaaaaaaaaaaaaaaaaaaaaaaaaaaaaaaaaaaaaaaaaaaaaaaaa

SEQ ID NO: 132 - DNA, 3750 bp, Homo sapiens
ggcggcgcgcgcggccccggcgagcaggggaagccggtggccgcggctgcggaacgggcggaggctgccggtttcgtaaccgtcgctcctcctcgctgactcgcgggctgtgaggcctgggtcggctcgggccgcaccgcgcggggccgctcggagtggaggccgcctgggggcaggcgggctagaggagcaggtacatgtgaagattttttggcagcttagcgtggaaaccattgatcaccctgctctcatttctacctgttctgtgttggcaagggagagtgcccaaatgagcaagatatcgcagcaaaacagcactccaggggtgaacggaattagtgttatccatacccaggcacatgccagcggcttacagcaggttcctcagctggtgcctgctggccctgggggaggaggcaaagctgtggctcccagcaagcagagcaaaaagagttcgcccatggatcgaaacagtgacgagtatcggcaacgccgagagaggaacaacatggctgtgaaaaagagccggttgaaaagcaagcagaaagcacaagacacactgcagagagtcaatcagctcaaagaagagaatgaacggttggaagcaaaaatcaaattgctgaccaaggaattaagtgtactcaaagatttgtttcttgagcatgcacacaaccttgcagacaacgtacagtccattagcactgaaaatacgacagcagatggcgacaatgcaggacagtagacctcaccctttccagactttagagcttgtggcttgaatgttaaaggtgtgaccaccgacaccactcatgtcaatggctgaaagttgtccatttccatgactcaaagacccattggaggctattttctgggatcagcactgaagagttgattagctaaaaatgttagccttgtaattcgaatatctggttttaaatgatagaggtttttgtgggaatcaaaatcccccaaatgttaaggtatatggtaaaaaaagaaatatctgggatcccgatgttcttaataaatcctgacttcccaagaaatgcttcttttttaagttgacaaaaggaatggggaactggcaggccgcgcagaaggttcttggttttaatggataggctgaattggattaagaaaagttgaatgccacctatggtaatctatttgtgattttcttctaaattatgtattataaattcgtagagctatagaaagcaatgagtgtgtaatttggagtgattttatatatggcataaactttgttttaacataattagtactgttttcccccaaaagtacaagtttttgagtagcaatgtcaggttaagtaaagaaacttcatcacatcttataggtagtgtgtggccaattgacttaaaaaatacaaataacatttaggaagcaaatagattaaacacaaaaataaaactaaagcataggaattatgtttttgagatacctttgggcttagattggcattgttttattctaaaaacccaactcagtggtgtagagaaacttgtgtaccaaaattttagtttctgcagatgctagtgtttttttggatacaattttgacaaccaagttagtaaacaaaatatcttaacagtttgatgacacaagctactgatgagggtttggaatattaattcagaaggtagtttctcttgtgttcaaaatagctgccatggggctgttacttttaaagtcaaaattttcttctgaaggctcattttggtatttgatcttaaccaagtgattattagagaaatgtatcaactccatgccatctcccaaaataattgtctaagaaaacttgaaagtgtaaggttttaacctttaatttatttctcttaaatacatcttttgatattgttgttgtgacatttctttttctggttagtgggctttccagactttgtaccactgcttctgtttattcatttatatgcttttgtgtcccataaattatttcagaaaatgctgataaaactcaggatattgacatttttgttgagactaaaaaatggcagtcgctaaagtagggactctagagtctggcttacgtcagtgttggtagtttagattgtctttgtcaacgttttttcttctctcttttgctttcttttctttctctttttttcttagcacagttctagctcaaatttgtgtattttttgtgtgcctgggctggagatgagagactgagtcataactgatttaaaagtttgtgttatcaggtatcttatttgaacatggtcatttttggccacattgctgtttcatactaggacttgggatgatgtagccagaataaaactcaagttgcaccctccggttggtggaagattgctgaccgtgccgtttctgggcaggagaagacatcatggtgtccagcaactcagcaaagccattcttaagagtcgtgaggtccttctgaatgtaaaactggagcccaggagaagctgtcccaggagggctgttaactccctatagagccaggagacaggataggggtttctagggtccaacaccagcttaccttggagtatgaatctacccatgaaggatgagagatgttttgaaaaactagccaggacacacccacaggatcctactggctccttagcagctgattggtgttacataattaacttaattggagatgcattaggtcacttgaatgtataagcaagcacctatggtaggcgctacagacatttaaatctcttgggaattcgatgctcccatggaatttataccagttatatgaattgacttaagtatcttgaaaaagaaactttagagaaagcatcaggggtgtgtactcagtatttcaaatcagaacacaagattggaacttttggaaaaatgggttcaagctttcctattagccatggaaatgcaaagtttagcagaagcaagcaattaggcagagaacaaaaatgttaagcatggtgttgtctatcttattgaagtggttggaaatgaaagcttttaatttgatagatttatcagtataaaattagggaaaccacgtgtggggaatgaatcaatttagagcttcgggaattgtgaggtgacttttgtaacttttgttctgtgtgtgacctgtgaaccactaggatgtgatctgcccttgtgggcaggtccagcatagttaggagttaggctttagcataaatttctagctgcatctgagtctcctgggatgggtgctctttggctggttttggctgcggatggtgagatcagagcagctcttcctgctgctggcccctgcaatcagttgttgggatgccagtgcagatcactaagtagtaagattttaatcaaacacgaccaggtccgaaatgcaggtcatgagtgtgaaattctcaaatttacataaaaagtagaagtatagacagtttaacatttggtattaaaggagaggaaattgtagcagcttttcacgtttcccagtccccattagagggcttgagaccttgtacctgaacaacccattttgcactcagtgctttctgatgccttaggagaattgttttgtttcacaaaagctgggaaggaagaagtccattctgcagctgttagatctgcctctcaggaaaaagtactaacttgttctttttgttcctggctttcatcagtttgtgagatttctctattttttttaaatataattttatttctttcaacaaatataaaataaaaaacaactttggaacaatgaaaaaaaaaaaaaaa

SEQ ID NO: 133 - DNA, 5043 bp, Homo sapiens
ctctccctgccgcccggcccggctcgcccagtccagtggctccagtccggatctcgccgccgcccggcccaggtgcgagtccccactgctggggaggcggcgggccccggctcccctcggccgcctagcccgcctcgcccgcccggggttggcggggagggaacagctgggcggccccagagcccctcggaggacaatgcgcccggcgctcggccaccctcgctcggtctcctccgcgtccggttccttcccgccgcccccggcagccgcccggctgcagcccctcttcctccgcgggggctccttccgcggccggagaggctccggcgacagcagcaccagcaccagcaccagccgcgggggaggcggcggcagacgcggcgggggcggcggctccccgagcagcagcacgggcgccgagcgcgaggacgacgacgagagcctcagcgtcagcaagccgctggtgcccaacgccgcgctcctggggccgccggctcaggtgggcgcccccgccggccccgcgcctgtcgccttctcctcctcagcggccacctcctcctccacctccacgcccacctcctcctgcagcatgacagccgcggacttcggcgggggcgccgcggccggggccgtcgggggccccgggagccgctcggcggggggcgcgggcggcaccgggaccggcagcggcgcctcctgctgcccgtgttgctgctgctgcggctgcccagaccgccccggccgcagaggtcggcgccgcggctgcgcccccagtcccaggtgccgctggggctaccaggcgctgtccgtggtgctgctgctggcgcagggcggcctgctggacctgtacctcatcgccgtcaccgacctgtactggtgctcctggatcgccactgacctggtggtggtggtgggctgggccatcttcttcgccaagaacagccggggccgtcggggcggcgcagccagcggcgcgcacaaccaccacctgcaccaccaccacgccgcgccgcccctgcatctgcccgccccctcggccgctaccgctggggccaaggcacgcggagcccgcgggggcgccggcggcgcggggggcggcctgggggcggccgcggcagcgggcgagttcgccttcgcctacctggcctggcttatctactccatcgccttcactcccaaggtggtgctgatcctgggcacgtccatcctagacctcatcgagctacgcgcgcccttcggcaccacgggcttccgtctcaccatggcgctgtcggtgcccctgctctacagcttggtgcgggccatcagcgaggcgggcgcgcccccgggatcggcaggacccctgctgctgcagccccagcggcaccgcgcggccggatgcttcctgggcacgtgcttggacctgctcgacagcttcacgctggtggagctgatgctggagggccgcgtgccgctgcccgcgcacctgcgctacctgcttatcgccgtctacttcctcaccctcgcctcgccggtgctctggctctacgagctcaacgccgcggccgcagcggctgcatcctggggccaggcctccgggcctggcagctgcagccgccttctgcgcctgctgggcggctgcctggtggacgtgcccttgctggcgctgcgctgcctcctggtggtcagctaccagcagcccctctccatcttcatgctcaagaacctcttcttcctcggctgccggggcctggaggccctggagggctgctgggaccggggcaatcgggcctccccgagtcgggccagagggggctacggtgctccgccctccgcccctccaccacctccgccaccacctcagggaggctcccagctgggccactgcatctcggagaacgaggggggtgctcatggctatgtcaacaccctggctgtggcctctcagaattgagggtgaagggcacgggtccttgtttttgggttgagagtccccaacccccttgtcttctaccttctgtcacctagatttgatcagggtctatttggaagaggtaacccttttcagggctaagggccagggtgttcttctgcaccctggggtgaggacggcttggagggagaccagcagttaacggtgagggaggtaggtgcacttaccctctcctctcttctcctatcctaccccaatcctgacctccaaggggctggtacctctgcttcttgctttgcccacctccactctaattcccatccattaggaggagaggggtgctgggccttggaccttctcccttgcttagaagtgccagcctcttttaggctgtggttagtggccattgtcccatgccttgaaattgacccagaacccactttccactgatgtgtctcttggatttcttccaggtgatagatacaaagtgtatgtctctgtgtgtgtagtgttgttttctcgtgtccaccctgtggccctttgcaatgggtaggagatctggggaggccctgccccctacaccatacttatcaccaccctcctcttttctgcctggatttgtgaccatgaattcccaggaagagctgggcccctgggagctgcccaggtactccccttgaagggagaatctcacccaggatcttcctcaatactgctcctctcttctcagctcagggagaggaggggatccattctctaaggaccaaactgcaccctttcttgggtgagtgagcatttctacctccgtgctttcaacttttgttgcatcatgcactgatgctgcttgcaaaaaatgaagacaaaatactcagaagttgcatttgccatggccactggctccagctggggtttggtgccagtgttattacagggtctgcggagtatcagccattggcttggcctctctctgttcctccctctgcacctagaactcttatccttcctgtggtttggtgccgactgggtcggatctgggcttagagtaatagctttggtgggtttcctggatggatgtgaagttgggcctcccatgggcccaagggagtaggaagccccattccccacctgtccttcctctaggaagtgtagatcagaaagtgaggtggtgacctcccacctctggtctggttaagagtctcactagggccaaggcaggctgcagaactttccctcttcctctcattgagggtgatgacaagagacatccggggactgtgcacttacagtcggtgtggaatgtcactcttgcagtctttgaggcaggataagtatttttacatattttaagggtgcaggaggacagcagctaacaaggccaggaaatactcacttccctccaccctcaacaggatgtggtgggggtgaaacttgaagaatttttgtttccccttctcccttcttacgtttgggaagttttatgtagtgtaacaaactctagacgagttaccagaagatgtggattctagttctgattctgtcactcattggctttgagtgacatatttttatttcctgggcctgttttctcacattaaaaaagtagaagttagatgagtgatctctaaggttgaaggtaatttcagctctcacattcttttgagtttgtggctcttgaaagccctggtcctgatgctccctgtaaaggtggctgggagagaagccagccaggctgcacttgcagaacattccctgctctgtactgggtgtgtgaagccccagcagagaaggccggagggagggcttgggtgcctgggctgggtgtggggcagggcctggcacagctgcagagtgcacagggagggtcagaagtgccaagtcactggccgttaactcagcacccaggccaagcccccgcctcccacttgaagccccctcttacaactgttttgggggcttggagcagaagacacccttgtagacagacataagaggggcagaaggcttgaccagagttctcttgagcctcctcatgctctcagagcagggaacagcgggggaaaatgtttacactccatgcacaatctgtgcttccagtccctcaccctatgtggcccaatagctggctggatttcacacttaattggtatttttttctgccttcttcccctgcccccactgactcctctcctctccctttgattgtactcaaggttctggggcctgggccctgggtgggtaccaacagctgctcgctgttcccatgtcctctctccagctttgctgtgtttctctgctacctaatctcagtgactgtgaaaggacattgtgtctgagccatggccagccgctggctggccccctgatctgccccccttctattgtttggatggccatctcctgctgggcctccctgactgtaaaatctctgtactgtttgttaggtttttggtgggaggctgtgataagttccaatgagctgccacttccctggatatgtcaagaagctgatggcaacttggccaattctggcagatatcaggcccccagttcagccccagtcaccctcttttacacatgtgggtcaaccactgtgtgctcagagggtcagtcccttcctctgctgtgtttttcttgagtccttgcactcacttcccctgccccagtcacgatgacccctaaagcttcctttgcccttgctttctagggcatccctagtgaaggggcaaacctgagatttctccgtggacctgacagccaaggcagggcactgtctcctgaggccagtgccagcacgtgcatggttcacagaaaaggatcctgggctcagaatctcgagaaccgcctgctcctaacaattcagcaagtcaggggcttcctctctgttagtccccaaatccttacttattttaaaaagactagaccctctctaaagactgttccattttaacatgtcctgattctgcatccgtgggttttgtgaaagagagctagctggcggttagagcctggaagaaggagggaagtggcacctcactagcatttatcacttttttccttctctttttaaaaataaaaccagactctgttctgaaaataaaaaacttgagacttgtaaaaaaaaaaaaaaaaaa

SEQ ID NO: 134 - DNA, 2271 bp, Homo sapiens
acattgtagcaaaatggcgactgtcattcacaaccccctgaaagcgctcggggaccagttctacaaggaagccattgagcactgccggagttacaactcacggctgtgtgcagagcgcagcgtgcgtcttcccttcctggactcacagactggggtggcccagaacaactgctacatctggatggagaagaggcaccgaggcccaggccttgccccgggccagctgtatacataccctgcccgctgctggcgcaagaagagacgattgcacccacctgaagatccaaaactgcggctgctggagataaaacctgaagtggagcttcccctgaagaaggatgggttcacctcagagagcaccacgctggaagccttgctccgtggcgagggggttgagaagaaggtggatgccagggaggaggaaagcatccaggaaatacagagggttttggaaaatgatgaaaatgtagaagaagggaatgaagaagaggatttggaagaggatattcccaagcgaaagaacaggactagaggacgggctcgcggctctgcagggggcaggaggaggcacgacgccgcctctcaggaagaccacgacaaaccttacgtctgtgacatctgtggcaagcgctacaagaaccgaccggggctcagctaccactatgctcacactcacctggccagcgaggagggggatgaagctcaagaccaggagactcggtccccacccaaccacagaaatgagaaccacaggccccagaaaggaccggatggaacagtcattcccaataactactgtgacttctgcttggggggctccaacatgaacaagaagagtgggcggcctgaagagctggtgtcctgcgcagactgtggacgctctgctcatttgggaggagaaggcaggaaggagaaggaggcagcggccgcagcacgtaccacggaggacttattcggttccacgtcagaaagtgacacgtcaactttccacggctttgatgaggacgatttggaagagcctcgctcctgtcgaggacgccgcagtggccggggttcgcccacagcagataaaaagggcagttgctaaacccacggaacagactctctgggcaattagccatccccctctgactttggtcattgtgctggttctgatatatattttttttaatgaaaggcaactttagattttccctctatccttgctttttttcccttcacctcccacgtgtccctccatccctccccccacccctctgttttgggtatgtacaacagaagcacaaactactgaaacaaaacaaaacagcagaatgagcgttcttccgagagatggcatcgtgatgcgctatttattttccatagaaataggaagttagacggattgtctcttttctgaggggagggggtctttttgacaggagcagagttgatgtcctcaattttcatatttattggcaaaaggaagagaagaggaactttgggttggaaacaaagaaccaataacattaaaacattattatttatatattctagctgttattagaatcagactttttttgcgagagagagagagagagagagagaagggaaatcaaagaaatcgaagcaatatcctgtttagaggcaagccgcccggtggggagaatttcctcaatgggagacggttgcactattctgtgccccacggagtttgcggctccccgcggcagacccctccctcattctcctccctgacctttccatcttcctctctgcttgcgagaaaatgtcagtagttccagagaagtcggggtgcctatgcctggcctccctccacacctgggccctgaccagccgcctcctgggctcctcctcctccgtcagtagagctgctgttttgttattgctggtttttcctcactttcctcctggcaaagaacgacttccaaatgcagggatggaatataagcagaacgtcatgggctcagcagtgactccaccacccgaggccgaggccgtgcttctggaagatagaaggagacatcatcgtgtgtttcccctccccttgcccctgttaagaaacgtatcaatacccattggatgatcaaggctaccgtatttcttctatttttttttatagtgcctgccaggcactttgttttatgtttccaatagcacttcctgaaataaaccaaagcaacactgctcaaggcccctggggcgatggagaaggccacccacctcactgacagtcccaagaatgaccggctgcgaggtcctagtcaaaag

SEQ ID NO: 135 - DNA, 6413 bp, Homo sapiens
agcagaaagccaccgatcctgaaccagccgccggagccggagtggcgaccgggtgcggagtgggcaaaaagccactgggggaggccagtcccgatcagtcctttctggctccagctccagatcccgtgcggagcaacagctgcggtcgcagtctccaccaccgcctccacctccatcgccgtcgggggaggggccggccggaccccggggtcactgccgaggaatgaagagaggcggccgggccccgcgctccgccccggcctagggccttgccccgggagcccgcgagggtggaggcctgaattttgatctatgttctacctacatccagctggctgaaagtacttgaggatcacatgaccctggacatggatgctgttctgtcagattttgtccgttccacaggagcagagccagggctagcgcgagatctcctagaaggaaagaattgggatgtgaatgccgccctcagtgattttgaacagctacgtcaagtccatgctggaaacctacccccatcctttagtgaggggagtggtggctccaggacccctgaaaaagggttttctgacagagagcctactcgccctccccgacccatcctccagcggcaggatgacatcgttcaagaaaaacgcctgtctaggggcatctcccacgccagctccagcattgtttccctggcccggtcccatgtctcctccaatggtgggggtggggggagcaatgagcaccccctggaaatgcccatctgtgccttccagcttccagatctcactgtatacaatgaagacttccgcagcttcatagagagagacctcattgagcagtccatgctggttgccttggaacaggcagggcgtttgaactggtgggtgagtgtggatcccacctctcagaggctgcttcctttggcaactactggagatgggaactgcctcctgcatgcagcctcccttggaatgtggggtttccatgatcgggacttgatgctgcggaaagctttgtatgcactgatggagaagggagttgagaaggaagcgttgaaaaggcgctggaggtggcagcagacacagcagaataaagagtcagggctggtatacacagaagatgaatggcagaaggagtggaatgaactgatcaagcttgcctcaagtgaaccccgaatgcatctaggtaccaatggagccaactgtggtggggtggagagttctgaggagcctgtatatgagagccttgaagagtttcacgtctttgtccttgctcatgtgcttaggaggcccatagtcgtcgtggcagacaccatgctgagggactccggaggggaagcatttgcccctattccctttggaggaatctatctgcctttggaggtcccagccagccagtgtcaccgctcccctctggtgctcgcctatgatcaggcccacttttctgcactcgtgtccatggagcagaaggagaataccaaggaacaagctgtgatcccacttacagattcagagtataagctgctgcccttgcactttgctgtggaccctggaaagggctgggagtggggcaaagatgatagtgacaatgtccgattggccagtgtaattctgtccctagaggtcaaattgcatctgctgcatagctacatgaatgtgaagtggatcccactgtcctctgatgcacaggctcctctggcccagcctgagtcccccaccgcctcagctggagatgagccccggtccactcctgagtctggagactcagacaaggagtcagttggcagcagttccaccagcaacgagggcggccggcggaaggagaagtcaaagcgagatcgggagaaggacaagaagagagcagattctgtggctaacaaactgggcagctttggcaaaaccttgggcagcaagctcaagaagaacatggggggcctgatgcacagcaagggttcaaagcctggaggggtggggacagggttgggaggaagcagcggcactgagacactggagaagaagaagaaaaactcactgaagagctggaagggtggcaaggaggaggcagctggggatgggcctgtgtctgagaagcccccagctgagtctgttggtaacggagggagcaagtatagccaggaggtgatgcagagcctgagcattctgaggactgccatgcaaggggaggggaagtttatttttgttggaaccctgaagatgggtcaccgtcaccagtatcaggaggaaatgatccagcgctacctttctgatgctgaggagagattcctggcagaacagaagcagaaggaggcagagaggaagatcatgaatggaggaatagggggtggccctcctccagccaaaaagccagagccagatgctagggaagagcagccgaccggtcccccagcagagtccagggcaatggcattttccactggctaccctggggactttactatccctcggccgtctgggggcggagtccactgccaggaaccccggaggcagttggcagggggtccatgtgtcgggggcctaccaccatatgccaccttccccagacagtgccctcctgggcgaccctacccccaccaggacagcatcccttctctggagccaggcagccactctaaggatggacttcacaggggtgccttgttaccacccccctaccgagtggctgattcctatagcaatggctacagagagccccctgagccagatggatgggctggaggtctccggggccttcccccaactcagaccaaatgcaaacaaccgaactgcagcttctatggacaccctgagacaaacaacttctgttcctgttgttacagggaagaactgaggaggagggagcgggaaccggatggggagctcctggtgcacaggttctgaacgggtggaacactgaagggcaaggaggctaaacaaagttaagctcaactaattggctcatcaagaacacagtccccatgttgagggggaaaatgcagtaatgtttgtgggagcctggctggaaacttttaagtgtgtgcacacaggagtgctgccaggctggcaagagcaggtcggggctggatggcacctcaggggctgtactattcctctgcagagcttgacttgatgaggtttgaggtacaaggggaaaagatggcgattctgtcttataacctcctgggtcccatccagggacctaagagaaagtagcaggggaaggtttggtgtgtgggggtgggaggtgggcagaagtcttggggaggaatgggcaaaggaggttctcagtcaataaaaccaaagttctttaggttgggaaaaagcacatggtggagtgagaagtgtggaggggaagtgggaaattggacacatttgctattgatttgaattaagctagaaattaaggttggataaattcttccccttgaaggatctggaaagacaaggcagtaatgtgtcctcatgggtgcctgttaggaggtgggggtagtttaaatccgtttgtttagatgggaaagggaggaacttaagagggaaatccttttcctcttaaggtttatttccttccaagcagtcatatgtcatctgttacagtttgagaagagattgctgattaccccctgtcttttcctcatctaagtctttaattgtatttgtttaaagggaagagtgtggtgagaacagccgtcatgtgtgttgcattttctccaggtgaattggggcagagctgatctattttttaaccacagcaataaccatacgttggggtttgagtgcaccttgggaggggtgggaggacagacattttagccagaggctgtttcaaacaaaaccaaaaacctaagtagagcattacaggcctctgtggctgctgcgtttctgtagaaagcaacttattttattgacttttttttttaaggaaaagaaataaaaagaccccagcaagcaaaaacatttaaaaaatgatttttttccctcctacttaagtggttctttctccctttgctctacttttggagaatgaacttaacatcccggcttcttttgttaagccatagctgaccttaatctgtggttagtttattaaaataattaaaaatactttctaagaagagatatttttgatattaggactgatgttgaaacatataggggcaatttataaaaaggtagttagagaaatatattttagtgaactataaccacagagcacagatgactcccaatgagctgatctgtctttaggtttctccctttccctgacccttccctgttctctaggggctgggagtggggatgcggacacagtagggggagctccttcgcattttgcacaaagcacaagtctgaacagcctatgctctggccagagccatttctaagagctttaaaccggaagacctatcctgggccaattttcctttttctttatatttttttccgggaaaaaaagtcaactatgcaattgtatacactcccgggtgcatgtgaagaaggggaataagtgtacttatgtgtccagagtattaactggggctgtttttctgtgtttggatttctcttttgaggtatgtactcataacccatcccttggaacgtaatccccacatttgatctaaagcacttgagcgtgcatgcatgtgcgtgcgtgcatatgtgtgtgtgttttcctcctcggtagccagtcaagattgtccttgttggaaatgctcacggtttataaaggttattttctcctcaacaaactcagaagtcacctattttccaaatctgatttaataatttcctatggctattaattcttagggttttctttgaaaatagatttgtgttaaggaagcagtgagattccaaaggaagggatgtgtatatgtctaggcaggtctggaacctggtatgagatgagcactcccctaagttgcaaaatttaagggttactataaaactcattaatcaagatactataaaaaatgcagtatttaaaaaaattaatgcaaaaaatttatgttggataaaatagcgaaatcttacaggatctgacaggactgagattaggaggagggaagtgaggctgaattgaataagtatggggatgaatccttcttatttaaatttttgatacattgtccatcatagactttttacattaattgtgattttttaaaaatgttgcattaaaatagtatttatcttggttactgggttttttggcactccttaaattttgtgcccaaggtgagtgctttgctcacctcaccctagttacgtccctgtttctgtgatttgaacactagcgagaacaccactgtgtgcgcctccacccccatcacacaccaaacaacaggtggctcagacaccctgaatttgcacagctcacctagctttcctaatttaggccttcatatcatagaatggtggcctggaccaataggaatgaaaacagaccaggggttttcccagagaataaagccggaaaagttttgattctccactggactgctgtgtttggatttgatctgttgttagattctagttaacacttttgtttttaaaaactaaggacaaatgaacaaaaaaccttgtatcatgtttgtttttatttataagttagccaatcccaattccgtttgctttattttcaaataaaaaaagatggaaattttgaggggtggtctaggggtgaatatggtaaaatggggctttaggccttatagctttttattaagaaataaattattttttttatttgggagggtaactatttattgaggcattgaaaaacctctccattctaaggatgagagaccctgagacaatggatattttttataggagatagtgaagtttgttttgcttcattctttcggggagggttttggtgggatggggggaggtgaaggaataatgcctgggaaattaatatagattcagcttggtttgtggtattttgggaagatgagggaatagaagaggcaagcccatgtcgttactgggttggggagaaggaaagaaggggcatatggcctgcactcgaaatgggcagaaaaattccttagttaaggaggggtgtgtgagtgaagggggaaggtagaccctttaaccccaagtgagggatgatatcatctctcaggcttaaatttaagtgcacttagttcctttaatccagggcaactggggtacctactgaagtttttaatggagaggggagattttcagggttcttgtttttccctttttgatgttagacagtgctactccctccctgctgtgctctctgccccatctccaatggagtaagtattactgtaggataggcctccgcttctcccttaacctatgctgcatttattgaaagttacaagatttaaccagaagtttttcctccatactggtttttatcaacaaaataaaaagattatatccaaa

SEQ ID NO: 136 - DNA, 6975 bp, Homo sapiens
gggagagggaagggggcggagctagccggagccgcgagtccattttggggctgtgcttggcgcgtaccgtgcggtccctgtagttggaggacgggcggtcgcgcggcctttcccactagccggaggtcggagataagtacccgccgcccggctcctctcgggaaagcggggtggtcctcgaaccttcagcgagggtggggagttgcccagtagcctctagttcgttagtcaaaacgtgaaaaaaaagacctgctttgccctgggaaatagtaaccctgccaaatacatcagcttgtaggagacagagaataacagcacctggccgggtgcagtggctcaggcctgtaatcgcagcactttgggaggctgaggtgggcggatcacctgaggtcaggagctcgagaccagcctggccaaaatggatgtgatggagctgcttgaagaagatctcacatgccctatttgttgtagtctgtttgatgatccacgggttttgccttgctcccacaacttctgcaaaaaatgcttagaaggtatcttagaagggagtgtgcggaattccttgtggagaccagctccattcaagtgtcctacatgccgtaaggaaacttcagctactggaattaatagcctgcaggttaattactccctgaagggtattgtggaaaagtataacaagatcaagatctctcccaaaatgccagtatgcaaaggacacttggggcagcctctcaacattttctgcctgactgatatgcagctgatttgtgggatctgtgctactcgtggggagcacaccaaacatgtcttctgttctattgaagatgcctatgctcaggaaagggatgcctttgagtccctcttccagagctttgagacctggcgtcggggagatgctctttctcgcttggataccttggaaactagtaagaggaaatccctacagttactgactaaagattcagataaagtgaaggaattttttgagaagttacaacacacactggatcaaaagaagaatgaaattctgtctgactttgagaccatgaaacttgctgttatgcaagcatatgacccagagatcaacaaactcaacaccatcttgcaggagcaacggatggcctttaacattgctgaggctttcaaagatgtgtcagaacccattgtatttctgcaacagatgcaggagtttagagagaaaatcaaagtaatcaaggaaactcctttacctccctctaatttgcctgcaagccctttaatgaagaactttgataccagtcagtgggaagacataaaactagtcgatgtggataaactttctttgcctcaagacactggcacattcattagcaagattccctggagcttttataagttatttttgctaatccttctgcttggccttgtcattgtctttggtcctaccatgttcctagaatggtcattatttgatgacctggcaacttggaaaggctgtctttcaaacttcagttcctatctgactaaaacagccgatttcatagaacaatcagttttttactgggaacaggtgacagatgggtttttcattttcaatgaaagattcaagaattttactttggtggtactgaacaatgtggcagaatttgtgtgcaaatataaactattataaaatctgtttcaagtatgcagttttcttttgttagaaattgttagagaatagagagtggtaattcagatttggtcaacgattctagtcacatattttcctccaaaagtattccttccaaaaataatctatacatgttcaaattaggtagcataaagataaaagtgaaatttagtagtataggcctgaacctttttttgtttaaaagagtgcttttgaaataagcatccaccccaaatgttggttgtatttatgctgtgataaaaataggtgagagatcatatgatctaatattgtattgatggaagtataggtagtatagtagtgattgttcttcaagcatgcagtaaagatcacttttttttttttttttttttttgagatggagtcttgctctgtcgcccaggctggagtgcagtgatgcaatcttggctcactgcagcctctacctcccaggttcaagtgattatcctgccttagcctcctgagtagctgggattacaggcgcgtgccaccacgcccagctaattttttgtatttttagttgagacagggtttcactgtcccttaagaccatcctgttagccaagatggtcttgatctcctgacctcgtgatccgcctgcctcggcctcccaaagtgctgggattacaggtgtgagccaccgtgcccagccaaagactgctcttaaagcacctttttgacagtgaacatggtctaaaaaagggaagatattgtagaagatttcacacacacacgcgtgtgtgggagacaactaaaggtattgaaggtactaattaattagatttccaaaattttctacagagagttaattatcaccaaaatgtgaatggtacatacaaaacctggcattttcttgtgataagtttacatttttaggagagtggagctttcaatctgcccttttctcctttgtttttgtagttttcaccaaagatgatcaactagaaatgttaagtggctatgcaagcaaaagcatagataggttaaaaaaaaggatcagctggctgggcagggtggctcatgtctataatctcagcattctaggacagtgatgtgggaggattatttgaggctaggagttccagttcgaaaccagcttcgtaaacatagcaagacccagtctctaccaaaaaaaaaaaaaaaaaaaaaaaaaaaaaaaatatatatatatatatacacacacacacacacatatgtacacatacatatatatacatatatatgtatatatagaacacatggcaagagcaggaaatgggaagactaccttttttctggcagctatgtgttgttttgttcgaaagatggcaagtgtacaaccaaaccaatccacttgcttacagaaagaatgtttagtgtagttaagactaatttgacaacagataaaacagtctgtcagctattacaaagtaatcagctgaacactaatgctgttctgtctgctcacaagagataaagataccctctcatggaataaacaccttgcttagaattcatataacaaagaagtaaccttataactgctctctagtctgccttatttgtgtcatagagtaagatattccttgaaagcccattaagtggaatagactttctgaaaataagagttctttacctcagtcctcctctaatttggttgagaggaggtaatgaaaatggggacaggataaaaggtggcaactaaatttaaagcacagaagaaatgatttccttctagctatgagaatagtcaaattgagcttgccaggctgtctcattcctaacatgtaattcatgatttagccactaaatttctaaggagatcataagaaattaagaaaaacgtttaagtctagcctctgcgtggtagacaggtatggggagggagaatgcttttcccctcccagtaataaaaaaaaaaaaaaaaaaaatatatatatatatatatatatatatatatatatatatatatatatatatatatatagttttactaggttttcatggataagtttttaaatgtaagacaggaaagggatctatttgatgtctatcttcagatatattggcagttttccttaagctatttagttcctcatctgttgctttttcattttgtatactgcaagttcccaggcaactcgaatttgcaaacacagccatggatacactatttaccttacagtagtttcctgggaatctaagtctggtttttgttattcttccctcccctccactgcataatcatgtataactagcaacatttatggttataggttgatttcctaagtgtggctgatggtagcctctagtttgaagtgagggaagaatgagtagtcaggaactggtcactttgaatgtgggagggaagatattcacgacaaggttttctacgataaagcagtttcctgcttctcgtttggcacgcatgttagatggcagagaccaagaattcaagatggttggtggccagatttttgtagacagagatggtgatttgtttagtttcatcttagattttttgagaactcaccagcttttattacccactgaattttcagactatcttaggcttcagagagaggctcttttctatgaacttcgttctctagttgatctcttaaacccatacctgctacagccaagacctgctcttgtggaggtacatttcctaagccggaacactcaagcttttttcagggtgtttggctcttgcagcaaaacaattgagatgctaacagggaggattacagtgtttacagaacaaccttcagcgccgacctggaatggtaactttttccctcctcagatgaccttacttccactgcctccacaaagaccttcttaccatgacctggttttccagtgtggttctgacagcactactgataaccaaactggagtcaggtattttgtactttgcagtatttctcttgtataccagtttgtgatgttttctctaaaaacttgaagttcctcaggcctgtaacttctggaaaagatgattattcaaaataatgttttggggtaaccagtggagttgggtagaatgaccaaataattattttccaaactgggatactttttagagtgaaaggggctattattaggtgggacaaaaggaataaatgaagactgcccagaaaaaactgagactatggacattcaaatcatgggagaaaataattttgtagattatgttccattgctaatgaatttgacttagaaaagaattgccttatttttaagagattgtttcagtggttcacataaaggctcgctcactggtttctcttgagttccttacacactatataagttgttctttcagttttatgattcaactactgtttttccttcagctgactttatttttaaacacccttaaagacagatatatctcatggcaaatttggtatcctgttacagccttggctcttaaacaactcaaaatattgggataggctgtcagtatgttaaggatagttgctcctgagtcaattcttcacttactccctctgttgttcttggctggatcctaacgctgatttccactctgctgtcacaaacatttttccccccgtaaaatgtcttaatgctgtcctaccattattttaccaactgtgaaagctggctttaatttttaggaggaaaagaaaagcctgcatgtgttctttattggtatcatttaaaatatacttttttttttttttttggtaaaggtaggcgtattttaagatattttcttaacttgagcagtagccaacaggaaggataccagtgtctctctctcttagcgacacactccttggtcttgcttaccaactggaggacactaggtagaataaccgagtatgacaattcttaattgtttacattttataacttcctgtccttcaaaagagtttgaaatgtcattttgggaaaagagagccagtcaagctagtaggctgattgtgaagaaaatctaataccttatctttatctcaaacctctgtacaactttattttcattgatgggatactttaacaaaaatgaaattttttttggtttttaaaatatgagtgattatgacctctttggggatcatgcttcaaaaagtcagaaacctagagacaaaactgtcattgatttttaagaagaaacacactaggtcaaaagaagatgtcctggaaatatgaagtactctttaaaaaccatgcatttggagaaagtaattgtttccttgaaaaacatgattaaaaactaaaactgggatgttcctgtgtgtacacagtgccaaatggttttccctttttatgttgtgttttagaaacagcacgaaagttttttccattttaaagtgagaaaacattatatttagacttccataattccaaaatcagaagctatttttaaaattagcattttcttgcatcaccaaatggtattcaattgtttgaagctcaaaatttttaccattccataaatgtttgtgaatttttagacagtgccaatttaaaagtagagatagccaatctgaatacggtgaaattatggggatctctggtgattgggatgaaaactctggccttaaaaggtccacttttagtatataattgcctaattagcaatcatttttattttttgctcactccctggtctgaatctatctgtctattcagatattttttggtaggtttggaaaatggagaagtgagcctaattggtgcctaattgtctggtgtatcattcactttattcagtttgttctatcaatatgatttacccctcaaggttaacctagcaggttgctcagttattatctctcaaggtcacagtactagaaatacttggcttgcatctttcagatgccattcatgttatcaagctcaaattatagttggtcacaggattctaaagtctttatttgacttctcctttttgaactggctcaaatggaaaagtgtagttgcttttaaatgttaaaaataagtttaaactttatatttcccattggtttcccctattttgtcctttctttgtgtgcttgaaatattttatttttcagtttgtcctcatagggaatcaagtattttagctaggtgatgtcttgcaagtacgttccactttgttacaatctactatctgtatatactatttgtatcttaattcttttatgagatgttctgtaacatttttctcactttgacaaatgtttttagactgtacagtcaagatctggcgcttgggggtaagtggaatgatttgctaatattgagaatctgttgtatcaaacataataaactttttttgagatgtgaaaaaaaaaaaaaaaaaaaaa

SEQ ID NO: 137 - DNA, 3174 bp, Homo sapiens
tgccgccgctccctactctgggggttgggactacctccttttccgcgggccccgcccaggcggctgcccgtgacctgcctgggcgcggggaactgaaagccggaaggggcaagacgggttcagttcgtcatggggctgtttggaaagacccaggagaagccgcccaaagaactggtcaatgagtggtcattgaagataagaaaggaaatgagagttgttgacaggcaaataagggatatccaaagagaagaagaaaaagtgaaacgatctgtgaaagatgctgccaagaagggccagaaggatgtctgcatagttctggccaaggagatgatcaggtcaaggaaggctgtgagcaagctgtatgcatccaaagcacacatgaactcagtgctcatggggatgaagaaccagctcgcggtcttgcgagtggctggttccctgcagaagagcacagaagtgatgaaggccatgcaaagtcttgtgaagattccagagattcaggccaccatgagggagttgtccaaagaaatgatgaaggctgggatcatagaggagatgttagaggacacttttgaaagcatggacgatcaggaagaaatggaggaagaagcagaaatggaaattgacagaattctctttgaaattacagcaggggccttgggcaaagcacccagtaaagtgactgatgcccttccagagccagaacctccaggagcgatggctgcctcagaggatgaggaggaggaggaagaggctctggaggccatgcagtcccggctggccacactccgcagctaggggctgcctaccccgctgggtgtgcacacactcctctcaagagctgccattttatgtgtctcttgcactacacctctgttgtgaggactaccattttggagaaggttctgtttgtctcttttcattctctgcccaggttttgggatcgcaaagggattgttcttataaaagtggcataaataaatgcatcatttttaggagtatagacagatatatcttattgtggggaggggaaagaaatccatctgctcatgaagcacttctgaaaatataggtgattgcctgaatgtcgaagactctacttttgtctataaaacactatataaatgaattttaataaatttttgctttagcacttggccccattgtagattgccctgtgcagtaaactttcaaggtgtcggctgccccagattgcttcatttgctgggtgtggaaagagttgctatggccaggcatatgggatttggaagctcagcagaagtgacttctgctctgtggttgctgctccccggctttcacagacatggtatggcagccattcttttatctatttaaccaagaggatgctggggaattgtgctgcttgtcctgttggctggtggctgcattatgtcctggggtgtgcatgtgggtctatttagagcttctgtcccttccttcccattgcaagttgcacccagatgagacagctgtagtactaggtctctttcacctctcattgcctgtccctgcttcgagctggttgtcttgtgcgtgggacatgggccttcctatctgtgttttctcaaagtcaggagctgaccaggagcacactaaggtgtggtcatgcatcataaccaacattcactcatctgggacattcttaagatacatttataaatcatttcagcagtagtactttgtatgtgttgagagtttacagagctctttgacatacgcgatcttagtctttacaaataaggaaaacagctcagtttgggaagtatcagagatgggattcaaacccagatcctctggtccaagttgtatgtgcactgaactaatcaggcaggaaaaaagcccagccactgtctcacagattgttttttgtatattgtagcaaaatcctgaaacaatggggtccttccagtctcatcatacaaaatggcaatcttggctgggtgcggtggttcatgcctataatcccagtgctttacaaggctgaggcaggaggctctcttgagaataggagttcaagaccagcctgggcaacatagcaagatcctgtctctccaaaaaaaaaaaaaaaaaaaaaaaaaaatttcatttttgagtccagaggaccctcctattactcttgatttcatcttcagagtgtagttaaaaaattattttaaataattatttttttaaatcagttgtaggttcacagcaaaagtggacaaaaagaaatttctcatatatcccctgccctcacacatgcatagcctcccaccactatcagtatcccacaccagagtggtacatttgttacaatcaataaacctccattgacacatcattatcacccaaagtccatagtttacatgaagattcactctggtgttgtacattgtatgggcttagacaaatgtatgatgatatctacaattatagaatcatacagaatagtttcactgccctaaaacttctctatgcttcacctgttcatccctttcttccctaatcccctggcaaccactttaaaaaaaaaattaggttcagggggtacatgtgcaggtaaactcgtgacaagggggtttgttatacagattatttagtgacccaggtactaagcctagtacccaatagttacttttctggtcctgtcccttttcccaccctccaccctcaggtaggccccagtatgttattcctttgtgtccatgttatttcactcccacttgtgagaacatggaatatttggtttcctgttcctatgttagtttgttaaggataatggcctccagccccatccatgttcctgcaaaggacatgatctttctttggcaaccactttttactgtcgccatagttcttccttttctagaatgtcatattggaatcatatagtatgtagccttttcagactggcttctttcacttaataatatgcaattaaggttcctccatgtcatttcatggcttaatagtgcatttatttttagcactgaataatactccattgtctagatgaatagtttatccattcacctattgaaagacttcttggtggtttccaagttttggcaattatgaataaagctgttgtaaacatctttgtgcaggtttttctatgggcatgtttttaattcatttgaataaataccaagagcttcagtgctggatcataaa

SEQ ID NO: 138 - DNA, 4562 bp, Homo sapiens
ggtgctgcggcccgcgccgccatcttggattttactctccatttttctctggaattatttttggtgattaattttctgggggggactgggacgcggggcccggcggcgcggccccgcatcgcagcggccgggcagcggggcctgggacgcgccccgaggaggagcggggcggcgcaggcggagagaacattgaaagtattctctaagctatttgaagagagtgactaaatgcacctgggtcaggctgtctgtgggtatgaagtggttgggagaatccaagaacatggtggtgaatggcaggagaaatggaggcaagttgtctaatgaccatcagcagaatcaatcaaaattacagcacacggggaaggacaccctgaaggctggcaaaaatgcagtcgagaggaggtcgaacagatgtaatggtaactcgggatttgaaggacagagtcgctatgtaccatcctctggaatgtccgccaaggaactctgtgaaaatgatgacctagcaaccagtttggttcttgatccctatttaggttttcaaacacacaaaatgaatactagcgcctttccttcgaggagctcaaggcatttttcaaaatctgacagtttttctcacaacaaccctgtgagatttaggcctattaaaggaaggcaggaagaactaaaggaagtaattgaacgttttaagaaagatgaacacttggagaaagccttcaaatgtttgacttcaggcgaatgggcacggcactattttctcaacaagaataaaatgcaggagaaattattcaaagaacatgtatttatttatttgcgaatgtttgcaactgacagtggatttgaaatattgccatgtaatagatactcatcagaacaaaatggagccaaaatagttgcaacaaaagagtggaaacgaaatgacaaaatagaattactggtgggttgtattgccgaactttcagaaattgaggagaacatgctacttagacatggagaaaacgacttcagtgtcatgtactccacaaggaaaaactgtgctcaactctggctgggtcctgctgcgtttataaaccatgattgcagacctaattgtaagtttgtgtcaactggtcgagatacagcatgtgtgaaggctctaagagacattgaacctggagaagaaatttcttgttattatggagatgggttctttggagaaaataatgagttctgcgagtgttacacttgcgaaagacggggcactggtgcttttaaatccagagtgggactgcctgcgcctgctcctgttatcaatagcaaatatggactcagagaaacagataaacgtttaaataggcttaaaaagttaggtgacagcagcaaaaattcagacagtcaatctgtcagctctaacactgatgcagataccactcaggaaaaaaacaatgcaacttctaaccgaaaatcttcagttggcgtaaaaaagaatagcaagagcagaacgttaacgaggcaatctatgtcaagaattccagcttcttccaactctacctcatctaagctaactcatataaataattccagggtaccaaagaaactgaagaagcctgcaaagcctttactttcaaagataaaattgagaaatcattgcaagcggctggagcaaaagaatgcttcaagaaaactcgaaatgggaaacttagtactgaaagagcctaaagtagttctgtataaaaatttgcccattaaaaaagataaggagccagagggaccagcccaagccgcagttgccagcgggtgcttgactagacacgcggcgagagaacacagacagaatcctgtgagaggtgctcattcgcagggggagagctcgccctgcacctacataactcggcggtcagtgaggacaagaacaaatctgaaggaggcctctgacatcaagcttgaaccaaatacgttgaatggctataaaagcagtgtgacggaaccttgccccgacagtggtgaacagctgcagccagctcctgtgctgcaggaggaagaactggctcatgagactgcacaaaaaggggaggcaaagtgtcataagagtgacacaggcatgtccaaaaagaagtcacgacaaggaaaacttgtgaaacagtttgcaaaaatagaggaatctactccagtgcacgattctcctggaaaagacgacgcggtaccagatttgatgggtccccattctgaccagggtgagcacagtggcactgtgggcgtgcctgtgagctacacagactgtgctccttcacccgtcggttgttcagttgtgacatcagatagcttcaaaacaaaagacagctttagaactgcaaaaagtaaaaagaagaggcgaatcacaaggtatgatgcacagttaatcctagaaaataactctgggattcccaaattgactcttcgtaggcgtcatgatagcagcagcaaaacaaatgaccaagagaatgatggaatgaactcttccaaaataagcatcaagttaagcaaagaccatgacaacgataacaatctctatgtagcaaagcttaataatggatttaactcaggatcaggcagtagttctacaaaattaaaaatccagctaaaacgagatgaggaaaatagggggtcttatacagaggggcttcatgaaaatggggtgtgctgcagtgatcctctttctctcttggagtctcgaatggaggtggatgactatagtcagtatgaggaagaaagtacagatgattcctcctcttctgagggcgatgaagaggaggatgactatgatgatgactttgaagacgattttattcctcttcctccagctaagcgcttgaggttaatagttggaaaagactctatagatattgacatttcttcaaggagaagagaagatcagtctttaaggcttaatgcctaagctcttggtcttaacttgacctgggataactactttaaagaaataaaaaattccagtcaattattcctcaactgaaagtttagtggcagcacttctattgtcccttcacttatcagcatactattgtagaaagtgtacagcatactgactcaattcttaagtctgatttgtgcaaatttttatcgtactttttaaatagccttcttacgtgcaattctgagttagaggtaaagccctgttgtaaaataaaggctcaagcaaaattgtacagtgatagcaactttccacacaggacgttgaaaacagtaatgtggctacacagtttttttaactgtaagagcatcagctggctctttaatatatgactaaacaataatttaaaacaaatcatagtagcagcatattaagggtttctagtatgctaatatcaccagcaatgatctttggctttttgatttatttgctagatgtttcccccttggagttttgtcagtttcacactgtttgctggcccaggtgtactgtttgtggcctttgttaatatcgcaaaccattggttgggagtcagattggtttcttaaaaaaaaaaaaaaaatgacatacgtgacagctcacttttcagttcattatatgtacgagggtagcagtgtgtgggatgaggttcgatacagcgtatttattgcttgtcatgtaaattaaaaaccttgtatttaactcttttcaatccttttagataaaattgttctttgcaagaatgattggtgcttattttttcaaaaatttgctgtgaacaacgtgatgacaacaagcaacatttatctaatgaactacagctatcttaatttggttcttcaagttttctgttgcacttgtaaaatgctacaaggaatattaaaaaaatctattcactttaacttataatagtttatgaaataaaaacatgagtcacagcttttgttctgtggtaacctataaaaaaagtttgtctttgagattcaatgtaaagaactgaaaacaatgtatatgttgtaaatatttgtgtgttgtgagaaatttttgtcataagaaattaaaagaacttaccaggaaggtttttaagtttagaaatattcatgccaataaaataggaaattataaatatatagttttaagcactgcatcagtgggagttcttggcttatgttagtttatgttagtttattatgaaaacatcaaagatttttttgactatattatcagttaaacaaaaaggagtcagatttaatttgttttttgaagcactttgagaaattaattttaattaacttaatgagcaaatttttattactactttatgttcaataccaggttcttttcatttctctggattattttgcaaatcattggacagagaatttgggaatataaatctgtaacaggtgtttgacaccagtaggtctctttatttctgggaaatgtgtacctgtactttctgatatacagtgttcctaagtaaaaatcaattcaggggatttgtatagtgtctataggaaagtagcccatgtcttgaaatatgaaaaggaatctgaaggtcatgaaaagtccagtggagaaaatctcaatgcttactgttactactaattgattcctactagtttccaggtttggg

SEQ ID NO: 139 - DNA, 1064 bp, Homo sapiens
cgccgtcatttcggagcgactcagcgcctgcccgccctctcgccgcgtcgccggtgcctgcgcctcccgctccacctcgcttcttctctcccggccgaggcccgggggaccagagcgagaagcggggaccatgttccgacgcaagttgacggctctcgactaccacaaccccgccggcttcaactgcaaagatgaaacagaatttagaaacttcatcgtttggcttgaagaccagaaaatcaggcactacaagattgaagacagagggaatttaagaaacatccacagcagcgactggcccaagttctttgaaaagtatctcagagatgttaactgtcctttcaagattcaagatcgacaagaagctattgactggcttcttggtttagctgttagacttgaatatggagataatgctgaaaaatacaaggatttagtacctgataattcaaaaactgctgacaatgcaactaaaaatgcagaaccattgatcaatttggatgtaaataatcctgattttaaggctggtgtgatggctttggctaacctgcttcagattcagcgtcatgatgattacctggtaatgcttaaggcaattcggattttggttcaggagcgcctgacacaggatgcagttgctaaggcaaatcaaacaaaagagggcttacctgttgctttagacaaacatattcttggttttgacacaggagatgcagttcttaatgaagctgctcaaattctgcgattgctgcacatagaggagctcagagagctacagacaaaaatcaacgaagccatagtagctgttcaggcaattattgctgatccaaagacagaccacagactgggaaaagttggaagatgaacacttgaggacttcagcttctcacctacttagtacagttgggaaccatacacttctggcatgtttggaaatcaaaatgtcacattctcgggggaggaagcccagaaaattgggtatgttctagagatttaccaccattgcttattgcttttttctttaataaagtttaggaaagtagaatttttaaaaaaaaaaaaaa

SEQ ID NO: 140 - DNA, 6457 bp, Homo sapiens
gtgaatcaaaggagagtcccagaaaacctgtgactgttgaagaaaattcatctgtgaatttttatattcaaggagtcagtatttatattcatcttttaaactgggaagatttatattttactttaaaacttcttgataataatttacaatgaatggacacagtgatgaagaaagtgttagaaacagtagtggagaatcaagccagtcggatgatgattctgggtcagcttcaggctctggatctggttcgagttctggaagcagtagtgatggaagcagtagccagtcaggtagcagtgactctgactccggatctgaatcaggcagtcagtcagagtctgagtcagacacttcccgagaaaacaaagttcaagcaaaaccaccgaaagttgatggagctgagttttggaaatctagtcctagtattctggccgttcagagatctgcaatcctcaagaagcagcaacagcagcagcagcaacaacaacatcaagcctcatctaatagcggatcagaagaggattcctctagcagtgaagattccgatgactcatcaagtgaggtcaaaaggaaaaagcataaagatgaagattggcaaatgtctgggtcaggatctccatctcagtctggttcagattcagaatctgaagaagagagagagaaaagcagttgtgatgaaacagaatctgattatgagccaaaaaacaaagtcaaaagcagaaaacctcaaaatagatctaagtcaaaaaatggaaagaagattcttggacaaaaaaagagacagattgattcatctgaggaggatgatgatgaagaagattatgataatgataaaagaagttctcgtcgccaagcaactgttaatgttagctataaggaggatgaagaaatgaaaacagattctgatgacctactggaagtctgtggagaggatgttcctcaacctgaggaagaggaatttgaaaccatagaaagatttatggattgtcggattgggagaaaaggagctactggtgctactacaaccatctatgcagttgaagcagatggtgacccaaatgcaggctttgaaaaaaacaaagaaccaggagagattcagtatttaattaaatggaaaggatggtcccatatccacaacacttgggagacagaagaaaccctcaagcagcagaatgttagaggaatgaaaaaattggataattataagaaaaaagatcaggaaacaaaaagatggttgaaaaatgcctctccagaagatgtggaatattataattgccagcaagaacttacagatgatctacataaacagtatcaaatagtggaacgtataattgctcattccaatcaaaagtcagcagctggttatcctgattattactgcaaatggcagggccttccatactcagagtgcagctgggaagatggagctctcatttccaaaaagtttcaagcatgcattgatgagtattttagcaggaaccaatcaaaaaccactccttttaaagattgcaaagtattaaaacaaaggccaaggtttgtagccctgaagaagcagccatcctatattggaggacatgagggcttagaattaagagattatcaactgaatggtttaaattggcttgctcattcttggtgcaaaggaaatagttgcatactcgctgatgaaatgggccttggaaaaacaatacagacgatctcatttctgaattatttgtttcatgaacatcaattatatggaccttttttattggtagtaccgctctccactcttacttcctggcaaagggaaattcagacttgggcttctcaaatgaatgctgtggtttatttaggtgacattaacagcagaaacatgataagaactcatgaatggacgcatcatcagaccaaacggttaaaatttaatatattgttaacaacttatgaaattttattaaaagataaggcattccttggaggtctaaattgggcatttataggtgttgatgaagcacaccgattaaagaatgatgactcccttctgtataaaactttaatagattttaaatccaatcatcgtctccttatcactggaactcctctacagaattccctcaaagagctctggtctttgctacatttcattatgccagaaaagttttcttcctgggaagattttgaagaagaacatggcaaagggagagaatatggttatgcaagccttcacaaggagcttgagccatttctgttacgccgagttaagaaagatgtggaaaaatctcttcctgccaaggttgagcagattttaagaatggaaatgagtgctttacagaaacaatattacaaatggattttaactaggaattacaaagccctcagcaaaggttccaagggcagtacctcaggctttttgaacattatgatggagctaaagaaatgttgtaaccattgctacctcattaaaccaccagataataatgaattctataataaacaggaggccttacaacacttaattcgtagtagcggaaaattgattcttcttgacaagctattaattcgcctaagagaacgaggcaatcgagttcttattttttcacaaatggtgcggatgttagatatacttgcagaatatttgaaatatcgtcaattcccctttcaaagattagatggatcaataaaaggagaactgaggaaacaagctctagatcattttaatgctgagggatcagaggatttttgctttttgctgtccacaagagctggaggtctagggattaatttagcctctgctgacactgttgttatatttgattccgattggaatccacagaatgatcttcaggcacaggctagagcccatcgaattgggcaaaagaaacaggtgaatatttatcgtctagttacaaagggatcagttgaagaagatattcttgaaagggcgaaaaagaagatggttttagatcatcttgtaattcaaagaatggacacaactgggaagacagtactacatacaggttctgccccatcaagttctactcctttcaataaagaagagttatcagccattttaaagtttggtgctgaagaactttttaaggaacctgaaggagaagaacaagagccccaggaaatggatatagatgaaatcttgaagagagctgaaactcatgaaaatgaaccaggtcctttaactgtaggagatgaattgctttcccagttcaaggttgccaacttctcaaatatggatgaggatgacattgagttggaacctgaaagaaattcaaagaattgggaggaaattattccagaagatcaaagaagacgattagaagaagaagaaagacaaaaggaacttgaagaaatttatatgctcccaagaatgagaaattgtgcaaaacagattagtttcaatggaagtgaagggaggcgcagtagaagtaggagatactctggatctgatagtgattccatctcagaagggaaaaggccaaagaaacgtggaagaccacggactattcctcgggagaatattaaaggatttagtgatgcagaaattaggcggtttatcaagagctataagaaatttggtggtcctctggaaagattagatgcaattgctcgagatgctgagttagttgataagtcagaaacagaccttagacgactgggagaattggtacataatggttgcattaaagcattaaaggatagttcttcaggaacagaacgaacaggtggtagactcggaaaagtgaagggtccaacattccgaatatcaggagtacaggtgaatgccaaactagtcatctcccatgaagaagaattaatacctttgcacaaatccattccttctgatccagaagaaagaaagcagtatactatcccatgccacacaaaggcagctcattttgatatagactggggcaaagaagatgattccaatttgttaattggcatctatgaatatggatatggaagctgggaaatgattaaaatggatcctgacctcagtctaacacacaagattcttccagatgatcccgataaaaaaccacaagcaaaacagttgcagacccgtgcagactacctcatcaaattacttagtagagatcttgcaaaaaaagaagctctttctggtgcgggaagttcaaagaggagaaaagcaagagctaagaagaataaagcaatgaagtctataaaagtgaaagaggaaataaagagtgattcttctcctctgccttcagagaagtctgatgaagatgatgataaattgagtgaatccaagtctgatggtagggaaagatccaagaaatcttcagtgtcagatgctccagttcatatcacggcaagtggtgaaccagttcccatttctgaagaatctgaagagctggatcagaagacattcagcatttgtaaagaaagaatgaggcctgttaaagcagctttgaaacaacttgataggcctgagaaaggcctttcagaaagagaacaactagagcatactagacaatgtttaataaaaattggagaccatatcacagaatgtctaaaagagtatacaaatcctgaacaaattaagcaatggagaaaaaacctgtggatttttgtatctaagtttactgaatttgatgcaagaaaattacataaattatataagcatgctattaaaaaacggcaggagtctcagcaaaacagtgatcaaaacagcaacttgaatcctcacgtgattagaaatccagatgtggaaagattaaaagagaatacaaatcacgatgatagcagcagggacagttattcctctgatagacacttaactcagtaccatgatcatcataaagaccgacatcagggagattcttacaaaaaaagtgattccaggaaaagaccctattcttcttttagtaatggtaaagaccatcgtgattgggatcactacaagcaagacagcagatattacagtgacagagagaaacacagaaaactggatgatcacaggagtagagatcacaggtcaaatttggaaggaagtttaaaagatagatctcattctgatcatcgttctcactcagatcatcggttacattcagaccaccggtcaagttctgaatatacgcaccataaatcttccagggattataggtatcactcagactggcaaatggaccacagagcttccagcagtggccctaggtcaccactagatcagagatctccttatggctccagatctccatttgaacattcagttgaacacaaaagtacaccggagcatacctggagtagtcggaaaacataacaaaaactgatacttcgtctttctggacttttcttttagccatatatcataaaccaacacagtaattgccttacatgacttgaaagatataaacagatcttctatcagtagcagtattgttacttctttccaggatgcaaggtctattatcccaacagaagagaaaatatttttatatttaaggattatgctgcactgtactacaaaattgtagtacttttttttgttttcttttttaaagaaatggaaaatgtttactattacagggacctcaacactgccctcccatacaggctggataaaactgtttttaagtcagtgattttagactgacctccatttaaattatgtttatatatgaactttactctgacctgtgatcatgtttcaggaaggaatgaaagagagttctttcttaataaagaaaaacactcaaggactttgttcatttccaaagctacttgtttacattgtacactgcgaccaccttgccgcttttcatcacaagcttgaatatttaaattctgtacttatatctgtaaaatagccaggaatttcctgtttgtgatctattatgcctttttacaaaaaaaatggctgtaaattattgtaaatattaaaggaactttccttacttccttccctttctcaggctttttttgactgttcctttccctaccaactcaggccttcttattaaaaaaaaaaaaatcagtgtaataacactttttaatgatttgtcttgatggaatcattgtttagaatgtaaaaatggggaaaggggccacttaattccattagtcctctttttatactgaatattttattagatacatgttattcccttttttttccttttttagtcaatattgtgtttgtagttttaaaaaatggcgagatatgtaaaatctaaactgcatgctctggaaacacttttttcagatgcatctggtttaaaagggtaggtgtataaacacttttcagaatccaaaacggccaaaagttattgtaaatccgtttgttttcccgttttatgtgggcaataatgtcaaatgtgctatgcagccaggttaacattttagataaacttgattgacttttaatataaactgttacaatgcacactgattgtatataaaaacgttatatatgacaaattaaatttaagaaaaagga

SEQ ID NO: 141 - DNA, 2936 bp, Homo sapiens
gcggggcctctaccggcccgatggagcgcgcgggcgctactagccgcgggggccaagcccctggcttcttactgcggcttcatactgagggccgagccgaggcggcgcgggtgcaggagcaggacttacggcagtgggggctgacagggattcacctacgctcttaccagctggagggagtaaactggctcgcccagcgcttccattgtcagaatggctgtatcctgggagatgagatgggcctggggaagacctgccaggaagattaaatggtgaagggccatttctgattctttgtcccttgtctgttttgagcaactggaaagaagaaatgcagagatttgctccaggtctttcctgtgtaacatatgcaggcgacaaggaggaaagagcctgccttcagcaagacctgaaacaggagtcacgttttcatgtgctactgactacctatgagatttgcttgaaagatgcatcatttctaaaatcattcccttggagtgttcttgttgtggatgaagctcacaggttgaaaaaccaaagctccctgctgcataagaccttgtcagagttctcagtagtcttcagtctcctgttgaccggaactcccatccagaacagcctccaagagctctactccctcctcagttttgtggagcctgatctcttttccaaggaagaggtgggagattttattcaacgctaccaggatattgagaaagaatctgagtcagcaagtgaactgcacaaactcttgcagccatttctgctgaggcgagtgaaagctgaggtagctacagagcttcccaagaagacagaagtagtgatataccatggcatgtcagcattgcagaagaaatactacaaggccattttgatgaaagacctagatgcatttgaaaatgagacggcaaagaaagttaaactacagaacattttgtcccagcttcgaaagtgtgtggatcacccatatttgtttgatggtgtggagccggagccttttgaagttggagaccacctgactgaggctagtgggaagcttcacctgctggataagctactagcattcctgtattctgggggccatcgggttttacttttctcccaaatgacccagatgttggatattccccaagactatatggattacagaggctacagctatgagcgtgtggatggttctgtgagaggagaagagagacacttggccattaagaactttggacagcagcccattttcgtttttctcctgagtactagggcaggtggagttggcatgaacttaacagcagcagatactgtgatttttgttgacagtgactttaatcctcagaatgacttgcaagcagctgccagggctcatcgcattggccaaaacaagtctgttaaagttattcggctgattggtcgagacactgtggaagaaatagtctataggaaagcagcctccaaactgcagctcaccaacatgatcatagaaggaggccattttactctgggagcccagaaacccgctgccgatgctgacctccagttgagtgagatactcaaatttggtttggataaactgctggcctctgaggggagcaccatggatgaaatagacctggagtccatcctgggagaaacaaaagatggccagtgggtctctgatgccttgcctgcagcagaaggagggagcagagatcaagaggaaggaaaaaatcatatgtacttatttgaaggtaaagattattctaaagagcccagtaaggaagacagaaaatcatttgaacaactggtaaccttcagaaaacccttttggagaaagctagtcaagagggccgatcactccgaaataaaggcagtgttctcatcccaggccttgtggagggatctaccaaaaggaagcgggttctgagtccagaagagctggaggacagacagaagaaaagacaagaagcagctgccaagagaaggagactcatagaggagaagaagaggcaaaaggaagaggctgaacataagaaaaagatggcctggtgggaatccaacaattaccagtccttctgcctgccctctgaggagagcgagccagaggaccttgagaatggggaagagagctctgctgagctggattaccaagacccagatgctacttccctcaagtacgttagtggtgatgtcacccaccctcaggctggggccgaggatgctctcattgtgcactgcgtagatgactctggccactggggcagaggtggtttatttacagctctggaaaagcgatccgctgagccaagaaaaatatatgagctggctgggaaaatgaaagacctgagtttgggaggtgtccttttatttcctgttgatgataaagaatcaagaaacaaagggcaagatttgttggccttgattgtggctcagcatcgtgatcgttccaatgtcctgtctggcattaagatggcagccctagaagagggcctgaagaagatatttttagcagcaaaaaagaagaaagcaagtgttcatcttccacgtattggacatgccacgaaaggttttaactggtatggtactgagcgacttattcggaaacatctggctgcaagaggcatcccaacttacatatattattttcctagaagcaagtctgctgtccttcattcacagtcttcatcttcctcctcaagacagctggtgccttaagaattggcccagcctcagatcctgtctttagcaaccagctaatatttacccagaggtactgcaatagagtatttcaaaatggaatcaggatctggtgggcctcagaaattgtctcttttctgagtttcagtttggttctcctggatgttttgctctgttttgatacctgtaatatagggaaacacaactttttttgggaaagccctttgaccccagcttgctagttgcataataataaattttctgttcct

SEQ ID NO: 142 - DNA, 9374 bp, Homo sapiens
ctcagagctgggaaggaggctctagatggcggctgtgccttagagagagcgcgctctgctccctgcctttgcctcactttacgcaactttccctaactttcgggcagcctcagggggcccccgtagccccctgcctttcctagggacttactggggtcgattcgaacctttttttgggagaaaagcagcttttaggagctttcttttcgtgccttgttggaaagaagcagccgtactgagagcccaggtcgttgttttttccagcttagaagccatggcgcacctccatttttgtgcgctctcctaatgaggttttttttctttcggacctgttttagtattaattattgctttatttttttgaccagttaacatatttgagggttattttatttatttttcgttttttaacggaggattttgcctttatttttaattatttgggatctgatatttttctactagtagataggactcttggtttggacatactacatggatcagtaaatacctgggcacaggacttcaaagcaaacacagattccccctcccccttaatatttaagaattaaaagatgatgagaaataaggacaaaagccaagaggaggacagttcgctacacagcaatgcatcgagtcactcagcctctgaagaagcttcgggttcagactcaggcagtcagtcggaaagtgagcagggaagtgatccaggaagtggacatggcagcgagtcgaacagcagctctgaatcttctgagagtcagtcggaatctgagagcgaatcagcaggttccaaatcccagccagtcctcccagaagccaaagagaagccagcctctaagaaggaacggatagctgatgtgaagaagatgtgggaagaatatcctgatgtttatggggtcaggcggtcaaaccgaagcagacaagaaccatcgcgatttaatattaaggaagaggcaagtagcgggtctgagagtgggagcccaaaaagaagaggccagaggcagctgaaaaaacaagaaaaatggaaacaggaaccctcagaagatgaacaggaacaaggcaccagtgcagagagtgagccagaacaaaaaaaagtaaaagccagaagacctgtccccagaagaacagtgcccaaacctcgtgttaaaaagcagccgaagactcagcgtggaaagagaaaaaagcaagattcttctgatgaggatgatgatgatgacgaagctcccaaaaggcagactcgtcgaagagcggctaaaaacgttagttacaaagaagatgatgactttgagactgactcagatgatctcattgaaatgactggagaaggagttgatgaacagcaagataatagtgaaactattgaaaaggtcttagattcaagactgggaaagaaaggagccactggagcatctactactgtatatgcgattgaagctaatggcgaccctagtggtgactttgacactgaaaaggatgaaggtgaaatccagtacctcatcaagtggaagggttggtcttacatccacagcacatgggagagtgaagaatccttacagcaacagaaagtgaagggcctaaaaaaactagagaacttcaagaaaaaagaggacgaaatcaaacaatggttagggaaagtttctcctgaagatgtagaatatttcaattgccaacaggagctggcttcagagttgaataaacagtatcagatagtagaaagagtaatagctgtgaagacaagtaaatctacattgggtcaaacagattttccagctcatagtcggaagccggcaccctcaaatgagcccgaatatctatgtaaatggatgggactcccctattcagagtgtagctgggaagatgaagccctcattggaaagaaattccagaattgcattgacagcttccacagtaggaacaactcaaaaaccatcccaacaagagaatgcaaggccctgaagcagagaccacgatttgtagctttaaagaaacaacctgcatatttaggaggggagaatctggaacttcgagattatcagctagaaggtctaaactggctagctcattcctggtgcaaaaataatagtgtaatccttgctgatgaaatgggcctaggaaagaccatccagaccatatcattcctctcctacctgttccaccaacaccagctgtatggcccctttcttatagtcgtccctttatccaccctcacctcatggcagagagagtttgaaatctgggcaccagagattaacgtagtggtttacataggtgacctgatgagcagaaatacgatacgggaatatgaatggattcattcccaaaccaaaagattgaagttcaacgcacttataacaacatatgagatcctcttgaaagataagactgtgctgggcagtattaactgggcctttctgggagtggatgaagcccatcggttgaagaatgatgactctttattgtataaaactctgattgatttcaagtccaaccataggctcctgattacggggacccctcttcagaattccctcaaagagctctggtccttgctgcactttattatgccggagaagtttgaattttgggaagattttgaagaagaccatgggaaggggagagaaaatggctaccagagtcttcataaggtgctagagcctttccttctccggagagtcaaaaaagatgtggagaaatcccttcctgctaaagtggaacagattctcagggtggagatgtcagcccttcagaaacagtattacaagtggattctgaccaggaattacaaggctcttgccaaaggaacaagaggcagcacatctggttttcttaatattgtgatggaactgaaaaaatgttgcaaccactgctatctgattaaaccccctgaagaaaatgaaagggaaaatggacaggagattcttctgtccctcataaggagcagtgggaagttgattttattagacaaactgttgacaagacttcgagaaagggggaatcgagtgcttatcttctctcagatggtgagaatgttggatatcctggctgaatacctaactattaaacactatcctttccagcgtctggatggttccatcaagggagaaatccgaaaacaggcactggaccacttcaatgcagatgggtctgaggacttctgtttcctgctctcgacaagggctggtggcctgggaatcaatttggcttcagcggacacagtcgtcatctttgactctgactggaacccccagaatgacttgcaggcacaagcccgagcgcatagaattggtcaaaagaagcaggtaaatatttaccgcttagttacaaaggggactgtggaggaggagatcatagaacgggccaaaaagaagatggtattagatcatctggtgattcagcgcatggacaccactggccggacgatcctggaaaacaactcaggaaggtccaactcaaatccttttaataaagaagagctgacagctattttgaaatttggagcagaggatctcttcaaagaactggaaggggaggaatcagaacctcaggaaatggatatagatgaaattttgcggttggctgaaacgagagagaatgaagtgtcaacaagtgcaacagatgaacttctatcacagtttaaggttgccaactttgcaacaatggaagatgaagaagagctagaagagcgtcctcacaaggactgggatgagatcattccagaggaacaaaggaaaaaagtagaggaggaagagcggcagaaggagctagaagaaatttatatgctgcctcgaattcggagttccactaaaaaggctcagacaaatgacagtgactctgacactgagtctaagaggcaggcccagagatcctctgcttctgagagtgaaacggaagactctgatgatgacaagaagccaaagcgcagagggcgtccgaggagtgtgcggaaggacctcgtggagggatttactgatgcagagatccgaaggttcatcaaggcttataagaagtttggtctccctcttgaacggctggagtgcatagcacgtgatgctgagctggtagataagtcggtggcagatctgaagcgcctgggtgaactgatccacaacagctgtgtgtcagcaatgcaggaatacgaagagcagctgaaagaaaatgccagcgagggaaaaggaccagggaaaaggagaggtccaacaatcaagatatccggagttcaggttaatgtgaaatccattatccaacatgaagaggagtttgagatgctgcataaatctatccctgtggaccctgaagaaaaaaaaaaatactgcttaacctgtcgtgtcaaagctgcacattttgatgtagagtggggggtggaagatgattctcgcctgttgctggggatttatgaacatggctatggaaactgggagttaattaaaacagacccagagcttaaattaactgacaaaattctgccggtggagacagataaaaagcctcaggggaagcagctacagacccgagcggattacttgttgaagctgctcagaaagggtctggagaagaagggggctgtgacaggtggggaagaggccaaattaaagaagcggaagcctcgggtaaagaaggaaaacaaagtgcccaggctgaaagaggagcatggaattgagctttcatctcctaggcattcagataatccatcagaagagggagaagtgaaagatgatggcttggaaaaaagtccaatgaaaaaaaaacagaagaagaaagagaacaaggagaacaaggagaaacaaatgagttctaggaaagacaaagaaggggacaaggaaagaaagaagtcaaaagataagaaagagaagcctaaaagtggtgatgccaaatcttcgagtaaatcaaagcgatctcagggtcctgtccatattacagcaggaagtgaacctgtccccattggagaggatgaggatgatgatctggaccaggagacattcagcatatgtaaggagaggatgaggcccgtgaaaaaggcactgaaacagctcgacaaacctgacaaggggctcaacgtgcaagaacagctggaacacacccggaactgcctgctgaaaatcggagaccggatagccgagtgccttaaagcctactcagatcaggagcacatcaaactctggaggaggaacctatggatttttgtttccaagtttacagaatttgatgctcgaaaactgcataagttatacaagatggctcataagaaaaggtctcaagaagaagaggagcaaaagaagaaagacgacgtgactgggggtaagaaaccatttcgtccagaggcctcaggctccagccgggactctctgatatctcagtcccatacctcacacaaccttcaccctcagaagcctcatttgcctgcctcccatggcccacagatgcatggacacccaagagataactacaatcaccccaacaagagacacttcagtaatgcagatcgaggagactggcagagggaaagaaagttcaactatggtggtggcaacaacaatccaccatggggaagcgacaggcaccatcagtatgagcagcactggtacaaggaccaccattatggggaccggcgacatatggatgcccaccgttccggaagctatcgacccaacaacatgtccagaaagaggccttatgaccagtacagcagtgaccgagaccaccggggacacagagattattatgacaggcaccatcatgactccaagcggaggagatccgatgaatttaggcctcaaaattaccaccagcaggatttccgacgaatgtctgatcaccgccccgctatgggctaccatggccagggaccctcagaccattaccgctctttccacacagataaactgggggaatataaacagcctctacccccattgcaccctgcagtctcagatcctcgctcacccccttctcagaaatctcctcacgattccaagtcacccctggatcataggtctcctttggagagatcactagaacagaaaaacaacccagattataactggaatgttcggaaaacataaaggacagctcgtaaaggagagagtaagagtcaccaaacacgtggatatttttggtctgatcctacagtagccggttatctagaccagtaagtggagttttggacatgctgctgctgtcaactcactggctgaaggagcacttcaaggaatgggaggcctttcactgggtccagctctgattcgggtcaccactcctgcactttggcaccccatcccattccagcctagttctggcctcccactttgacgggcacttggaggaggagctgactgtgtgtgtaccagcttcactgggatgtgtttccccagtcaaggaacaggggatcttcagagtcatgaatgttttcttgccagggtcagtgttcccaggaccttagtgcatggtcggggcaggaactggtgcatggaggctgctgggacctggtgaacagtgtgtgatttggttgatttggttcactctgacatgatggatgctgctgatggggagtggcgagttggggcaagcgggtggggacaagcataggacttgaaggggagcaggtacacccctcaaatgtgttcttgggagaagtgatacactcggcctcattatgtgaaacctgtgggtggggttggggtggagaagtagagagagggcaacagcttccacaactgcttcatctctgccaacactaatttttcccacactgtctttgtacatttcagagctttggtctcctgagtgggcctccttttcccactgtgccagggaaggtaggtttctctggctgactgagtactgtgagtgaggcaacactgatgccagcatgggtcttacttgactggggagtaggctgagtgaggggtagggtggggtaggtggggagtagtgtggccagggaactggaatccctggtggatttctgattcctgtggtgagaaggaaagctacaggacctggagaaggggatgcagaggcaggcctgctgaccaacttgttgcaatcacaaaggtgggggtcctggtgcaggcagtgaacaggcttctaatgtggggttcagtagtgccagcaagtgggggaaactttcagtattgcgctaggtcaacacttcctgctgcatttccttccctttgcacagcttgaagaaatagagtagacagaatcacacatcatgtggtgggcagatggaaataagtacctgtggtgaacaagtttctactgtagttggagatcattagaattgaattcagtttctcttagaatataatcaggtataaacctaagttaaactttttcccaaacaaggagcatccaaagacacagtgacttgagctatagatagtaaaaatcatacgagagttgaactgagtcaggtttaggaagcaagtttggttgcatcaattaagcaggctcttttcaattgactgatgctggggccttcagttttattctcagtatagattgccagtattgttaagagtatccaaaggcctttctagatggagacagaataactgacttgaacatacagtgtgcctgtaagtgtccaggctcagagctggtgaaaacccttctgttgggcgtgtgcagggttaaactcctgaagtaacttgtgaggacttcagtgcttgctggtgtcctgggcagcaccatgaatgcctttaccaagacatgccaagttggatcccccgaatgaagcagatgtggctgtggtgtgacccttgctccctgctacacagagcatcgcagggctggcctgtgtggtttccagatgagggtctgggtcccggaagcttgtgttgagagctcagtggacccaccccgcttgctgaaccctcacagttcttggggttgtccagcctggacttgtagcacacatgtcctgaagcaaagctccggtgactgcatgagccacctggccacagtcctcccatggagggcctgccgtgacgctcagtggagagggcagggcctgtgtctccacttaggccacacagtgatgaggaaaccacagatggagcttcttgccgataatactgactctagcccatgattgccttgcccaagccaaagaggaaggttaggttggcttgtcgagcccttgagcgttgggagatggggtgggaaggaggtgagcccctgcagagagttgggtagtgtccttcaggaatgaaaggaggggcaaaggagtcaccagaggtcctgcatttccatcagggtttccacagtcatcagggcttctctcttgagttgctgataggagatgtgagttatgcccagagatgtcttatcgtgaggaaaaagaaacttccttttgttcacatttaggactctcagtgccatatgaagtagcaaaaggcagtatcggccagatcagtgttacattgattctaaaattacagtgtccccattagacaactattttaggtgctggagtatgtttgaagagtgtgctgggaaaaaggaagcatttcttcattgatttaaatcagtatgaatattatatgcctaaataaaaaatttgcacaggtaaattctctcacttgtgaatgggagaagctgccccaggaatctgtgaggatggtattccctggagtctggctttgaaagatttcattgttggtagaaataacaggttgagaaagagggagttagcatcacctaaaacctgcacgtgaacaagggttgacatgatacactatggccttagaaaagggccaggtgaaaccccaagctaatcactgcggtctttcagagccggacagacaggtgccagcagagcccggggctcactctcctttcagtcattcctcagcccttcgaagggaagcccaaacactttgcacgctgtgctgcagacattctggcctggtgtgtctgaaagttgcatcagtcctcacggtgcaaacacagttgatttaggaagtcacacaatgacactgaaatcctacagaccaaaatccacttgtcagcaggagcagcagcccaggcccagcaccagcggtcttccggctcctctgagggctgccacgttgggcgaggggagccatgccaagggtccaggctgctttaggccatctgtgccccactcatctggggacagatggtttttctttattgtaaaattgtggacttttaaaacctgttgactaaacagtaattaatttatatttgtgaaaaatgccactgtcctagtgatttctgatgtaaataatgttgtttatatagtatgtattaaattttcctacattgtaaaactgctgtacttttgattcttgtatattaaaaagtgttactgagcatttttagaattgggctaacaaaaaaaaaaa

SEQ ID NO: 143 - DNA, 6331 bp, Homo sapiens
atctttgtttgggtctcccatactgcgtatagatgaatgggtcaggatatctggaacaaaatatggaggtgaagggtgagatcgggaaacaaagggtatggccccctagttcccaaagggagcagggagatgggaatagaattgaaggtaggttttaggctacttgggaggaggaatatttaggtaattgtggagactttctcctgtgtgatgaaggcggcagacactgtgatcctgtgggcaagaagtaaaaatgaccagctgaggatttcttttcctccaggactgtgttggggtgacaggatgcctgataaggatgacattcggctgctgccgtcagcattgggtgtgaagaagagaaaacgaggacccaagaagcagaaggagaacaagccaggaaaaccccgaaaacgcaagaagcgtgacagtgaggaggaatttggttctgagcgagatgagtaccgggagaagtcagagagtgggggcagtgaatatggaaccggaccgggtcggaaacgaagaaggaagcaccgagaaaaaaaggagaagaagacaaagcggcggaaaaagggggagggagatggggggcaaaagcaagtggaacagaagtcatcagcaactctgcttctgacctggggcctggaggatgtggagcatgtgttctctgaggaggattaccacacgctcaccaactacaaagccttcagccagttcatgaggcccctaattgctaagaagaatcctaagatcccaatgtctaagatgatgaccatccttggggccaaatggagagagttcagtgccaacaaccccttcaaggggtcagcagctgctgtggcggcggcagcggcagcagcagcagcagctgtagctgagcaggtgtcagctgctgtctcgtcggccacccccatagcaccctccggaccccccgcccttccaccaccccctgctgctgatatccagcccccacccatccgaagagccaaaaccaaagagggcaaaggtccaggccataagaggcggagtaagagcccccgagtgcctgatggacgcaagaagcttcggggaaagaaaatggcaccactcaaaataaaactagggcttctgggtggcaagaggaagaaaggaggctcgtatgtttttcagagcgacgaaggtcctgaaccagaggctgaggaatcagacctggacagtggcagtgtccacagtgcctcaggccggcctgatggccctgtccgcaccaagaaactaaagagaggccggccaggaaggaagaagaagaaggtcctgggctgtcctgcagtggccggggaggaggaggttgatggctacgagacggatcaccaggattactgtgaggtgtgccagcagggtggggaaattattctgtgtgacacctgccctcgtgcctaccacctcgtctgccttgatcctgagcttgaccgggctccagagggcaaatggagctgccctcactgtgagaaggagggggtccagtgggaggccaaggaggaagaagaagaatacgaagaggagggagaggaagaaggggagaaggaggaggaggatgatcacatggagtactgccgcgtatgcaaggacggcggggagctcctgtgctgtgacgcgtgcatctcctcctaccacattcattgtctaaaccctcccctgcctgacattcccaatggtgaatggctgtgtccccgatgcacatgccccgtgctgaagggtcgagtgcagaagatcctacattggcggtggggggagccacctgtagcagtgccagcccctcaacaggcagatggaaatccagatgtcccacccccccgtcctcttcaaggcagatcagagcgagagttctttgtcaagtgggtaggactatcctactggcactgctcctgggccaaggagcttcagctggaaatcttccatttggttatgtatcgaaactaccagcggaagaatgacatggatgagcccccacccctggactatggctccggcgaggatgatgggaagagcgacaagcgtaaagtgaaagacccgcactatgctgagatggaggagaagtactatcgttttggcatcaagccagagtggatgaccgtccaccgcatcatcaaccacagtgtggataaaaaggggaattaccactatctagtaaaatggagggacttaccatatgaccagtccacgtgggaggaagatgaaatgaatatccctgaatacgaagaacataagcaaagctactggagacaccgagaactaattatgggggaagaccctgcccagccccgcaagtataagaagaagaagaaggagctacagggtgatgggcctcccagttctcccactaatgatcctaccgtgaaatatgagactcagccacggtttatcacagccactggaggcaccctgcacatgtatcagttggaagggctgaactggctacgcttctcctgggcccagggcactgacaccattctagctgatgagatggggctaggcaagaccatacaaaccatcgtcttcctctactcactctacaaggagggccacacaaaaggtcccttcctggtgagtgccccactctctaccatcattaactgggagcgggagttccagatgtgggcacccaaattctatgtggtgacatacacgggtgacaaggacagccgggccatcattcgtgagaatgaattctcctttgaggacaatgccatcaaagggggcaagaaagcttttaagatgaaaagggaggcacaggtgaagttccatgttctcctgacatcgtatgagctgatcaccattgatcaggcagcacttggttccatccgctgggcctgtcttgtggtagatgaggcccatcgactcaagaacaaccagtccaagtttttcagggttctcaatggttacaagatagatcataagttgctgctgacaggaaccccattgcagaataatctggaggagctcttccatctcctgaacttcctcaccccagagagatttaacaacttggagggcttcctggaggagtttgctgacatatccaaagaggaccagatcaagaaactgcatgatttgctggggccacacatgctgcggagactcaaggcagatgtctttaagaacatgccagccaagacagagctcatcgttcgggtggagctaagccccatgcagaagaaatactacaaatacatcctgactcgaaattttgaggccttgaattcacgaggtggtgggaaccaggtgtcgctgcttaatatcatgatggatcttaagaagtgctgcaaccatccatacctttttcccgtggctgctatggagtcccccaaactccccagtggggcttatgagggtggggcacttattaagtcgtctgggaagctcatgctgctccagaagatgctgcgaaagctgaaggagcaaggacaccgagtgctcatcttctcgcagatgaccaaaatgttagacttgcttgaggacttcttagactatgaaggctacaagtatgagcgcatcgatggtggtatcacgggtgccctgaggcaggaggccatcgatcggtttaatgctcctggggcccaacaattctgcttcctcctgtccacccgagctgggggcctgggcatcaatctggccactgctgacactgtcatcatctttgattctgactggaacccccataatgacatccaggcctttagccgggctcatcggattggccaggccaacaaagtgatgatttaccggtttgtgactcgcgcgtcagtggaagagcgaatcacacaagtggccaagagaaagatgatgctgacacacctggttgtgcggcctgggctgggctccaaggcaggctccatgtccaagcaggagcttgacgacattctcaaatttggcactgaagagctattcaaggatgaaaacgagggggagaacaaggaggaggacagcagtgtgattcattatgacaatgaggccatcgctcggctgttggaccggaaccaggatgcaactgaggacactgacgtgcagaacatgaatgagtatctcagctccttcaaggtggcacagtacgtcgtgcgggaagaagacaagattgaggaaattgagcgagagatcatcaagcaggaggagaatgtggaccctgactactgggagaagctgctgaggcatcactatgagcaacagcaggaagacctagcccggaatctaggcaagggcaagcgggttcgcaagcaagttaactacaatgatgctgctcaggaagaccaagacaaccagtcagagtactcggtgggttcagaggaggaggatgaagacttcgatgaacgtcctgaagggcgtagacagtcaaagaggcagctccggaatgagaaagataagccactgcctccactgctggcccgagtcgggggcaacattgaggtgctgggcttcaacacccgtcagcggaaggctttcctcaatgctgtgatgcgctgggggatgccaccacaggatgccttcaccacacagtggctggtgcgggacctgaggggcaagactgagaaggagtttaaggcctatgtgtctttgttcatgcgccatctgtgtgagcctggggcagacggctctgaaacctttgccgatggggtccctcgggagggactgagtcgccagcaggtgttgacccgcattggagtcatgtctctcgtcaaaaagaaggtgcaggagtttgagcacatcaatgggcgttggtcaatgccggaactgatgcctgaccccagcgccgattctaagcgctcctccagagcctcctctcctaccaaaacgtctcccaccactcctgaggcttctgctaccaacagtccctgcacctctaaacctgctactccagctccaagtgagaaaggagaaggcataaggacacctcttgagaaggaggaagctgaaaaccaggaggaaaagccagagaagaacagcagaattggggagaagatggagacagaggctgatgcccccagcccagccccatcacttggggagcggctggagccaaggaagattcctctagaggatgaggtgccaggggtgcctggagagatggagcctgaacctgggtaccgtggggacagagagaagtcagaagatgtaaaaggtgaccgggagcttcgaccagggcctcgagatgagccacggtccaatgggcgacgagaggaaaagacagagaagccccggttcatgttcaatatcgccgatggtggcttcacagagcttcacacactgtggcagaatgaggaacgggcagctatttcctcggggaaactcaatgagatctggcacagaagacatgactattggcttctggctgggattgtcctccatggctatgcacggtggcaggacatccagaatgatgctcaatttgccattatcaacgagccatttaaaactgaagccaataaggggaactttctggagatgaaaaataagttcctggcccggaggttcaagctcctggagcaggcgctggtgattgaggagcagctgcggcgggcggcctacctgaacctgtcgcaggagccggcgcaccccgccatggccctccacgcccgcttcgccgaggccgagtgcctggccgagagccaccagcacctctccaaggagtcgctggcggggaacaagccggccaacgccgtcctgcacaaggttctgaaccagctggaggagttgctgagcgacatgaaggcggacgtgacccgcctgccagccacgctgtcccgaataccccccatcgcagcccgccttcagatgtccgagcgcagcatcctcagccggctggccagcaagggcacggagcctcaccccacaccggcctacccgccgggtccctacgctacacctccggggtacggggcggccttcagcgccgcacccgtaggggccctggccgccgcaggcgccaattacagccagatgcctgcagggtccttcatcacagccgccaccaacggcccaattcaccgattttttaaaaaagttccagaaatccagtgacgaatgtggtatacaaaaaaatatataaattctttcaacttagaataattaagtcataaaatacatagggtacaaataccacattccgttctaaaatgatatcttaggatcatcaaaagaaaaagaggatttggattatgcaaaaaatgattcctatatatataatcaattatctaactgacatttttgcaaatctaccacaacttcgccttttattgcatatgctaaacaagcagatgctaagtctgtaaactgtgaattaacctcctttttaattaattgttcg

SEQ ID NO: 144 - DNA, 6511 bp, Homo sapiens
attttccccccttcggccgcggcgaggaggagccggagcgggagtgacaccgagccggacccagcgcgacctgcggcggctccgggtgactcgggccagtgtagaggtcctcaggccgccggcaggagcagctgggccaattccctggccgggagcggaaggggatggcgtcgggcctgggctccccgtccccctgctcggcgggcagtgaggaggaggatatggatgcacttttgaacaacagcctgcccccaccccacccagaaaatgaagaggacccagaagaggatttgtcagaaacagagactccaaagctcaagaagaagaaaaagcctaagaaacctcgggaccctaaaatccctaagagcaagcgccaaaaaaaggagcgtatgctcttatgccggcagctgggggacagctctggggaggggccagagtttgtggaggaggaggaagaggtggctctgcgctcagacagtgagggcagcgactatactcctggcaagaagaagaagaagaagcttggacctaagaaagagaagaagagcaaatccaagcggaaggaggaggaggaggaggaggatgatgatgatgattcaaaggagcctaaatcatctgctcagctcctggaagactggggcatggaagacattgaccacgtgttctcagaggaggattatcgaaccctcaccaactacaaggccttcagccagtttgtcagacccctcattgctgccaaaaatcccaagattgctgtctccaagatgatgatggttttgggtgcaaaatggcgggagttcagtaccaataaccccttcaaaggcagttctggggcatcagtggcagctgcggcagcagcagcggtagctgtggtggagagcatggtgacagccactgaggttgcaccaccacctccccctgtggaggtgcctatccgcaaggccaagaccaaggagggcaaaggtcccaatgctcggaggaagcccaagggcagccctcgtgtacctgatgccaagaagcctaaacccaagaaagtagctcccctgaaaatcaagctgggaggttttggttccaagcgtaagagatcctcgagtgaggatgatgacttagatgtggaatctgacttcgatgatgccagtatcaatagctattctgtttctgatggttccaccagccgtagtagccgcagccgcaagaaactccgaaccactaaaaagaaaaagaaaggcgaggaggaggtgactgctgtggatggttatgagacagaccaccaggactattgcgaggtgtgccagcaaggcggtgagatcatcctgtgtgatacctgtccccgtgcttaccacatggtctgcctggatcccgacatggagaaggctcccgagggcaagtggagctgcccacactgcgagaaggaaggcatccagtgggaagctaaagaggacaattcggagggtgaggagatcctggaagaggttgggggagacctcgaagaggaggatgaccaccatatggaattctgtcgggtctgcaaggatggtggggaactgctctgctgtgatacctgtccttcttcctaccacatccactgcctgaatcccccacttccagagatccccaacggtgaatggctctgtccccgttgtacgtgtccagctctgaagggcaaagtgcagaagatcctaatctggaagtggggtcagccaccatctcccacaccagtgcctcggcctccagatgctgatcccaacacgccctccccaaagcccttggaggggcggccagagcggcagttctttgtgaaatggcaaggcatgtcttactggcactgctcctgggtttctgaactgcagctggagctgcactgtcaggtgatgttccgaaactatcagcggaagaatgatatggatgagccaccttctggggactttggtggtgatgaagagaaaagccgaaagcgaaagaacaaggaccctaaatttgcagagatggaggaacgcttctatcgctatgggataaaacccgagtggatgatgatccaccgaatcctcaaccacagtgtggacaagaagggccacgtccactacttgatcaagtggcgggacttaccttacgatcaggcttcttgggagagtgaggatgtggagatccaggattacgacctgttcaagcagagctattggaatcacagggagttaatgaggggtgaggaaggccgaccaggcaagaagctcaagaaggtgaagcttcggaagttggagaggcctccagaaacgccaacagttgatccaacagtgaagtatgagcgacagccagagtacctggatgctacaggtggaaccctgcacccctatcaaatggagggcctgaattggttgcgcttctcctgggctcagggcactgacaccatcttggctgatgagatgggccttgggaaaactgtacagacagcagtcttcctgtattccctttacaaggagggtcattccaaaggccccttcctagtgagcgcccctctttctaccatcatcaactgggagcgggagtttgaaatgtgggctccagacatgtatgtcgtaacctatgtgggtgacaaggacagccgtgccatcatccgagagaatgagttctcctttgaagacaatgccattcgtggtggcaagaaggcctcccgcatgaagaaagaggcatctgtgaaattccatgtgctgctgacatcctatgaattgatcaccattgacatggctattttgggctctattgattgggcctgcctcatcgtggatgaagcccatcggctgaagaacaatcagtctaagttcttccgggtattgaatggttactcactccagcacaagctgttgctgactgggacaccattacaaaacaatctggaagagttgtttcatctgctcaactttctcacccccgagaggttccacaatttggaaggttttttggaggagtttgctgacattgccaaggaggaccagataaaaaaactgcatgacatgctggggccgcacatgttgcggcggctcaaagccgatgtgttcaagaacatgccctccaagacagaactaattgtgcgtgtggagctgagccctatgcagaagaaatactacaagtacatcctcactcgaaattttgaagcactcaatgcccgaggtggtggcaaccaggtgtctctgctgaatgtggtgatggatcttaagaagtgctgcaaccatccatacctcttccctgtggctgcaatggaagctcctaagatgcctaatggcatgtatgatggcagtgccctaatcagagcatctgggaaattattgctgctgcagaaaatgctcaagaaccttaaggagggtgggcatcgtgtactcatcttttcccagatgaccaagatgctagacctgctagaggatttcttggaacatgaaggttataaatacgaacgcatcgatggtggaatcactgggaacatgcggcaagaggccattgaccgcttcaatgcaccgggtgctcagcagttctgcttcttgctttccactcgagctgggggccttggaatcaatctggccactgctgacacagttattatctatgactctgactggaacccccataatgacattcaggcctttagcagagctcaccggattgggcaaaataaaaaggtaatgatctaccggtttgtgacccgtgcgtcagtggaggagcgcatcacgcaggtggcaaagaagaaaatgatgctgacgcatctagtggtgcggcctgggctgggctccaagactggatctatgtccaaacaggagcttgatgatatcctcaaatttggcactgaggaactattcaaggatgaagccactgatggaggaggagacaacaaagagggagaagatagcagtgttatccactacgatgataaggccattgaacggctgctagaccgtaaccaggatgagactgaagacacagaattgcagggcatgaatgaatatttgagctcattcaaagtggcccagtatgtggtacgggaagaagaaatgggggaggaagaggaggtagaacgggaaatcattaaacaggaagaaagtgtggatcctgactactgggagaaattgctgcggcaccattatgagcagcagcaagaagatctagcccgaaatctgggcaaaggaaaaagaatccgtaaacaggtcaactacaatgatggctcccaggaggaccgagattggcaggacgaccagtccgacaaccagtccgattactcagtggcttcagaggaaggtgatgaagactttgatgaacgttcagaagctccccgtaggcccagtcgtaagggcctgcggaatgataaagataagccattgcctcctctgttggcccgtgttggtgggaatattgaagtacttggttttaatgctcgtcagcgaaaagcctttcttaatgcaattatgcgatatggtatgccacctcaggatgcttttactacccagtggcttgtaagagacctgcgaggcaaatcagagaaagagttcaaggcatatgtctctcttttcatgcggcatttatgtgagccgggggcagatggggctgagacctttgctgatggtgtcccccgagaaggcctgtctcgccagcatgtccttactagaattggtgttatgtctttgattcgcaagaaggttcaggagtttgaacatgttaatgggcgctggagcatgcctgaactggctgaggtggaggaaaacaagaagatgtcccagccagggtcaccctccccaaaaactcctacaccctccactccaggggacacgcagcccaacactcctgcacctgtcccacctgctgaagatgggataaaaatagaggaaaatagcctcaaagaagaagagagcatagaaggagaaaaggaggttaaatctacagcccctgagactgccattgagtgtacacaggcccctgcccctgcctcagaggatgaaaaggtcgttgttgaaccccctgagggagaggagaaagtggaaaaggcagaggtgaaggagagaacagaggaacctatggagacagagcccaaaggtgctgctgatgtagagaaggtggaggaaaagtcagcaatagatctgacccctattgtggtagaagacaaagaagagaagaaagaagaagaagagaaaaaagaggtgatgcttcagaatggagagacccccaaggacctgaatgatgagaaacagaagaaaaatattaaacaacgtttcatgtttaacattgcagatggtggttttactgagttgcactccctttggcagaatgaagagcgggcagccacagttaccaagaagacttatgagatctggcatcgacggcatgactactggctgctagccggcattataaaccatggctatgcccggtggcaagacatccagaatgacccacgctatgccatcctcaatgagcctttcaagggtgaaatgaaccgtggcaatttcttagagatcaagaataaatttctagctcgaaggtttaagctcttagaacaagctctggtgattgaggaacagctgcgccgggctgcttacttgaacatgtcagaagacccttctcacccttccatggccctcaacacccgctttgctgaggtggagtgtttggcggaaagtcatcagcacctgtccaaggagtcaatggcaggaaacaagccagccaatgcagtcctgcacaaagttctgaaacagctggaagaactgctgagtgacatgaaagctgatgtgactcgactcccagctaccattgcccgaattcccccagttgctgtgaggttacagatgtcagagcgtaacattctcagccgcctggcaaaccgggcacccgaacctaccccacagcaggtagcccagcagcagtgaagatgcagactgataccacctccaccgctgagcagtgaccttcctcactttctcttgtcccagcttctcccctgggggcctgagagaccctcaccttccttctgcccatcttccatgttgtaaaggaacagccccagtgcactgggggaggggagggagtgaggggcagtggtgcccttcctgcagaagagacatgcagcagtagcgctggcgccatctgcaggagctggcgggctggccttctggaccctggcttctccccactgtaacgcctgttacacacaaactgttgtgggttcctgccaggcttgaagaaaatgatctgaattttttcctccttttggttttattttgttggtttattttgtgttttcttttctcctttttggggggtattcagagtgggctgggcccctgggcgagacacagctacctctgttggcatctttttaataccaggaacccagcggctctagccactgagcggctaaatgaaataaagtggaaaaaaaaaaaaaggaaaaaaccaaaagcataaaaaaccacagcaaatttcttgatgaaaattgaaaataaaagtttccttgtattttaaaaaaaaaaaaaaa

SEQ ID NO: 145 - DNA, 9646 bp, Homo sapiens
tcgcccgccgcgcgcgccggtccggcagcgcacgggttaaggctggcaccgcgcccggcgggagggggggcgcccacctcccctcctccccgcgccgggcatgcggggcccagtgggcaccgaggaggagctgccgcggctgttcgccgaggagatggagaatgaggacgagatgtcagaagaagaagatggtggtcttgaagccttcgatgactttttccctgtggagcccgtgagccttcctaagaagaagaaacccaagaagctcaaggaaaacaagtgtaaagggaagcggaagaagaaagaggggagcaatgatgagctatcagagaatgaagaggatctggaagagaagtcggagagtgaaggcagtgactactccccgaataaaaagaagaagaagaaactcaaggacaagaaggagaaaaaagccaagcgaaaaaagaaggatgaggatgaggatgataatgatgatggatgcttaaaggagcccaagtcctcggggcagctcatggccgagtggggcctggacgacgtggactacctgttctcggaggaggattaccacacgctgaccaactacaaggccttcagccagttcctcaggccactcattgccaagaagaacccgaagatccccatgtccaaaatgatgaccgtcctgggtgccaagtggcgggagttcagcgccaacaaccccttcaagggcagctccgcggcagcagcggcggcggcggtggctgcggctgtagagacggtcaccatctcccctccgctagccgtcagccccccgcaggtgccccagcctgtgcctatccgcaaggccaagaccaaggagggcaaagggcctggagtgaggaagaagatcaaaggctccaaagatgggaagaaaaagggcaaagggaaaaagacggccgggctcaagttccgcttcggggggatcagcaacaagaggaagaaaggctcctcgagtgaagaagatgagagggaggagtcggacttcgacagcgccagcatccacagtgcctccgtgcgctccgaatgctctgcagccctgggcaagaagagcaagaggaggcgcaagaagaagaggattgatgatggtgacggctatgagacagaccaccaggattactgtgaggtgtgccagcagggtggggagatcatcctgtgcgacacctgcccgagggcctaccatctcgtatgcctggacccagagctggagaaggctcccgagggcaagtggagctgcccccactgtgagaaggaggggatccagtgggagccgaaggacgacgacgatgaagaggaggagggcggctgcgaggaggaggaggacgaccacatggagttctgccgcgtgtgcaaggacgggggcgagctgctctgctgcgacgcctgcccctcctcctaccacctgcattgcctcaacccgccgctgcccgagatcccaaacggtgaatggctctgcccgcgctgtacttgccccccactgaagggcaaagtccagcggattctacactggaggtggacggagccccctgcccccttcatggtggggctgccggggcctgacgtggagcccagcctccctccacctaagcccctggagggcatccctgagagagagttctttgtcaagtgggcagggctgtcctactggcattgctcctgggtgaaggagctacagctggagctgtaccacacggtgatgtatcgcaactaccaaagaaagaacgacatggatgagccgcccccctttgactacggctctggggatgaagacggcaagagcgagaagaggaagaacaaggaccccctctatgccaagatggaggagcgcttctaccgctatggcatcaagccagagtggatgatgattcaccgaatcctgaaccatagctttgacaagaagggggatgtgcactacctgatcaagtggaaagacctgccctacgaccagtgcacctgggagatcgatgacatcgacatcccctactacgacaacctcaagcaggcctactggggccacagggagctgatgctgggagaagacaccaggctgcccaagaggctgctcaagaagggcaagaagctgagggacgacaagcaggagaagccgccggacacgcccattgtggaccccacggtcaagttcgacaagcagccatggtacatcgactccacaggcggcacactgcacccgtaccagctggagggcctcaactggctgcgcttctcttgggcccagggcactgacaccatcctggccgatgagatgggtctgggcaagacggtgcagaccatcgtgttcctttactccctctacaaggagggccactccaaagggccctacctggttagcgcgcccctctccaccatcatcaactgggaacgcgagtttgagatgtgggcgcccgacttctacgtggtcacctacacgggggacaaggagagccgctcggtgattcgggagaacgagttttcctttgaggacaacgccattcggagtgggaagaaggtattccgtatgaagaaagaagtgcagatcaaattccacgtgctgctcacctcctatgagctcatcaccattgaccaggccatcctgggctccatcgagtgggcctgcctggtggtagatgaggcccaccgcctcaagaacaaccagtccaagttttttagggtcttaaacagctacaagattgattacaagctgctgctgacagggaccccccttcagaacaacctggaggagctgttccatctcctcaacttcctgactccagagaggttcaacaacctggagggcttcctggaggagtttgctgacatctccaaggaagaccagatcaagaagctgcatgacctgctggggccgcacatgctcaggcggctcaaggctgacgtgttcaagaacatgccggccaagaccgagctcattgtccgggtggagctgagccagatgcagaagaagtactacaagttcatcctcacacggaactttgaggcactgaactccaaggggggcgggaaccaagtatcgctgctcaacatcatgatggacctgaaaaagtgctgcaaccacccctacctcttccctgtggctgccgtggaggcccctgtcttgcccaatggctcctacgatggaagctccctggtcaagtcttcagggaagctcatgctgctacagaagatgctgaagaaactgcgggatgaggggcaccgtgtgctcatcttctcccagatgaccaagatgctggacctcctggaggacttcctggagtacgaaggctacaagtatgagcggattgatggtggcatcaccgggggcctccggcaggaggcaatcgacagattcaatgcccccggggcccagcagttctgcttcctcctctcaacccgggcaggtggtctgggcatcaacctggccacggcggacactgtcatcatctacgactcggactggaacccgcacaatgacatccaggccttcagccgcgcccaccgcatcggccagaacaagaaggtgatgatctaccgcttcgtgactcgggcctcggtggaggagcgcatcacgcaggtggccaagcgcaagatgatgctcacccacctggtggtgcggcccggcctcggctccaagtcggggtccatgaccaagcaggagctggacgacatcctcaagttcggcacggaggaactcttcaaggacgacgtggagggcatgatgtctcagggccagaggccggtcacacccatccctgatgtccagtcctccaaaggggggaacttggccgccagtgcaaagaagaagcacggtagcaccccgccaggtgacaacaaggacgtggaggacagcagtgtgatccactatgacgatgcggccatctccaagctgctggaccggaaccaggacgctacagatgacacggagctacagaacatgaacgagtacctgagctccttcaaggtggcgcagtacgtggtgcgcgaggaggacggcgtggaggaggtggagcgggaaatcatcaagcaggaggagaacgtggaccccgactactgggagaagctgctgcggcaccactatgagcagcagcaggaggacctggcccgcaacctgggcaagggcaagcgcatccgcaagcaggtcaactacaacgatgcctcccaggaggaccaggagtggcaggatgagctctctgataaccagtcagaatattccattggctctgaggatgaggatgaggactttgaagagaggccggaagggcagagtggacgacgacaatcccggaggcagctgaagagtgacagggacaagcccctgcccccgcttctcgcccgagttggtggcaacatcgaggtgctgggcttcaatgcccgacagcggaaggcctttctgaacgccatcatgcgctggggcatgcccccgcaggacgccttcaactcccactggctggtgcgggaccttcgagggaagagcgagaaggagtttagagcctatgtgtccctcttcatgcggcacctgtgtgagccgggggcggatggtgcagagaccttcgcagacggcgtgccccgggagggcctctccaggcagcacgtgctgacccgcatcggggtcatgtcactagttaggaagaaggttcaggagtttgagcatgtcaacgggaagtacagcaccccagacttgatccctgaggggcccgaggggaagaagtcgggcgaggtgatctcctcggaccccaacacaccagtgcccgccagccctgcccacctcctgccagccccgctgggcctgccagacaaaatggaagcccagctgggctacatggatgagaaagaccccggggcacagaagccaaggcagcccctggaagtccaggcccttccagccgccttggatagagtggagagtgaggacaagcacgagagcccagccagcaaggagagagcccgagaggagcggccagaggagacggagaaggccccgccctccccggagcagctgccgagagaggaggtgcttcctgagaaggagaagatcctggacaagctggagctgagcttgatccacagcagaggggacagttccgaactcaggccagatgacaccaaggctgaggagaaggagcccattgaaacacagcaaaatggtgacaaagaggaagatgacgaggggaagaaggaggacaagaaggggaaattcaagttcatgttcaacatcgcggacgggggcttcacggagttgcacacgctgtggcagaacgaggagcgggctgctgtatcctctgggaaaatctacgacatctggcaccggcgccatgactactggctgctggcgggcatcgtgacgcacggctacgcccgctggcaggacatccagaatgacccacggtacatgatcctcaacgagcccttcaagtctgaggtccacaagggcaactacctggagatgaagaacaagttcctggcccgcaggtttaagctgctggagcaggcgttggtcattgaggagcagctccggagggccgcgtacctgaacatgacgcaggaccccaaccaccccgccatggccctcaacgcccgcctggctgaagtggagtgcctcgccgagagccaccagcacctgtccaaggagtcccttgctgggaacaagcctgccaatgccgtcctgcacaaggtcctgaaccagctggaggagctgctgagcgacatgaaggccgacgtgacccggctgccatccatgctgtcccgcatccccccggtggccgcccggctgcagatgtcggagcgcagcatcctgagccgcctgaccaaccgcgccggggaccccaccatccagcagggcgctttcggctcctcccagatgtacagcaacaactttgggcccaacttccggggccctggaccgggagggattgtcaactacaaccagatgcccctggggccctatgtgaccgatatctagccgtcctcgagacttccctgtgttgcagcgctcatttccagctgagccacgcctgccgggccacctgcccgacccacatgggagagaaaagctgccacctttttaggagccagcgccaccttgggacaaaaagggaaacctagtaatgccatcacatggaggacgaggcccagctcagctgggccagagcccagaagtgccacctcatcataattcaagtgttcttccacacagcgttgcccccacaaccacgccggacgtgccccctcgccaccttttccagacgacttcttagaagagatttcatttatttgtacatcttttgcactttcctattgaagacttgaacacgtttgtcttgataaaagttggatgacgtatggaagattcgaacctgcagcactgatgtctctttaccgatgggttccagacccaaggtagtcctggcactgccctgtggactcagcccagctggggaggacatggcgcccggtgccctaggagccctcagtgtcccctacctgacctgtctgcacctgtgtgacagccccttctgatttggccccctgcccgcttggagcctcccagcaccagacagggcaggtttggggagccgctgtcgagccctatggtgagaccctggctgacatttcccctccttcctgccaaggctggaggccgccaggtgtttgctctctccttgtggggaggtggatcctctgccagcaggtgtctgtccccggcccagcgcatcttgaaggccctggactctgttaccagtggggggcctgtggccccggctcttcacagcaggcagaagcgtatgatcccagggagggtgggctgggggggggccagcacttgcctcggagccactgctgcgttgggtttgccttctgccagaggtgtggttaagggcagtgatagctgcgccccagcaaggagggtcatgggccctgagctggcccaggagaccctggccctgccctgtgccctgggatgcctaccctgcccacctccggaggtggaaccgggctgcccctgggggcctggacttgtcccattcccctgtccctggaaaggccttcccgggggctttttgcctgaggctgcactcttggaaggtgtggggagagttctgcctggagggggactggacccagtgccctctgcagacccctcccagccgcagcaccaagggcttgctgccttgtttcctgccaggagcgccctgacatcccaaaaccatcttcccacatgtgggttgttggaatcccacccactcccccggaccctgcccctccaagttggggacggagatggggagcaggtcaggccctccctaggcctgtttgtgtgtgatccttctcctggccccaggtcgacctggaaggcgtttctgagtcttgtactgggaccttcccagggaaggtgccttggggtgcagaatcctgggaatgttaggaaagggctgcgtgaaaaacccagctgggcctggggtggaggtgcacacgggctggggctcagctccttggagagggcctgcctgggactgagggggccagggctgggtcaggattcaccagcttgtgttgcagacactggagcaattgcctggccctccctaagccctatatgcctcactcataatgaggctgtctctgaaccccggagggcgggacctacaagtccttcctcttggcgcattcccacactccagtctggatccaggtctgcaaggccagcccgaccctgacactgcacgtgggcgtagtggggagcaccctggagtggagatgattgtcagcgggctcacatgttatggttcatccacatgcgtgttgtgtgctctgcggtgcctcctggcaaagggtcctggctcgggtcagaagctcactcccgtgccctcgtccccaaacaagcagtggcaagcactggggttggccctcgttgggagcagtgcccaccttccttggcccacagcagataggtcccgagcagcaggactggaggcctgtggcggtcagggcaggggtctgtgtctccaccccaagggctgatggtccctcccctgtgcgccttcctctcaggcaggcttgctctgtcccttcctctctgcttccctcccaggcctcgccagggctcccttctcctctgcctggttagactcgggcacccaggaaagcctggccagggctcctttgggcctgggccccctgcactgcctggtccagaaggggtggtgctgtccgtggccagcaccccggggcccgggaggggtgggctactagagtcagagcgggtttggggctgaccagtttgggagaggagaaaagatctgagaatgtccttcttggtttgtcagtcatctctgccaaaagtggtgatggtggtgtccgtatgtttggcgtctttgggctgggtttggtttttgctgctggtagaatcagggtcctcgggcatgaacgcgagcccaaagtgccagtctgcgattggaaatttccagccactttaagccagtgctgagtagggcttctgcagagccatgtttgagccaaggtcttggaaggcattgccccatgggctcaggtgactcggggtggagtgagcacgtctgcagggccctctcatacacgcctgaggcagaagcagcgtcccccgtgaaagccaccttccgaagctcctgcgttttttgcaaacttggcttcccccaggggcaggctggactttccctgccccctatgattgaagtcctcctgcttttgggggctgccttcccagagtcccccgggtgctcccctgccgaggtcaggagctgaccaagccttggcccggtgacacctgcagccctcactcctgtcatcccaggacacttgaggcccaaggaggtggagtggagagtgggctcgggtacatgggagccagaagccagatggacttggtcaagtgttggtcacttggagcctccagtgtgcgtcagggtctgtgggcaggggacagggcgtgggtgggggccgaggctggcacgcccctctgccctcaccgtcttggtgacctggcctcggcccctcccccaagtctcttctgtgcaaggcccgcctcggcctcggcagctggttcctgtcccgttttctgtgtctgaaagtttacaggttgtggtgcatcagcccaaactcactggcgttgtgttttttttttctttaattttcagattttttttttaaacaaagtatttttttaggtgcgataacccagaaagggcccgttgggtgtgtgtgtgtgtcctgaactcctcaagcagcgattggagcccaagcacccctggagaggaagggagggtccccactggcccgtggggtctgagttcaggggtgtggagggagcagactccaccggcccaggcccagctaagagggggccgacccctttccccaggcacagccccaggctggcaaagggagggccctgggctgggtgcagggcgcgccaggagtcccagccagggtggccccggcgggggcgggtccagctttggaagccaggctcccctgtgagccgtggcttgtctggtcttcgcccacgggaggctggacagaggctgtagccaacacaatcacctttactttgtactctgtgtgtatgttttggttttctgtgttttaataaatcctttgggaaagg

SEQ ID NO: 146 - DNA, 10389 bp, Homo sapiens
atgaccaatgggtctgtgttttggaccggcgaagcccaatggcgcgacagggaaggcgggcccgagatgggttagggtgtccttgcagggtgtctgagctaaacttcaccaaataatagctgtttgtattttggctgctgcaggagccattttagaaataaatatcttccttcaatagatgaaaatgaaaatacagaaaaaagagaagcagttgtcaaatttaaaagttttgaatcactccccaatgtctgatgcctctgtcaattttgactacaaatctccatccccatttgactgcagcactgatcaagaagagaaaattgaagatgttgctagtcactgtctgcctcagaaggacctgtatactgctgaagaggaagctgctaccctttttcctaggaaaatgacatcccataatgggatggaggacagtggaggaggaggtactggagtgaagaagaaacggaagaaaaaggagccaggagaccaagagggtgcagcaaagggaagcaaggacagagagcccaagccaaagaggaaacgagaaccgaaagagccaaaggaacccagaaaggccaaggagccgaagaaggccaaggagcacaaggagccgaagcaaaaagatggggcaaagaaggcacggaagccccgggaggcctcgggcaccaaggaggccaaagagaagaggagctgcactgactctgcagccaggacgaagtccaggaaggccagcaaggagcaaggaccaaccccagtggagaaaaagaagaaaggaaaaaggaaaagtgaaactacagtggagagtttagagctggatcagggcctgacgaacccatctctgcggagtcctgaggagtccactgagtctacagacagccagaaacgacgctcgggaaggcaagtaaagcgcagaaaatacaatgaggacctggacttcaaagtggtggatgatgatggggaaacaattgctgttcttggagctggtcgaacatctgcactctcagcctctacactggcctggcaggcggaggagcctccagaagatgatgcaaacatcattgagaagatcctggcatctaagactgtccaggaggttcacccaggagaacctccgttcgacttggagctgttctacgttaagtatagaaatttttcctacttacattgtaaatgggccacaatggaagagctcgaaaaggatcctcgcatcgcacagaagatcaagcgatttaggaataaacaagcccagatgaagcacatttttacggagcctgatgaagacttgttcaatccagactatgtagaagttgatcgcatcttggaggtggcccacaccaaggatgcagaaacaggggaggaggtaacacattacctggtgaagtggtgctcactaccatatgaagaaagcacgtgggagctagaggaagatgtagatcctgcaaaagttaaagaatttgaatctcttcaagttctccctgaaattaagcatgtggagcggcctgcttcagactcctggcagaaacttgagaagtctcgcgagtataagaacagtaaccagctccgggagtaccagctggaagggatgaactggcttctttttaactggtataacagaaaaaactgtattttggctgatgagatgggcctagggaaaaccatccagtccatcacattcctttcagaaatatttctgagaggaatccacggcccttttctcattatcgcccctctctccaccatcactaactgggagcgggagttccggacatggacagagatgaatgccattgtgtaccacggcagccagatcagcaggcagatgatccagcagtatgaaatggtgtacagagacgcccagggaaaccccctttcaggagtcttcaagttccacgtcgtcatcacaacatttgaaatgatcctagcagactgcccagagttgaagaagattcactggagctgtgtgataattgatgaagcccacagactgaagaataggaactgcaaacttctggagggtctaaagcttatggccctggaacataaagtgcttctcactggaacacccttgcagaactctgtggaggagctcttcagtttgttaaattttctggagccatcacagtttccttcagagaccgctttcttggaggaatttggagatctgaaaacagaggagcaggtaaagaaactgcagtctatcctaaaaccaatgatgcttcggcggctgaaagatgatgtggaaaagaaccttgctcccaaacaagagacgatcattgaggtggaactgaccaatatccagaaaaagtactaccgtgccatcctcgagaagaacttttccttcctgaccaagggggcaaatcagcacaacatgcccaatctcatcaacaccatgatggagctgaggaagtgctgtaaccatccctacctgatcaatggagcagaggagaaaattctagaagatttccgaaaaacccacagccctgatgcccctgactttcagctgcaggccatgattcaggcagcaggaaagcttgtgttgattgataaactactccctaagctgattgcaggtggccacaaagtactcatcttctcccagatggtgcgctgcctcgacatcctagaagattacctcatccagagaagatacacctatgagcgaattgatgggcgagtacggggaaacctgcgccaggcagccatcgaccggttctgtaagccagattcagaccgctttgtctttcttctgtgcaccagagcgggaggcctggggatcaatctcacagctgctgatacctgcatcatatttgattctgactggaacccacaaaatgacttgcaggctcaggcccgatgtcaccgcataggccagagcaaagctgtgaaggtgtatcgcctcatcactcgaaattcctacgagcgcgagatgtttgacaaggccagcctaaagctggggctggacaaggctgttcttcaggacatcaaccgaaagggcggcaccaatggggtacagcagctctcaaaaatggaggtggaggacctactccggaaaggtgcttatggagccttaatggatgaagaagatgaaggctccaagttctgtgaagaagacatagaccagattctgcagaggcgaacgcacaccatcaccatccagtctgaggggaaagggtccacttttgccaaggctagctttgtggcttcaggaaacagaacagatatttccttagatgatcctaacttttggcagaaatgggctaaaatagctgaactagacactgaagcaaagaatgaaaaggaaagcttagtgatcgaccgacctcgcgtgagaaagcagaccaaacactacaactcgtttgaggaagacgagctcatggagttttcagagttagacagcgactcagacgaaaggcccacgagatccaggcgcctcaatgacaaagccaggcgctacctccgagcggagtgcttccgggtagagaagaacctgctcatctttggctggggccggtggaaggacatcctgactcatggccgattcaagtggcatctgaacgagaaggacatggagatgatttgccgtgccctcctggtgtactgtgtcaagcattataagggggacgagaagatcaagagtttcatttgggaactgatcacacctaccaaagatgggcaagcccagaccctccagaaccactcaggcttatctgccccagtccccagagggaggaaggggaagaagacgaagaaccagttgctaatcccagagctaaaggatgcagattggctagccacctgcaaccccgaggtggtcttgcatgatgatggctataagaaacacctcaaacagcactgcaacaaagtacttttgcgagtccggatgctgtactacctaaaagctgaaatactgggagaagcagctgagaaagcatttgaaggatctcctgccagggagctggatgtacctctgcctgacatcgactacatggagatcccagtggactggtgggatgctgaagccgataagtcacttctcattggcgtgttcaagcatggttatgaaaggtacaatgccatgcgagcagacccagcactttgcttcctggagaaagttgggatgcccgatgagaagtccctttctgcagaacagggtgttacagatgggacctcagacattcctgaaagaggcaacacagataaagaagacaatgctgaggacaaagtagatggcctccagaaacaaacggagagttccagtgatggaggtgatggcgtttttagcgaaaagaaggatgacagccgggcagcccaggatggctccgacccagacaaatcgccctggccagtttcctccgccctcacagctcgtctcagacgtctggtcactgtttaccagcgctgcaaccgcaaggaactgtgccggcctgaaattctgggaccaggtaaccaaggatattgggttcaggaagagatgttcaggagaacctcagaaatggacctcatcaacaaggaagcccaaaagaggtggactaggagagaacaagcagacttctatagaacagtgtcttcctttggtgttgtttacgatcaagaaaagaaaacctttgactggacacagttccgcatcatttcccgtttggacaagaagtcggatgagagcctggaacagtatttttatagttttgtggccatgtgccggaatgtctgtcgtctacccacatggaaagatggcggtcccccagataccaccatctacgttgaacccatcactgaggaacgtgctgcaagaactctgtaccgcattgaactgttacggaaagtccgagagcaagtgctcaagtgccctcagctgcatgaacgcctccagctgtgcaggcccagcctctacctcccagtctggtgggagtgtgggaagcatgatcgagacctgctcatcggcactgccaaacatgggctgaaccgcactgactgttacatcatgaacgacccccagctgtccttcctggatgcctatagaaactatgcccagcataaaagatctggcacccaggcaccaggaaatctctgttgcctttaccagaccaactccaagttatatgaatctcttacatattctcaaatgagtaggacttcagagtcccttgaaaatgaacctgaaaatctagtgagagtagaaagcagagatgatcatctcagcctgcctgatgtgacatgtgaaaactttatttctaaagttcaggatgtcatttccatcaaccatgatgaaagtctgctgcctgagtccttagagagcatgatgtatggtaagaaggtgctcagccaagaaccaagctcttttcaggagagcccaagtaccaatactgaatctagaaaagatgttattaccatctcaataagcaaagatgggaactgccagtctggtggccctgaggcagaaatagcttctggccctacttttatgggtagcttagaagcaggaggagtagctcaagcaaacatcaaaaatggaaaacatttgttgatgtctatttcaaaggaaggggagctctgctgcagtgaggcaggacagagacctgaaaacattggccagctggaagccaagtgtttagcttccccttccttgaatccaggaaatgaaagtgggtttgtagatatgtgcagtcttagtgtctgtgactccaaaagaaacctgtcatcagatcagcaattaattgatttattggaaaacaaaagcttagaaagtaaattgattttgagtcagaaccacagtgatgaggaggaagaagaggaggaaaacgaggaggaaaacttagccatggcagtaggcatgggggaaaggccagaggtattgcatctcacggagcccactactaacatctcaagggaaaagaaccaaggcttccaagatgaaaccaagaaaggaagcttagaggtggcaaaccagactcctgggctacagagggctttccccgctccagcagcctgtcagtgccactgcaaacacatggagaggtggatgcatggcctcgagaatgatgaatttgaaatcgagaaacccaaggcttatatcccagatctgttcaaaagtaaaaccaatactatcgccatggagggtgaacccactgctattccatcacagccgtttaaagtgaagcatgagcttttaaaagaaccttggaaagaaagtgcagaggggcaaaacgttttccccacatatcctcttgaaggaagtgagctcaaatcagaagacatggattttgagaataaagatgattatgatagagacggaaactgccatagtcaagattatccagggaagtactctgaagaggagagcaagagctcaacatcgggcatcacaggagacattggggatgagctacaggaggctcgagctcccactattgctcagctgctacaggagaaaactctctattccttctctgagtggccaaaggaccgcgtgataattaaccgcctagataatatctgccacgtggtgttaaaggggaagtggccctctagccagcagtatgagccctcaggcacactgcccaccccggtattaaccagcagtgctggttctcgaaccagcctctcagagccggaagcagcagaacacagcttcagcaacggcgcagcattggcggcccagatccacaaggagagcttcttagctccagtattcacaaaggatgaacaaaagcacaggcgtccctatgagtttgaggtggagagggatgcaaaggctcggggcctggagcagttctctgccacccacgggcacacccctatcatcctcaatggctggcatggggagtcagctatggacctctcctgctcatcagaggggtccccaggagccacatcccctttcccagtgagcgccagcacccctaagattggggctatcagttcacttcagggagcccttggcatggacttgtctgggattctgcaagctggcctgatccatcctgtgactggacagattgtcaatggaagcctcagaagagatgatgcagccacgaggaggcggagagggaggcggaaacatgttgaaggagggatggacctcatctttttgaaggagcagacacttcaggcgggaatcttggaagtccatgaagacccagggcaggccaccttgagcaccacacaccctgaggggccagggcctgccacctcggctcctgagccagctacggcagccagcagccaagccgagaaatccattcccagcaagagtctgcttgactggctaaggcagcaggctgactactccttagaagttcctggctttggggcaaatttttcagacaaaccaaagcagaggaggccacgctgtaaagaacctggaaaattagatgtcagctccctgagcggggaagagagagttcctgccatccccaaggagccaggactgagggggtttcttccagaaaacaagttcaatcacactctggctgagcctattcttcgagatacgggcccccgcaggagggggaggcggcctcggagcgaactcctgaaggctccttccattgtggcagactctccctctggaatggggccactgttcatgaatggactgattgctgggatggacctggtaggacttcagaacatgagaaatatgccaggcatccccctcaccgggctggtggggtttccagctggctttgccacgatgccaacaggtgaagaggtcaaaagtaccctgagcatgctgcccatgatgctgccaggcatggctgctgtgccccagatgtttggtgttgggggactcctcagtccacccatggcaaccacctgcacttccactgctccggcgtctctatcaagcacaacgaaaagtggtacggcagtgactgaaaagactgcggaagacaagccgagtagccatgatgtgaaaacagacactttagctgaggacaagcctggtccaggtccattttctgatcagtctgaacctgcaataactactagtagtcctgtggcttttaacccatttctcatcccaggagtatctcctggactcatttacccatccatgttcctctcccctggtatgggcatggctctgccagccatgcagcaggccagacactcggaaatagtaggtctggagagccagaagaggaagaagaagaagacaaagggggacaaccccaactcccacccagagcctgctcccagctgtgaaagggagcccagcggtgatgagaactgtgccgaacccagtgcccctttgcccgcagagagagaacatggggcacaggctggggagggggcactcaaagactccaacaacgacaccaattagaacttttttcatttaagaaattattgtgacttgtaagtttcttatcccataaaggtttgttacttccctcacttcacctccataagaacctgtgtttccataagtaagattacgtacctgatttcctgtctgagaactatggtaacagatgttaatagttgcagggtctcaccacttcattagataagtgttgtctacctagtctaggaggcacagaattctcattctgttatccagttcattccagcaatcatagttaatacagtacttggtgacacgccctacccccttctcttccaagtttcccactcacttgaggaggaaaaatggcaaaagaaagctgtctagggttttaccattgaagggtggaagaacagagacaaagaggagctctttttctgtgagctgggttgcacaggaagaatgtcacagggaaccaaaaagcacagaaaaaggaagtgctggtgcatatttttgagttaaaatatttccctattttatcatgattactaagtgagtagtatagacagaagtatataactaatggttgaaaatacatatattcatttctttataaaaaacaaaaaccttaccggtagtaatataatttcccccttggtggtttttcagacacctgcagcaagaagaaatactgactgactaggcattattttctatacatccctctcaccagtgaaaagattcctcttgctgcgagaaagctttacccaccatgagttattgctgtcgacgggggtggggcaaggacccgcgctccgtagagctacacgctgcttcacaagcacacggctagcgctctgctctcacctggttcgcttacagatttctctagccattaatttgcctctctgtgtttaaagagcaccaggaccgaatggattttcacttcaggctttccttcaccaagaataaggttctttctggagcctgcaagaagacagttgcccaacactttgacacttgctagtaggtcctttgatcaagagtgtctgaggctgtcaaatgtgtgccaccctttataatacagctatgaaaagttacttctccattaatttctccattctgtttatatcttacagttggacccaaattccaaattatcagttaatcgaaactacattgcaagtcaacattattttctcttcttcctcagcttctccatgtttaggaactgagaaagaacctgcctaagcagcacttccccatgtcctttcaccttcatgttaacgtcccttctgatggtctcactcttcacaggtagttcacactctgagacttgaagtaagctcatggttcagtactctgggggcgcagggctgcgcaggacccttggaaatgttgcaagtgttactagtaccagtttcactttttgttgtcacaatttactgtattttttactttttctgttacagttttgctaatttatcagaaggtccaaaagtctgacataactatttcattttgcattatttatttatgatgcttttttcattgtcttttatacatttgggattataaattatgtaaatgttaaaatgagcatctcaaagaagtctgttaaatcatgactgaaaaaaatcaatcagatgtatcttcaaaaagtggagtcccagttttatgaatcagagatataaaccagaaattctataactgatcatagaagaagaatccagtaattgaacaaatcctatttaatgacatccttgtagcatagatggtctataatgctgaccacagatttcttagaaatgctgctctctctatttaactaacattttgttcagttttgcctccagtggaagcagaaagggttttttcagctgttaaatcctaaaaatcaatataatttatttatgtaagaaaaataactcaatcaatatatttttgaaccttttaagtactaattttctttttatcaagtagaaaaaaaaatgtatttgccctaaatccttaaaatacaaatgctataaaaattcctgtatcttgaaagccttactgcaaatgagtattatagacatccagcagagtctggttttctttgt

SEQ ID NO: 147 - DNA, 7907 bp, Homo sapiens
gggaggacgcgcggcgcgcccggcggacgccgcaggtcccatgccgcgccgcgacccccgcgcccctgccgcccgcgcccgcggccgccccccgccgcccgccgccccgggctcgccgcgccgcgcccgcgcgtccttagcggggccaccgagcgatgcccgccgggcgcccgcgaaagtttgtcggctcctgctgaagggcagcggcgcccccgcacccccgtgccccgctccggccaggagccttcacgtaaatgggtccagtcatgcctcccagtaagaagccagaaagctcaggaattagtgtctccagtggactgagtcagtgttacgggggcagcggtttctccaaggcccttcaggaagacgatgacctcgacttttctctgcctgacatccgattagaagagggggccatggaagatgaagagctgaccaacctgaactggctgcacgagagcaagaacttgctgaagagctttggggagtcggtcctcaggagtgtcagccccgtccaggacctggacgatgacacccccccatcccctgcccactctgacatgccctacgatgccaggcagaaccccaactgcaaacccccctactccttcagctgcctcatatttatggccatcgaggactctccaaccaagcgcctgccagtgaaggatatctacaactggatcttggaacattttccgtattttgcaaatgcacctactgggtggaaaaactcagtgagacacaatttatcattgaataagtgttttaagaaagtggacaaagagaggagtcagagtattgggaaagggtcgttgtggtgcatagacccagagtatagacaaaatctaattcaggctttgaaaaagacaccttatcacccacacccacacgtgttcaatacacctcccacctgtcctcaggcatatcaaagcacatcaggtccacccatctggccgggcagtaccttcttcaagagaaatggagcccttctccaagttcctccaggagtgatccaaaatggagcgcgggtcctgagccgagggctgtttcctggcgtgcggccgctgccaatcactcccattggggtgacagcggccatgaggaatggcatcaccagctgccggatgcggactgagagtgagccatcttgtggctccccagtggtcagcggagaccccaaggaggatcacaactacagcagtgccaagtcctccaacgcccggagcacctcgcccaccagcgactccatctcctcctcctcctcctcagccgacgaccactatgagtttgccaccaaggggagccaggagggcagcgagggcagcgaggggagcttccggagccacgagagccccagcgacacggaagaggacgacaggaagcacagccagaaggagcccaaggattctctgggggacagcgggtacgcatcccagcacaagaagcgccagcacttcgccaaggccaggaaggtccccagcgacacactgcccctcaaaaagagacgcaccgaaaagccccccgagagcgatgatgaggagatgaaagaagcggcagggtccctcctgcacttagcagggatccggtcctgtttgaataacatcaccaatcggacggcaaaggggcagaaagagcaaaaggaaaccacaaaaaattaaaaacaagtcactgatttgttttgaacttacgaccatttggtttcagcatgtcaggagatttctaatgatttgtggcaatatcagcaattttttttcttttttcttgtttttggtttggttttctttcttttcttttccttttattttgttttaatttgccccctcttctttgttttggacccttaagaattttatttttaaaggagattgaagccatagaactcatattgacactcagctgttttacaaaagcttttcattatctgaagacaaaaccgaaaaagccaaaattaccattgcttcctccagcttgtcagaaacctgtggctgaatccgcagggatgtcaacgtcaatatcacaggaacacacattcggcacctagaaggcacgtgggcaaagtaatcatcgttcaggcccaacccttaggtttaaaaagtcaggttgtccatcccattgggttcactgagtgaaggcacataaagcaattgaggaggaggaggaacccctcgtccccctaggagcagacccaagcttgtggcaccaggcatctgatggtgccaggaaagccactggaattgtcacacggcgagcacagagggccggccaccagtcctcgatgcttctgaaccctgaagcccgatgacatcttacgaggtggacgttggactgttcatgcgcatcgggtgtcagtgactcatggagaagaaatggggtaaatttttagtgatgttgctaatcattgaattctgttctctattaaattaagaaaatgttccaaaagccataagcctgaagattggccctgtgcacgcacgcacacacacacacacacacacacacacacacacacacacacgaaggagagagagagaaaactgatggggaaaacaagctgtgtcttcttaactgcccaagtgaaaagcaaccaagtccaggaaattacaatagctgttaaggaaaggaaataatggtacagatctttttctgtctatcaaaactatttgatccaagtgaaaaaaaaaaaaaaactagaaagctacggaacctgccattagtattgtggtgtatttttaagattaaaggtacactgatggacaaaaaaaaaaagtaaaacatggcaaaaaataaaataactcctatactgccctcaaaatggagtttgcaattaatatcaggatttatctttgcaaaaatcagtgatttccacattcagccagtatagccagcagaaatttctgatccacaatgcatggattcctttgaagaaaaaaaagaaaaagagaaaaaaatcacaaaaacaaactttttttattcaaaagtaacaaagttcttgtaaggtaaataatgtatttagcatgaagcatgaattattttcatataaatatagaaaatagagaaaaggctatgcctgtaatttttaagcccttaggcttagagtttcttttggttttcttcttttttctttccttttctttgctttctttttttcctttttgtttttgtttttgttttttgtttttgtttttttttcgggttattttgttttggttttttgaagcaggtgtttaaggtttaaccttcttcagggacaaattctgactgttggggaacttactctgcaatataaaaatatcttcatgctctggtagggcttggatggttgaactctgtactgccttgtgtgcacttcagccccgaccccctctgattctctgttgaaaagtgtgtcctttctctctgtctgtacatgtttaacatgacgcaataatttgagggcaaacttagtagtgagtgtgtatgatagaatcaagagaattatgggacgcttacttgagaaaatcattaccatgatttggttctaggaaaaaggcagtgaataattatgcaaattagccagaagaaggggaaccgtgctaatgggccttattgggtgaggggacgagatggggttcatgtgaaggaggaagcgatgccgaggtaggaaaggccagccccagacatcctatcgccacaatgccatgtcgcaataggaagcaggggccggccatcgctaccttcagcacactgaccaacctggaattaagaccacctagattgcgagagctgaatttagaaaccagacaacgtcatgcagcccagaaactcctgttgttacctttgcctaagaaattttctttaatggcgggggcggggggcgggggtacaaagagaaatctctaaaagaatatgatcttccatccaagtggagggaaactttaaaacaaaaacacccagtactgtggctcaggatatgatgcgtgaggagagggagggaacagagatgaccttaacttttaaaaaagggactgctgtgggccaaagccaagcccatctgccaggacgaggtaatgtcagagctccatcagcccggacagtgggaactaactggtgcattccccacacttaccttccggtgggttgctgatgagagaacctgaaaaaacctacacctctacagcaggtcgaattcatgacctgaagctgaatacttccagcatatttattcagggtgtaggtgggaataaagtatcttcgcagtgctctgttccctccgtctccccagacatctgacaccctaaaagccatccacagctatggaacctgagcgacaccttgatttgtgttgtcacctgaccaagcctaaagacctccagctcagtcccccaccttcatcccaccccacagatgataaaattcagacctctctcctgaaaggcagaggttcaacattcaggactgtttctggccgaggacttcttccaattaaaacccccaccgtgggctgtctcccctcatttcatttttctaaaggggcagaggcctcttttagaaaataataaaatgcaatgtgtgtgatttacttttctgatctctttgagaaatagagaaatataaaagtgtgttcttaactccagaaccactctttttgcataaatacctcatcgggcagctttctaagtgtgattttcctgagtctcccttcgttggatctgccggaagacttgtcggggaacctttagtgagggtacttcttcctatttttcttctgtttttggaggcatacacattatgcataaccaaaacaatggctcaattgtgtttaactttgtattttgattgttgagaacaaaaacaaaaagtatcaatgtgtatgtggctgtttgtagtgaatttattggagaatgaggttgtccgtgtccttaacaagccaaggggcaggaggcaccctctcttatcccctcctccaagagcagtagagaatttaagcacaagcctatttgtgaaagaatattttgcttaagtgtcattcactttagtcttggaattccttcccaaacgtcaggtgttcttttagcttccaaactagcatatgtatccattagtctgacagatcgcctgaacaccattaagaggtgtggcgtttttgctttcatttctcctgctgggagaagtggcggttcatgtgtcattccagtatctcacatactcacacggggcaggggggagggggaaacggggaactatagcaatatttaaagatgctttggaaaccaaccgtgaacacatcaacaccacgacgtctacgattacttgctattggccctcggatacatttaagagaaagagacagtcactcttttttttcttaaatgatatacatataaacagttatttttatcctattataattgtcttttgtctttatctagtactatgtggaaagggtttgcatcatagatttttcccagccttataatataccataagctcctacttccctgcccctccctaatcagtattctttcaagagttctttggtgaagccatctatctgaaactaaaatgaaccaaacccatatttcactggtggttggagaaaaccatggccaaaacgattgtggcaggtctcaatcttgggagtttttaagaaggaatgtgccagaggccgattcccaagaacagagttttcttttgttttgcagaggcattcaatgtgtctagtgcttgctggccacagcagttactaccacagagccttctgggaggggccgttgtgttgaaggaggctcctgcctgagggacagcatcaggcagtgggctctgtagagtgagaaccaggtggaggccttctgtgcccagctcagagttctgcaccacgccaggactgcccaggccaagggctactgacgcaagttccactcattccactctgtggggggcgccttgggcctctcctggaagggctcttggagaaggaattggagttacgtacaagtgacctaaatgggaagcttttctagatgagattggattaaattccatgtgatttctctttccctttaatccaggttgggactcgtttctttctggtggatcacagctgcccagatgttgcaattgatttttatgtttctgtagagaagtatttttctttcatcttcaggattttttttgccaccaaaagaaaacattggaactctgtgtttcctcttgattgtgacttcccagtgttgacagttaagtccttagtgtcgtaggtcccagcccaccaatactatatcaaacactgttatgcacataatgcagcactgtgatctaatttaaataatacttttttattatttatactactatatataatatacatcaacacttttgctatataacctaagtgataaccctcttttagttacctgccaaactctggacttggtttatattgcagttaacacagttacaaagctgtaatggtgtctttttttcctttgtaacggaatgtgtaaatcaaagtatatacattgtgtggtgttcctgtttctggagtttcatgaggatttacacatggcattcagtgttctgtatagatctgcctacctttgtgaattcatctgttaacccctcttcctttgagagagcaccggcgatggtggttaactccttgtgttttctctctctcctactggttattcttgaattaagcacagactcgtcagctcggttgctttatcatgaataatgtgtgtgaccttgcagttcttccacagttcagcaaacaagtgctagcttcactgaccaaaaattaaggaaggaaaacacagtttttaaaacgatccatcttttaacagccgaaaccgatgtgtctatggtgctgcaccttgctgttgtacttctgaaatcagacgtgtgtgaacgatcatttctgacttaaccgtgagatgctcacgagtacccttcctgttgttttgttagcattgaaatcgagactatttatttggaatatatacaacagtgtttttccactgtatttcatttgcaaaagttgagaactgctttctctaccttttgcaaaataattgatattccatattggattctcaaagacttcgatatggtgaacctattaaacctagaaattgtattcatcctttcatgactgtggcctgagttccccagcccctctcctccttttttttagatgagatttagcacactctcagttatttaaacatgcaacatttcttgagtatgtatgttgaggccatctgagctcatagctgattcagtaaccagtttcatgctgtgtcattcacactcactacttaatactgccatggtgaaaatgtggaggaaaaatgtatccatgtgtgtctgggaagcatatacacttgtacattttttaatactctgattctgtaacatttctgagttttgttttgttttacagaaaaaaaaaaaaagtgataaagcaatcagaagaccaagaggtttactattgatgcttagggtcgtctgaccttggctggccaatagacctacacggccaaattaatttacgagagtaataatttttcaaaagccaattttttttctgtattttctgtatgaaactgccaatatcatgaatagaaagggagaaccataaaggagaaagaacgtgatgttctgttatgttcatgtaaacctaaagaaacagtgtggaggcaggcgcgatcagccgaactctagggacttggtgttgcttggaaggcatccatacctgcattttgcattcttcgtatgtaatcatattgccaaagacaaactatttcatcatttattgtaaataacacttttccccagacctaccataaagtttctgtgatgtattgtcttccagttgcaataaaaattactgagttgcatcaattgaagaaaaacaccaaaaa

SEQ ID NO: 148 - DNA, 1701 bp, Homo sapiens
atgacggggaaagcaggggaagcgctgagcaagcccaaatccgagacagtggccaagagtacctcggggggcgccccggccaggtgcactgggttcggcatccaggagatcctgggcttgaacaaggagcccccgagctcccacccgcgggcagcgctcgacggcctggcccccgggcacttgctggcggcgcgctcagtgctcagccccgcgggggtgggcggcatggggcttctggggcccggggggctccctggcttctacacgcagcccaccttcctggaagtgctgtccgacccgcagagcgtccacttgcagccattgggcagagcatcggggccgctggacaccagccagacggccagctcggggtttcggccccaagcgtttcgggcggccgcgcagttctccagtccccgcgtcgggcagggctcggccacggcactctgttggagccccactgaaaactgggtttggggtgtcggagcccgtggtgcagagtcgccggccgtgtcggagggccccagcaccgctgctccactgcggccccggcctggtgatccgcactcctcgagcccgatgctgttccggctccggccccatccctggtgtccaaagttgtctgattcccaaatcccgcgctggtcaactggggtttatttttcacccccacgagctcagacaacccggccatcgcggcagctaaagcggccgccatcctctcccacgccaactttccggcccggggcattggggctggccgcgcagggcagggcgcagcagggtcgcgagcgctgccggggatctctgcggccccctaaggctgcctcgctctccgtcgtcccggtcccaagcgcgccggggcctttgcctctcttacaacgaaatctgttcaaaacctccggattcgggccccggcgcgggagagattctgaagatgtttcctccagcgatcgaaaaatgtccaaatctgctttaaaccagaccaagaaacggaagaagcggcgacacaggacaatctttacctcctaccagctagaggagctggagaaggcattcaacgaagcccactacccagacgtctatgcccgggagatgctggccatgaaaacggagctgccggaagacaggatacaggtctggttccagaaccgtcgagccaagtggaggaagcgggagaagtgctggggccggagcagtgtcatggcggagtatgggctctacggggccatggtgcggcactccatccccctgcccgagtccatcctcaagtcagccaaggatggcatcatggactcctgtgccccgtggctactggttcaagatggctttcccaggcgcttttctaaacccgaataccaacaattctttctagggatgcacaaaaagtcgctggaggcagcagccgagtcggggaggaagcccgagggggaacgccaggccctgcccaagctcgacaagatggagcaggacgagcggggccccgacgctcaggcggccatctcccaggaggaactgagggagaacagcattgcggtgctccgggccaaagctcaggagcacagcaccaaagtgctggggactgtgtctgggccggacagcctggcccggagtaccgagaagccagaggaggaggaggccatggatgaagacaggccggcggagaggctcagtccaccgcagctggaggacatggcttag

SEQ ID NO: 149 - DNA, 3032 bp, Homo sapiens
aacacgattcctctggccaggccaaggggagggcgacactgacaggcgccccccacccaggggccgtggcgaagcaaggggccggctgctcagaaaaggataagaagtggtttctcctcccctcttcccttcctcatcctgcagcccgcgcctcccccctcgccgcgctgcgcacggatggcggcgggagccgcagagccaccatgttcagccagcagcagcagcagcagctccagcaacagcagcagcagctccagcagttacagcagcagcagctccagcagcagcaattgcagcagcagcagttactgcagctccagcagctgctccagcagtccccaccacaggccccgttgcccatggctgtcagccgggggctccccccgcagcagccacagcagccgcttctgaatctccagggcaccaactcagcctccctcctcaacggctccatgctgcagagagctttgcttttacagcagttgcaaggactggaccagtttgcaatgccaccagccacgtatgacactgccggtctcaccatgcccacagcaacactgggtaacctccgaggctatggcatggcatccccaggcctcgcagcccccagcctcacacccccacaactggccactccaaatttgcaacagttctttccccaggccactcgccagtccttgctgggacctcctcctgttggggtccccatgaacccttcccagttcaacctttcaggacggaacccccagaaacaggcccggacctcctcctctaccacccccaatcgaaaggattcttcttctcagacaatgcctgtggaagacaagtcagaccccccagaggggtctgaggaagccgcagagccccggatggacacaccagaagaccaagatttaccgccctgcccagaggacatcgccaaggaaaaacgcactccagcacctgagcctgagccttgtgaggcgtccgagctgccagcaaagagattgaggagctcagaagagcccacagagaaggaacctccagggcagttacaggtgaaggcccagccgcaggcccggatgacagtaccgaaacagacacagacaccagacctgctgcctgaggccctggaagcccaagtgctgccacgattccagccacgggtcctgcaggtccaggcccaggtgcagtcacagactcagccgcggataccatccacagacacccaggtgcagccaaagctgcagaagcaggcgcaaacacagacctctccagagcacttagtgctgcaacagaagcaggtgcagccacagctgcagcaggaggcagagccacagaagcaggtgcagccacaggtacagccacaggcacattcacagggcccaaggcaggtgcagctgcagcaggaggcagagccgctgaagcaggtgcagccacaggtgcagccccaggcacattcacagcccccaaggcaggtgcagctgcagctgcagaagcaggtccagacacagacatatccacaggtccacacacaggcacagccaagcgtccagccacaggagcatcctccagcgcaggtgtcagtacagccaccagagcagacccatgagcagcctcacacccagccgcaggtgtcgttgctggctccagagcaaacaccagttgtggttcatgtctgcgggctggagatgccacctgatgcagtagaagctggtggaggcatggaaaagaccttgccagagcctgtgggcacccaagtcagcatggaagagattcagaatgagtcggcctgtggcctagatgtgggagaatgtgaaaacagagcgagagagatgccaggggtatggggcgccgggggctccctgaaggtcaccattctgcagagcagtgacagccgggcctttagcactgtacccctgacacctgtcccccgccccagtgactccgtctcctccacccctgcggctaccagcactccctctaagcaggccctccagttcttctgctacatctgcaaggccagctgctccagccagcaggagttccaggaccacatgtcggagcctcagcaccagcagcggctaggggagatccagcacatgagccaagcctgcctcctgtccctgctgcccgtgccccgggacgtcctggagacagaggatgaggagcctccaccaaggcgctggtgcaacacctgccagctctactacatgggggacctgatccaacaccgcaggacacaggaccacaagattgccaaacaatccttgcgacccttctgcaccgtttgcaaccgctacttcaaaacccctcgcaagtttgtggagcacgtgaagtcccaggggcataaggacaaagccaaggagctgaagtcgcttgagaaagaaattgctggccaagatgaggaccacttcattacagtggacgctgtgggttgcttcgagggtgatgaagaagaggaagaggatgatgaggatgaagaagagatcgaggttgaggaggaactctgcaagcaggtgaggtccagagatatatccagagaggagtggaagggctcggagacctacagccccaatactgcatatggtgtggacttcctggtgcccgtgatgggctatatctgccgcatctgccacaagttctatcacagcaactcaggggcacagctctcccactgcaagtccctgggccactttgagaacctgcagaaatacaaggcggccaagaaccccagccccaccacccgacctgtgagccgccggtgcgcaatcaacgcccggaacgctttgacagccctgttcacctccagcggccgcccaccctcccagcccaacacccaggacaaaacacccagcaaggtgacggctcgaccctcccagcccccactacctcggcgctcaacccgcctcaaaacctgatagagggacctccctgtccctggcctgcctgggtccagatctgctaatgctttttaggagtctgcctggaaactttgacatggttcatgtttttactcaaaatccaataaaacaaggtagtttggctgtgca

SEQ ID NO: 150 - DNA, 5801 bp, Homo sapiens
gagcgagagcgcgaaggaaatctggccgccgccgccgcgagcgctcccgaatttttacttgttcctgcaaagctgctggagctcagaagctgattctatcacattgtaagatgcctttggataattctacagtcctcttaaatgaatctttagaacttggcaagtctcactagataccttcaatcatcattttgagctcaaagaattctgagacttatggttggtcatatagaagagtaccttgaacctatagtttcctgaagaatcagtttaaaagatccaaggagtacaaaaggagaagtacaaatgtctactacaagacgaaaacgtagtatgttatgttgtttaccgtaagctgtagtaaaatgagctcgattgttgacagagatgacagtagtatttttgatgggttggtggaagaagatgacaaggacaaagcgaaaagagtatctagaaacaaatctgaaaagaaacgtagagatcaatttaatgttctcattaaagaactgggatccatgcttcctggtaatgctagaaagatggacaaatctactgttctgcagaaaagcattgattttttacgaaaacataaagaaatcactgcacagtcagatgctagtgaaattcgacaggactggaaacctacattccttagtaatgaagagtttacacaattaatgttagaggctcttgatggtttttttttagcaatcatgacagatggaagcataatatatgtgtctgagagtgtaacttcattacttgaacatttaccatctgatcttgtggatcaaagtatatttaattttatcccagaaggggaacattcagaggtttataaaatactctctactcatctgctggaaagtgattcattaaccccagaatatttaaaatcaaaaaatcagttagaattctgttgtcacatgctgcgaggaacaatagacccaaaggagccatctacctatgaatatgtaaaatttataggaaatttcaaatctttaaacagtgtatcctcttcagcacacaatggttttgaaggaactatacaacgcacacataggccatcttatgaagatagagtttgttttgtagctactgtcaggttagctacacctcagttcatcaaggaaatgtgcactgttgaagaacccaatgaagagtttacatctagacatagtttagaatggaagtttctgtttctagatcacagggcaccacccataatagggtatttgccatttgaagttctgggaacatcaggctatgattactatcatgtggatgacctagaaaatttggcaaaatgtcatgagcacttaatgcaatatgggaaaggcaaatcatgttattataggttcctgactaaggggcaacagtggatttggcttcagactcattattatatcacttaccatcagtggaattcaaggccagagtttattgtttgtactcacactgtagtaagttatgcagaagttagggctgaaagacgacgagaacttggcattgaagagtctcttcctgagacagctgctgacaaaagccaagattctgggtcagataatcgtataaacacagtcagtctcaaggaagcattggaaaggtttgatcacagcccaaccccttctgcctcttctcggagttcaagaaaatcatctcacacggccgtctcagacccttcctcaacaccaaccaagatcccgacggatacgagcactccacccaggcagcatttaccagctcatgagaagatggtgcaaagaaggtcatcatttagtagtcagtccataaattcccagtctgttggttcatcattaacacagccagtgatgtctcaagctacaaatttaccaattccacaaggcatgtcccagtttcagttttcagctcaattaggagccatgcaacatctgaaagaccaattggaacaacggacacgcatgatagaagcaaatattcatcggcaacaagaagaactaagaaaaattcaagaacaacttcagatggtccatggtcaggggctgcagatgtttttgcaacaatcaaatcctgggttgaattttggttccgttcaactttcttctggaaattcatctaacatccagcaacttgcacctataaatatgcaaggccaagttgttcctactaaccagattcaaagtggaatgaatactggacacattggcacaactcagcacatgatacaacaacagactttacagagtacatcaactcagagtcaacaaaatgtactgagtgggcacagtcagcaaacatctctacccagtcagacacagagcactcttacagccccactgtataacactatggtgatttctcagcctgcagccggaagcatggtccagattccatctagtatgccacaaaacagcacccagagtgctgcagtaactacattcactcaggacaggcagataagattttctcaaggtcaacaacttgtgaccaaattagtgactgctcctgtagcttgtggggcagtcatggtacctagtactatgcttatgggccaggtggtgactgcatatcctacttttgctacacaacagcaacagtcacagacattgtcagtaacgcagcagcagcagcagcagagctcccaggagcagcagctcacttcagttcagcaaccatctcaggctcagctgacccagccaccgcaacaatttttacagacttctaggttgctccatgggaatccctcaactcaactcattctctctgctgcatttcctctacaacagagcaccttccctcagtcacatcaccagcaacatcagtctcagcaacagcagcaactcagccggcacaggactgacagcttgcccgacccttccaaggttcaaccacagtagcacacgtgcttcctctcttgacatcaagggaggaaggggatggcccattaagagttactcagatgacctgaggaaaggagggaaagttccagcagtttcatgagatgcagtattgagtgttctagttcctggaattagttggcagagaaaatgctgcctagtgctacagatgtacattaaataccagccagcaggaggtgatcataggggcatagccagttctgacagtgttttaggtgcctggatattttttgatggaaaaagaatatattgccaaatattaagaagctcagctatgaaatgacctccagggaatcagaaaggcactaatgatgttagtaacttttagtggttctgtgcctcttatcaagtgttacagaggacataccactgccatgtcaggggtttgcttacagtgatgccatgaagacagtccagtagacttggtagcgaccccctcccccaacccctctcccttttcagataatgatggaacagtaattactttcagaatgttgtgtgggttcaaattctctatgtacagatgatgtaaaaatatgtatatgtctagataaaaggagagaaagcaaaacattttgtatgctgcatgaaagcgttatctcttccttacaggtgtgagcacctttcctgaaattctgacaccatgtgcaaactgatccatcctgtttttccttttgtttacaacacagtagtgttctgttcacttttccggggcacaagtttttttgttcatactttggctgtgatgtcacagtttgttcagtgaggtatgatgtgctgctgggaatggattttttttttcaggttaaattattgatacaacaggattttcaagttattcagaaatatccctcatttcattatttttcaattatgtttgaaaataggatttgcactgctttattttaggtggctgggagttttgattgcatattttgttatagttcatagttggaaatatttgcgtaaatggttttcaacaagcctgaaagtaatttcaagaatgtttcagttatagaggtaaaatttgcacacaaaacatcttaggcactttttaacattctcaatcatgggaattttaacttttgggatttgttgaaatcttttttattatccttcacaatttcaatgcttcttttagtcagaaatgattcagggttatttgaggggaaaaaaccccatagtgccttgattttaattcaggtgataactcaccatcttgaagtcattgtccggtttccgtagcagttttgaaaccttagtacctttttaacagcatgtgggtgtcagtgtcattattagtctcctaataagttcctctgaagactgctatcagtctcttggactggaggtacaaataatttagaaataaaagatgataacctaacactatcatagttattaatgtgatcctaaaattgtttcctaaatcagcatttttctttagtcatttaagaatttaccagaaatatttgctcaatatgatcttgatattcctacaaagaaaaaagaaggggtagggatttggctatgccttcactacaacattagaatattgtaactcacatgccttctaaacgtgaactaagatttcctttggcaatatcatattctaaaagtaataaattccaatacaagttacatacatttaaaaaacattttacagattttatggtactaatgaaatttacagtgatagaacaaaagaggattagtagaaaatacattattagaatataaaaaatgttattactgaggaaagggaggagaggacaagtgtaataaatcaaaattgacctcaaaagaaaatgtgtaacagagttgaggttgttaaaacagaaaaggttctgaataatgaagattaacctaatgcagaattgctaggtaaagaggtcaggggaatgctaagccagttcttaagacttctctgtcctctgctttgctgttatccttaaggcatatactttgtctttctgcagaaaattctacctggctacaattactttgaacattaatgttgaaaaagaaaacaaccaaagaaaattggtacttacccttctacaaaagaagtgtgactagatatcaatcagtaattaacatatcaaggagctcttctagctaaatgaccatccagtagagatttcccacattcccatgaatatcaagaatagttgtcagaatatgtatgtacctgagcatatgtacacagacaagggggatgttgtggaatatggcaatagcattgttcttctcccctttcaaattgcctttcttgaccttatgccattccatatatatctgagttgtgcctcatttatttattggcaatacctagtgatacggatttagctaacaaaagatatgaagaactattatattgaggcctgtcctctacataccacacttaaaagatggtgaactgtgagtactacttaggttgacagcaacaaagcataagacaagccccaggtaaacgtctaaactgtttactcacattgtcctactccagccccttcaattatttcccatctccacaaatagtcgggggaaaaaattaaaattttcctttatgattcttactgttcttcgcagctcatcttttcctgcttagaattaaccattgctaatttaaaggagcagctagctgcttttctgtcagtctgaagcgtagtagtggaagaggtagtaagcaccagctgcctctttgctgctttgttttcctcctgattctcttaaatttgggttgcaaagctatcccgccccccaccctgccccatgaaacttgagcattcaaatgaagattcagcagtgtctgttcttcatttctatagccaaagctgttagttaaaatcccaaatctatagcatttaaagataccaaatagaaacaccttccagcttt

SEQ ID NO: 151 - DNA, 2855 bp, Homo sapiens
gaggaggggaggcctcctccgccgccgccatcttggaccgggcccggtcagcttccgcggagccatcggcagacgccgcggcctcccttgagccccgacccccgtcgtcagaacaaccccgggcccactcccccaaccccacttccgcttcgcgccgctatcgcgatagcgcccgggcccggggcgcgagaaaaaggcggcgggcgctcgcctcccccgcctgtcgcgatacgctcctcagcggcggcgccagctcctgtgcgtccgtctccaagagagtatgaagagagtgcgtctgtagggcagggaagatggcggacaagcgcaaactccaaggtgagattgatcgctgcctcaagaaggtgtccgagggcgtggagcagtttgaagatatttggcagaagctccacaatgcagccaacgcgaaccagaaagaaaagtatgaggctgacctaaagaaggagattaagaagctacaacggctgagggaccaaatcaagacatgggtagcgtccaacgagatcaaggacaagaggcagcttatagacaaccgcaagctcattgagacgcaaatggaacggttcaaagttgtggaacgagagaccaaaaccaaagcttacagcaaagagggcctgggcctggcccagaaggtagatcctgcccagaaggagaaggaagaggttggccagtggctcacgaataccatcgacacgctcaacatgcaggtggaccagtttgagagtgaagtggagtcactgtcagtgcagacacgcaagaagaagggcgacaaggataagcaggaccggattgagggcttgaagcggcacatcgagaagcaccgctaccacgtgcgcatgctagagaccatcctgcgcatgctggacaatgactccatcctcgttgacgccatccgcaagatcaaggacgacgttgagtactatgttgactcatcccaggaccccgacttcgaggagaacgagtttctctacgatgacctggacctcgaggacattccacaggcgctggtcgccacctccccccccagccacagccacatggaggatgagatcttcaaccagtccagcagcacgcccacctcaaccacctccagctctcccatcccgcccagcccagccaactgtaccacggaaaactctgaagatgataagaagaggggacgttccacagacagtgaagtcagccagtctccagccaaaaacggctccaagcctgtccacagcaaccagcaccctcagtccccagctgtgccgcccacctacccctccggccccccgcctgctgcctctgccttgagcaccactcctggcaacaatggggtccccgcccccgcagcacccccaagtgccctgggccccaaggccagtccagctcccagccacaactcgggcacccctgctccctatgcccaggctgtggccccaccagctcccagtgggcccagcacgacccagccccggccccccagcgtccagcctagcggaggcggaggcggcggcagcggaggtggagggagcagcagcagtagtaacagcagtgccggtggaggggctggcaagcagaatggcgccaccagttacagctcagttgtggcagacagcccggcagaggtggctttgagcagcagtgggggcaacaatgccagcagccaggccttgggccccccttccggcccccacaacccacctcccagcacctcgaaggaacccagtgcggcagccccaacgggggctgggggcgtggccccaggctcagggaacaactcagggggacccagcctcctggtgccactgcctgtgaatcctcccagctccccaacgcccagcttcagtgatgccaaggcagccggtgccctgctcaatgggcctccacagttcagcaccgccccagaaatcaaggcccctgagcctctgagctccttgaagtccatggcggaacgggcagccatcagctctggcattgaggaccctgtgccaacgctgcacctgaccgagcgagacatcatcctgagcagtacatcagcacctccggcctcagcccagccgcccctgcagctgtcagaggtgaacataccgctgtcgctgggtgtctgtccactgggccctgtgcccctcaccaaggagcagctctatcagcaggccatggaagaggccgcctggcaccacatgcctcacccctctgactctgagcgtattcggcagtacctcccccggaacccctgtccgacgcccccctaccaccaccagatgccacccccacactcggacactgtggaattctaccagcgcctgtcgaccgagacactcttcttcatcttctactatctggagggcactaaggcacagtatctggcagccaaggccctaaagaagcagtcatggcgattccacaccaagtacatgatgtggttccagaggcacgaggagcccaagaccatcactgacgagtttgagcagggcacctacatctactttgactacgagaagtggggccagcggaagaaggaaggcttcacctttgagtaccgctacctggaggaccgggacctccagtgacaccggcccctccctctacccacccccttcccccgcatgctgatccccctgcccaggtgagggccctgccctggaagactggagggaggccccaagccacggggcatccccctctcccaggaagcagggagggggccgggaggttttcctctcagccccaccctgggggcccgggggcgagggctgccccctcctcccctccccagtgagggacattttttggtaaacctattttcattttggaaaatatttatgaataaatagttttatatgacggctggc

SEQ ID NO: 152 - DNA, 3333 bp, Homo sapiens
cggaggagtcttaccctaatgtaagatggtggcccgtctggctgtggaacccaccgaaagctgagagtctctctctcagccgtaaaggtcggactcgctgaagcaatcaggcccggttctgaagagttttttccccgacgctcgttcggtggtttcttgtgaggacgcggcagcccgtggagtcggctgagggaaaagcgaggcaaggcaggcgggtcgtcaaagtcctacattttagctttcagtgctgaacttccttctcccttaaattattataaacttttgctgctgtttaataaacgtgaagatgtctcgcagtcctgatgcgaaggaagaccctgtggagtgccctctttgcatggagcccttggagatagatgatatcaactttttcccttgcacctgtggctaccagatttgccgattttgttggcatcgaattcgcactgatgaaaatgggctttgtcctgcatgtagaaagccatatccagaagacccagcagtttataaaccactctcccaggaagagctgcaaaggataaagaatgagaaaaaacagaaacaaaatgagagaaaacagaaaatatcagaaaatcgcaaacatttggctagtgtacgtgtcgtacaaaaaaacctcgtctttgttgtaggtttatctcagcgcctagcagacccagaggttttaaaacgaccagaatattttgggaagtttggtaaaatacataaagttgtcatcaataatagcacatcatatgcaggctcacagggtccaagtgccagtgcttatgtaacctatatccggtcagaagacgctctcagagccatacagtgtgtcaacaatgtggtagtagatggcagaacacttaaggcatctctaggtacaacaaaatactgcagttacttcttaaagaatatgcagtgtccaaaacctgactgcatgtatcttcatgaattgggggatgaggcggccagcttcacaaaagaggaaatgcaggcgggtaaacaccaagaatatgaacagaagctacttcaagaattatataaattaaatcccaattttcttcagctatctacgggttcagttgataaaaataagaacaaagtgacaccactgcagagccccattgacaaaccttcagattctctcagtatagggaacggtgataattcccagcagatatctaacagtgatacgccttcaccaccacctggtttgtcaaaatccaatccagtcatccccatcagttcatccaatcacagtgcacggtccccttttgaaggggcagtaacagagtcacagtcgttattctcagacaattttcgccatcccaaccctatcccaagtgggcttcctcctttccccagctccccacagacatccagtgactggcctacagcaccagaaccacagagcctcttcacatcagaaacaatcccagtatcatcctctacagactggcaagcagcttttggctttggttcttctaaacaaccagaggatgacttgggttttgatcccttcgatgtcactcgaaaagccttagcagacctgattgagaaggaactgtccgttcaagaccaaccttccctttcgcccacatctcttcagaactcctcttcacacactacaaccgccaaaggtccaggctctggattcctgcatcctgctgcagctacaaatgccaattctctcaatagtaccttttcagtcttgccccagaggttccctcaatttcagcagcaccgagcggtttataattcattcagttttccaggccaggcagcccgctatccttggatggcctttccacgcaatagcatcatgcacttgaaccacacagcaaaccccacctcaaatagtaatttcttggacttgaatctcccgccacagcacaacacaggtctgggagggatccctgtagcaggtattccagcgtcttcaggaaacagtttagactctcttcaagatgacaatcctccacactggctaaaatcccttcaggccctcacagagatggacggccccagcgctgctccatcacagacccaccacagcgcccccttcagcacacagatcccgctgcacagagccagttggaatccctaccctcctccttcaaacccttccagcttccactccccacccccaggctttcagacggccttcagaccccccagcaaaacccccacagatttactacagagttcaacactggaccgccattaggcaaagaggagcaaccattagaaaatgcaggatttgtcccactctgttttctccctctcagcccaccacccacagctcccttctcatctcttatgttctgaagaatccagtacctgatcaattttttttctccctaaccccagatgcaatgcgatcacagggtcattaccatctctttattaattgtaaaaatttttgttgatccagcatttgagtgacactgttgaatgtttctaaaaatgcctttttaaggagagaaaaaaaaatcaaagggcagtctcaatacttagaaaattattgtttgtctgttgcgcataataatgacataatctgcttagcagaaaatgacgattaatctataggaaagctcaagtaaatgcattatcaactgcagaagtttgaaaaccaggttcatttacgtgagattgctaaatgcatgggggaaagcagtggtcctagcatccatcttgtattcagcttatcattattgcagggaaaatgcttttaatttaaattaatttttaattcttttggcaagttgatggcaaggacttgattgtgtcattaagcaaaagaatgtattggaagttgatggaaagacaaattcatctgtagtagtaactggccgattgctaaagagttcataaggaggtgagaagtaatttttttaaaggagaaaaattttttggctttagatttaaagtaaattgaaatgttttaaagaaaaaagtattcacagatttaatacctattaataatataagagctgaaatgtaagtcatttcttcagtccttctcctctgtcggaatcttttttgttttaccataaattcacctgacgagggcactctgagatagcactgctctggggccatctgatcaccatcgggagcaaatctctgacctccttgcctgcagcttttacttaaccctgtagtttctggacgtttgtgcagtattgaaaagacaggagaaaagcaaacagaaacctggttataacctgacgctaaaactaaaaacaaggaaatgtacctctttcttcagaattaaaactaaaatcttaaataaaacagaaaacttgatgatgaaaaaaaaaaaaaaaaaaa

SEQ ID NO: 153 - DNA, 2550 bp, Homo sapiens
ggagcagatccggggtagagggaaaagagctccgggccaggggctgccgtcgccgccgtcggggagtcagcccgccagcccgccagctcgtcagcccgccagccagcgcttcgcgggccctgtcggtcccggtaagcgggcctgcgcttaccggaaagaggagcgtaagatgaaagagtatcagaccaaacattgtctggcttgcactgtaaaactagttagctgaagacgacttctcaggtttcttcaggatgcctgcagcacttgtggagaatagccaggttatctgtgaagtgtgggccagtaatctagaagaagagatgaggaagatccgagaaatcgtgctcagttacagttatattgccatggacacagaatttccaggtgttgtggtgcgaccaattggtgaatttcgtagttccatagattaccaatatcagcttctgcggtgcaatgttgaccttttaaaaattatccagctgggccttacattcacaaatgagaagggagagtatccttctggaatcaatacttggcagttcaatttcaaatttaaccttacagaggacatgtactcccaggattccatagatctccttgctaactcaggactacagtttcagaagcatgaagaggaagggattgacacactgcactttgcagagctgcttatgacatcaggagtggttctctgtgacaatgtcaaatggctttcatttcatagtggctatgattttggctatatggtaaagttgcttacagattctcgtttgccagaagaggaacatgaattctttcatattctgaaccttttcttcccatccatttatgatgtgaaatacctgatgaagagctgcaaaaatcttaagggaggtcttcaggaagttgctgatcagttggatttgcagaggattggaaggcagcaccaggcaggctcagactcactgctgacaggaatggctttctttaggatgaaagagttgttttttgaggacagcattgatgatgccaagtactgtgggcggctctatggcttaggcacaggagtggcccagaagcagaatgaggatgtggactctgcccaggagaagatgagcatcctggcgattatcaacaacatgcagcagtgatggcgccaggctctgcagggtgggcctgatcccagagtggtgcttactgtgctgactgtgtacttatcttccccaagagaaaatgcttcttttgagcacactgtacctaccatctgcattgagcagaaagacttttgttttactgaagacaaaagatgtttttattttagacccagaagagaggagtttgctctgaatttgtaaataagtcttccccattcctcatactcgagcctctcctctctggttgcctcctgccaccagcatccatggctcatttgacacctttttaaatatcaggacaagtctgaaacaaagtagtaaaatgtatataactcttacctgttgtcattctttttcttttaaatttgttgctaatctctgataatgaagattcttactctgattctcagctgagctgtgagggcttccagggaaaatggaacaaaatggtgttcttaggtaatgggttgtagatactgagtcttcctttccttttctgacccttctcgaggacatttgctttcctcacacttttgtagtctctctttacatattactatatggaaatgaattgctctgtgctgaaatttgaagaccagataatgaaactgaaaagcaaacaattttactgaatctgtctacccttcattcatgagaactccagaatgagtgttgaccactgaagcatcttttaagtctgtgttccattgtgccattcaggtttgctgtcacatatgcatcatctgaaatcatttgaaatttttgtacaataaaatatcctggatttgatcctgaaggaaactagtaagatcagatttttgggtcatgtctgttgtattttcagtaatgtgatttcagatggtcatctggattctcccacttctctactccattatttctctacttttccttccagcaaacctgaaacgtgagggagatggattaatgtgagtaacaggaatgtgtctttaaaaagctagagtggttacatttaatcaggcagtaagataatttgggttcttgagttgttttggagtaatatcccacaactggggtaggaagctcaggacttttttctttaaagctagtcatttcaaaagcatattgtatttttttgaatgactacagtatggacaatttcaaaaaccaaaacccactttggattggtggaagtaaaaactggtaactcactcaagtgaatgaatggtcttgcattttaaaagcttatgggaaactcaatttgaaatgattagaaaatgtcaagtattataagctggtatttaagatgcttgtaaatactatttatgtttttaattttgtaaaataaagatttctttttaaccactggcaaaaaaaaaaaaaaaaaaaaaaaaaaaaaaaaaaaaaaaaaaaaaaaaaaaaaaaaaaaaaaaaaaaa

SEQ ID NO: 154 - DNA, 4679 bp, Homo sapiens
gagccaggcgggggcggagggggaggctggcagcggagctttgaatagggaagttttgcaggggttacgtttgcagtcagtccggtgtttgcaaatattgtgtgggctccgcgcgctgcgggctgcgggagggtccggccgggcgtctctgcgagcctggagtttgcatgaaactttcacctgcgctccggggagactttcggctccggctcccaccgcgcgcctcgccgccctcgcgaccgcgggctccgtccaacccggcccgacatggacgtgctccccatgtgcagcatcttccaggagctccagatcgtgcacgagaccggctacttctcggcgctgccgtctctggaggagtactggcaacagacctgcctagagctggaacgttacctccagagcgagccctgctatgtttcagcctcagaaatcaaatttgacagccaggaagatctgtggaccaaaatcattctggctcgggagaaaaaggaggaatccgaactgaagatatcttccagtcctccagaggacactctcatcagcccgagcttttgttacaacttagagaccaacagcctgaactcagatgtcagcagcgaatcctctgacagctccgaggaactttctcccacggccaagtttacctccgaccccattggcgaagttttggtcagctcgggaaaattgagctcctctgtcacctccacgcctccatcttctccggaactgagcagggaaccttctcaactgtggggttgcgtgcccggggagctgccctcgccagggaaggtgcgcagcgggacttcggggaagccaggtgacaagggaaatggcgatgcctcccccgacggcaggaggagggtgcaccggtgccactttaacggctgcaggaaagtttacaccaaaagctcccacttgaaagcacaccagcggacgcacacaggagaaaagccttacagatgctcatgggaagggtgtgagtggcgttttgcaagaagtgatgagttaaccaggcacttccgaaagcacaccggggccaagccttttaaatgctcccactgtgacaggtgtttttccaggtctgaccacctggccctgcacatgaagaggcacctctgagggagcagagaggtggatcctgtaggctaaaaggcttccaggctgagagccggccgtggaaggagggatgcgtgttccagccaaagcatgccgttctgcaccctacccagttgcctccagggcctctccttggaaggtcttttgagggctaaaaaggtcctgtaagaagcggcatagcacccgtggtgcatggtatgtgggtgaccctggactcgccactggtacccgcccttccgagcggcgcctaagcctttgccgtgagcatgcacactgagaatgctaatggttgggttgattgtatgttgaggatctattactgaccgtatgatgaggccaactttttttccttgtggttagcaagactgcaagagatggaaaaaaagtagtttgaatgttttgtgtgtaaggagtataccatgagatgagatgaccaccaatcatttccttggggggagggggtgtctgcaccttagaaaaaaaaagaaaaatcaaaaaaacaaaaaaacaaaaacaaaaaaagaaggaaaatcttggagggtgggcgtgggaactcaggaccccagagtggcgagtggtgtggggagggagagcctctctcccccttttctgtgtgagaggaactcttagtgtctggtgcagctattaaatgtgcaatgtgtcaagtagcttgttttacacgctacaacatagctcatttgtaacccattgtataagctgtgtatttacaaatataacacaacaatttaacttttccttagaatacaaaaagtcatgcatggtctggggaactatatgcttttccatttttaagtcaggactgcaatactgattccagttaatgagcagctaagatccaatctgtctaatacagtgaccccctagccatccgggcctggcaatatacaattttttttcccctccaagtttgtaacactccccttccagaaaggcattgtgcaacacaggattatttttaaatgattctgaatttgaattaactttttggagaattctgtgatgcccttagaagaaattggacacgtattgagtgtcacaaagctggggctgggaattgctggtctaatgtttcattagacttaagaacctaaaatttttctcagttgggtggataaaaccactaacgcttagaaactgttttctcatgcagctatgtttctcttatttatgccttgaggactaatttctggttttctagctgttaatgcactgttgaccttcataatggtgccttacgcaagcgatcccttctgtgggggtctcatacaggggtgtgggcgatgcatgctttattaaggctcttgtttcacctggcagtgtactgtatcaacgtataatacagaaaaaaaatctctttaaggtcctccttcacaaagacatagagtgaaactccctttacatgtcagtatttgttcaacactttaggcaacttgactgtcagtgttaaaatggaaaacaggaaaatggaaaaatctgaccaattctgccaccttgagactttcatatagaccttgcacaacaattgtatagatcacacaccggctgtatttaatatgtaacattttcacacatattaaagatacagaagtattaaaaaacccccaatgttaatgtatttgcttaaaaggcacaagtttcacatatctgtctagctatctgttggtaatacagaaagtatactacttttttaaaaaagtgggcagaattcttgtgtatgtatatttgtgtgtacagtatgtgtatgtgtgtatatatatatattatatatatagataatatataaatattttttttaaggagaaactagaatgtttagctagaaaattccacagcctgtgaagaaatatttcaaaatggccataaaggaggtaaaaatgaaaaccataacctaacttttatagaggctttatctttaatttaacgatgtgcggaggactttcttgcttgaatctgttccgggctgtctgctctgtccatcaaatgggcaggtctggaatggggcaccttcggccgttcagaagtggcctgaacagaatgctggaacccaggctggactcggacacactaaggttttgattttgaatttcagccttattagaagatctaacctaagagtaagctaaccacagggattcttttgtagaacactttttatgcagatgaagctattttttccagcaagtagattcttccagtttttccaaggagtaatttccccgaattggcataccacggcgtggacagctgatatttcacccagctgctggcttgtgggtgtggctctttgctttatatatatatacacacatgtgagtctggctgggctggtattttgtttgatcttcctggaaatgagcagtgactaacgctcacataactggttttttttttatctgggctgatgaatacatttacctaagaaactcatttcgttttacttaagaggggaagtgcagttttcttttggcagttcagaatccaagcacttgatttgctgggtttggaaaactccttttttggccttctatgtgcttagccataacaattccattaagcaagaaggtaagcaaaagacaaaaaaaaaaaaaggaaaaaaaaaaacttgcactggcttgtctcacttacgaaacatgtcggagctgtttgcctgggtggggctgggtaccgtacctgtcaatgcctgtgattttcataattagcacgtacataaagaagtacattctgttcaggtgataactgagcctcaatcaagcagaaactttttgcttgaaattaaaaaaaaatttctattagtgaaatttcttttttttttttttttggaagcaccctgttatctaaagaatctttgtaagatttttgtaaaattttgttttacaagattttatttgaaattgttttttgcaagattgttatatttctgtatgaatgtattttttattggaataacataaaagaattcttatcagcatcttgagtctggttgttttttttgggggaagggggttgttggaacagattcctcctgcattcatcaccctggcttcctcctgggggcaaatcttcattgagcaaccctgagaacaactcaccgacctcagccccttcctctttccacagcctgtcctgggagctggagaggatgtcagcgagcctgacattgccctccctgaatgcatcaaatactcttctccaaggactgacaaaaacaaccccccggctgtgggcacagtagggaaccatgccggtttgatcttccattgctcaagccagggaatgcattgcagaggcacctgcacaacgacaaacttgagtgtttccctgccacttctgtgcctccacagcctgctccagttccgcagctagagctgggcctaccttccccagccagccctgccacacacctggctgaggcatgtctgggaggggtggaggaggcagagggactccaggccagagggctgttctcacaacctcagcccactctcagtcaaggagggcagaaaataaaagatgacatcactgccaaaaaaaaaaaaaaaaaa

SEQ ID NO: 155 - DNA, 1510 bp, Homo sapiens
gactataccactcccataccctataactttgtttgttctatttcacacatataattttccgagacaagatgttctcatttaagcaacaagaagattcgtctctcgctattactgtaactgctgtttatatcgtcatgtcccggaaaggtccctgtcttccctgaatggtctctaccaacttcacctccggttctaggtgtcatggctgccccaagagtctaggtaagagtttgttcccgtggtgcggagggtcaaggcccacacccggaaacctagcgaggtaaagttgcgtcttggttgtagagacgacaacttctccgcttcctcggcgatggcggcgtccgggagcggtatggcccagaaaacctgggaactggccaacaacatgcaggaagctcagagtatcgatgaaatctacaaatacgacaagaaacagcagcaagaaatcctggcggcgaagccctggactaaggatcaccattactttaagtactgcaaaatctcagcattggctctgctgaagatggtgatgcatgccagatcgggaggcaacttggaagtgatgggtctgatgctaggaaaggtggatggtgaaaccatgatcattatggacagttttgctttgcctgtggagggcactgaaacccgagtaaatgctcaggctgctgcatatgaatacatggctgcatacatagaaaatgcaaaacaggttggccgccttgaaaatgcaatcgggtggtatcatagccaccctggctatggctgctggctttctgggattgatgttagtactcagatgctcaatcagcagttccaggaaccatttgtagcagtggtgattgatccaacaagaacaatatccgcagggaaagtgaatcttggcgcctttaggacatacccaaagggctacaaacctcctgatgaaggaccttctgagtaccagactattccacttaataaaatagaagattttggtgtacactgcaaacaatattatgccttagaagtctcatatttcaaatcctctttggatcgcaaattgcttgagctgttgtggaataaatactgggtgaatacgttgagttcttctagcttgcttactaatgcagactataccactggtcaggtctttgatttgtctgaaaagttagagcagtcagaagcccagctgggacgagggagtttcatgttgggtttagaaacgcatgaccgaaaatcagaagacaaacttgccaaagctacaagagacagctgtaaaactaccatagaagctatccatggattgatgtctcaggttattaaggataaactgtttaatcaaattaacatctcttaaacagtctctgagaagtactttacctgaaagacagtatgagaaaaatattcaagtaacactttaaaaccagttacccaaaatctgattagaagtataaggtgctctgaagtgtcctaaatattaatatcctgtaataaagctctttaaaatgaaaaaaaaaaaaaaaaaaaaaaa

SEQ ID NO: 156 - DNA, 1620 bp, Homo sapiens
cattgtcttgacaagagcatcttcagcgggcgagtccccggctcctccagctccttcctcctcttcctcctcctcctccacctccggcttttgggggatcactgtcctctctcggcagcagaatgagccggcaggtggtccgctccagcaagttccgccacgtgtttggacagccggccaaggccgaccagtgctatgaagatgtgcgcgtctcacagaccacctgggacagtggcttctgtgctgtcaaccctaagtttgtggccctgatctgtgaggccagcgggggaggggccttcctggtgctgcccctgggcaagactggacgtgtggacaagaatgcgcccacggtctgtggccacacagcccctgtgctagacatcgcctggtgcccgcacaatgacaacgtcattgccagtggctccgaggactgcacagtcatggtgtgggagatcccagatgggggcctgatgctgcccctgcgggagcccgtcgtcaccctggagggccacaccaagcgtgtgggcattgtggcctggcacaccacagcccagaacgtgctgctcagtgcaggttgtgacaacgtgatcatggtgtgggacgtgggcactggggcggccatgctgacactgggcccagaggtgcacccagacacgatctacagtgtggactggagccgagatggaggcctcatttgtacctcctgccgtgacaagcgcgtgcgcatcatcgagccccgcaaaggcactgtcgtagctgagaaggaccgtccccacgaggggacccggcccgtgcgtgcagtgttcgtgtcggaggggaagatcctgaccacgggcttcagccgcatgagtgagcggcaggtggcgctgtgggacacaaagcacctggaggagccgctgtccctgcaggagctggacaccagcagcggtgtcctgctgcccttctttgaccctgacaccaacatcgtctacctctgtggcaagggtgacagctcaatccggtactttgagatcacttccgaggcccctttcctgcactatctctccatgttcagttccaaggagtcccagcggggcatgggctacatgcccaaacgtggcctggaggtgaacaagtgtgagatcgccaggttctacaagctgcacgagcggaggtgtgagcccattgccatgacagtgcctcgaaagtcggacctgttccaggaggacctgtacccacccaccgcagggcccgaccctgccctcacggctgaggagtggctggggggtcgggatgctgggcccctcctcatctccctcaaggatggctacgtacccccaaagagccgggagctgagggtcaaccggggcctggacaccgggcgcaggagggcagcaccagaggccagtggcactcccagctcggatgccgtgtctcggctggaggaggagatgcggaagctccaggccacggtgcaggagctccagaagcgcttggacaggctggaggagacagtccaggccaagtagagccccgcagggcctccagcagggtcagccattcacacccatccactcacctcccattcccagccacatggcagagaaaaaaatcataataaaatggctttattttctggta

SEQ ID NO: 157 - DNA, 9752 bp, Homo sapiens
tgtttccgtgcgcggccgctgcgcactcggcactgggcggcgctggctggctccctggctgcggctcctcagtcggcggcggctgctgctgcctgtggcccgggcggctgggagaagcggagtgttggtgagtgacgcggcggaggtgtagtttgacgcggtgtgttacgtgggggagagaataaaactccagcgagatccgggccgtgaacgaaagcagtgacggaggagcttgtaccaccggtaactaaatgaccatggaatctggagccgagaaccagcagagtggagatgcagctgtaacagaagctgaaaaccaacaaatgacagttcaagcccagccacagattgccacattagcccaggtatctatgccagcagctcatgcaacatcatctgctcccaccgtaactctagtacagctgcccaatgggcagacagttcaagtccatggagtcattcaggcggcccagccatcagttattcagtctccacaagtccaaacagttcagatttcaactattgcagaaagtgaagattcacaggagtcagtggatagtgtaactgattcccaaaagcgaagggaaattctttcaaggaggccttcctacaggaaaattttgaatgacttatcttctgatgcaccaggagtgccaaggattgaagaagagaagtctgaagaggagacttcagcacctgccatcaccactgtaacggtgccaactccaatttaccaaactagcagtggacagtatattgccattacccagggaggagcaatacagctggctaacaatggtaccgatggggtacagggcctgcaaacattaaccatgaccaatgcagcagccactcagccgggtactaccattctacagtatgcacagaccactgatggacagcagatcttagtgcccagcaaccaagttgttgttcaagctgcctctggagacgtacaaacataccagattcgcacagcacccactagcactattgcccctggagttgttatggcatcctccccagcacttcctacacagcctgctgaagaagcagcacgaaagagagaggtccgtctaatgaagaacagggaagcagctcgagagtgtcgtagaaagaagaaagaatatgtgaaatgtttagaaaacagagtggcagtgcttgaaaatcaaaacaagacattgattgaggagctaaaagcacttaaggacctttactgccacaaatcagattaatttgggatttaaattttcacctgttaaggtggaaaatggactggcttggccacaacctgaaagacaaaataaacattttattttctaaacatttctttttttctatgcgcaaaactgcctgaaagcaactacagaatttcattcatttgtgcttttgcattaaactgtgaatgttccaacacctgcctccacttctcccctcaagaaattttcaacgccaggaatcatgaagagacttctgcttttcaacccccaccctcctcaagaagtaataatttgtttacttgtaaattgatgggagaaatgaggaaaagaaaatctttttaaaaatgatttcaaggtttgtgctgagctccttgattgccttagggacagaattaccccagcctcttgagctgaagtaatgtgtgggccgcatgcataaagtaagtaaggtgcaatgaagaagtgttgattgccaaattgacatgttgtcacattctcattgtgaattatgtaaagttgttaagagacataccctctaaaaaagaactttagcatggtattgaaggaattagaaatgaatttggagtgctttttatgtatgttgtcttcttcaatactgaaaatttgtccttggttcttaaaagcattctgtactaatacagctcttccatagggcagttgttgcttcttaattcagttctgtatgtgttcaacatttttgaatacattaaaagaagtaaccaactgaacgacaaagcatggtatttgaattttaaattaaagcaaagtaaataaaagtacaaagcatattttagttagtactaaattcttagtaaaatgctgatcagtaaaccaatcccttgagttatataacaagatttttaaataaatgttattgtcctcaccttcaaaaatatttatattgtcactcatttacgtaaaaagatatttctaatttactgttgcccattgcacttacataccaccaccaagaaagccttcaagatgtcaaataaagcaaagtgatatatatttgtttatgaaatgttacatgtagaaaaatactgattttaaatattttccatattaacaatttaacagagaatctctagtgaattttttaaatgaaagaagttgtaaggatataaaaagtacagtgttagatgtgcacaaggaaagttattttcagacatatttgaatgactgctgtactgcaatatttggattgtcattcttacaaaacatttttttgttctcttgtaaaaagagtagttattagttctgctttagctttccaatatgctgtatagcctttgtcattttataattttaattcctgattaaaacagtctgtatttgtgtatatcatacattgttttcaataccacttttaattgttactcattttattcactaagctcgataaatctaacagttactcttaaaaaaaaaaaaaaaagactaaggtggattttaaaaattggaaactgacataatgttaggttataatttctcatttggagccgggcgcagtggctcacgcctgtaatcccagcactttgggaggccaaggtgggtggatcacctgtggtcaagagttcaagaccagcctggccatcatggtgaaaccccatctctactaaaaatacaaaaattagccaggcgtggtggctggcgcctgtaatcccagctactcaggaggttgaggcagcagaattgcttgaacccaggaggcagagggttgcagtgagccgagatagcaccattgcactccagcctgggcgactccatctcaaaaaataaaaataaaaaaaatgtctcatttgggaaggaaattccttttaaaaaagagttgagacacttagaaaactaatgttttatatttagtcaagagttatttaagaaagtcaagcttgtttaacaacaaaatatgaagatttaagtgttaattgctggatccattttaaaataagattttaattaacatttgtaaatggtatattttcgtttgtaacaaaccattgtcttttttcaaggatgaacagagtttatgaaggagcatcattctaagaattaagtgatgtagtctttatgtttggacagttcaccagattctcaagaaggctttcaaacaactataaagtttgatgtttgtcctgctgagctaatggggaaagttatagcataaaaattgtgtaaccgcatagatatgtcatttttaaaaactggtttaacagaaatcaagcaaagtcacaaatatgttcacaagttggaattatttattgagtcaaaatgtcgaatcgaacattttgaatgaagtaagtgttataaatgaaaaattgcctgatgtttagcagtttgtattctctaaagctttttttcaaaagttcaggctttctacttactgggaagttggtggtcctcttagtccctgataaatcaaggcaatcacattcatgtgagctggatgaatttataagttataaagaccttatccttcataccttgaggatgattgcactggttttgaagtcagttgcttaatgatgaggtgagaaatgtatcctgttgctaaatctgtcttagacccttggtgaaacttgaagatttcagtttataaagataaaatcaagcatcttttgtgcagttttctttttttaatgcaagaatggtggggaggtttgtttgtaagcatgaaactttgagaatctttattaagaaaatgacataatttttaaaaaccttgtagccaagaacatatgtggccacattaccagtaataaatgtttttctctttatattggccaaaagggaataaaaatgtcatcataggaatttgtacatatgctactgatttgcctagaaaatagcaagtttgatattgctcactttgcaaatatagggccatgtggcacttttatctataggacagattaataaaaatgaagtggggaggggtttatttttgatatattactcttatgagttttcaagctttgataatgtttaactgaaaagtggcttagaaagggctagatccaatgtgttcattattaaataattgctatcagatacaattttaagttcattctttttcaaactcaagtaccatattggcaaccataatattgtcataggtgctctcttcatttagatattcttggggggggtggcatttgtataatatatgtgtacatatatatatatatatatatatatacatacagtatataatctaaagctctgagagctcttaagtcaggaatgctgagtattatagtatattgaggtcagatgaaattttacatttttgtgtgttctgttgcattccttctggtagtttctatgactgcattactccagcactcatgattgattttatcttctaattttcttccaagtattttattttttattagttttctttggcttgatacttttaaatatgttactagtcacttgaaagcctctcccccaaaagtatttggtttgtatgctttgtctgtggcagctataacagtggtaagaacattttgaagatagctttttaaaggaaccactgattttttcaaaaatcatcctgggggaggaattttggcatttcatttgagcagggattttgtcagaaaatgtgttttgatggtaggtcagcagcagtgctagtctctgaaagcacaataccagtcaggcagcctatcccatcagatgtcatctggctgaagtttatctctgtctctcaggataaatccctgtaggacaaatccctactatcatttctaccttttggggtgacatgtggaatcatacaaaggcttaggaagaaatacgtttgtttaaaccaggatgctttacttacttgaagtgacttcaatctagatttcttttaatatttaacaaatttttaattctatgatcagccacagtcagctattaccataaattggtctctgtttattttgaagatcacggctgcttcattttgcaggattaagtagggctaatgtatcttaaagttaagatcttgaattaaagtgagttttagaaatagtgttacataccttttcagttgttttcaagaggctttatttttgttgcctttgtagccctgaaagctgttggtatattttttccctcatggacccaatagaaaagttgtatatttatttggattatatttacattctgtcctttgtaaatgtttggtgtaacttgcacttttttaaatgacccagtttgggtattagcaacttaagaaattccctcatcaagtaattctcaactttttagtctttctcctctcttcaaatcatgtgactttttaaatggaagtttttcattgattaaaatattttagcacctaaaagctagccttaaaaacagctgtaaaagaaaaacatcaggaaattagatatgactagcccagttaattaaaagacgggctcaaaccttgttttattctttttcatcttggatgaagattgaagggaaaataactcaagtgcataatatttattttcaatttttaatgagactttatcctcatcacaacattaatactgtacatagtatgccaaaatatccattaatttgtctagaatagtacaagactttttaaagcaattgtcctcacagagaccacatgtaatatactgaaatatgttcatttttaatggctttgttaacatcaaagaaatgctgcctaaatttgatttcagatgaggaaggagaaagtaaagtgtgcatagtaaggctgtaggtgaagagttgtgagataaatagttcactcagttgtacaaagcacaactagaactttttgttgggaggcttacatacatcttgaatattcttaatgtaataatgttgactattaagttggctacacagtcactgtatgtactaggaactggtttccttgacattctagaatcaatggctaggagaggcattaatctttgaggggctgaacatatcatgaagctgagtcagtatggaaaattttcaaataaacagggtgctgaagttccatctgtctcatctgcttatgataagttcttattgattagtgaatgtagcttaagcctttgtatgtgtcctcagggggcagaccgactttaagagggaccagataacgtttgaatggagggattatatttcaggtgttttagcttgaaatttattttttaaaaaaagaaaaatttaaaaaatatataaataaaatagaacaaagccggtgatgcaagttgatattataaacaggcagttttagcacagaaagaaaatactgacctgtctgcattctggtacggtgggtgcaggtcccagctgggtatgacatgatacatttttaattattctcaccagcaagtaaaaggaaaatgaacaatcttttggaattgtctttgaaaaggatcaaagagtaggaaattcacatttgacctaacattacttgcctatagaagtatggcatttccaagcttttgtctgaggagcatctcagagaagtgagagtaaatctgagttagcttaaaaattggtagggaggaagaaaatctctgcaaataatgattttatgtttgttggccaagtgaaatgatctatcattgtgtttgggaggttttattttcttatgtttttaaaattggtaaatgctttatagatgtatttttatccaagtgccactccaatttgtgtatgtaataaaattatttatattaaaagtgggaaataattgtcaacattttttttgagtatagatttattaggggtggcaaagaagagtgctagttagcagttttccatgtaaagttgtccttgactgatttgtccacatgtcagttgtaactcccccactccctgcaaaaggaattatttctaacccagatgtatcacttgaaactttttagaagcaaaataatcagggaagttcctagaaaggtgtttggctttttggtttttgagggttggggtaaagaagacttcccccacaactgtcagcacaaaacagggtattgatttttaactctgatgtttctattggagttgaatactaaataaataactataatgagggaaatacatttctaataaaattccctacattctagaaacatccctgttttaatttttttatctaaatctttttgtgctttatgtgtaaagaaaaaaatgtactgagttacaatgcattttattaacactatgtacataatagctgctttgtgttcagaatagtagcagttgctttgtatattaaagtgatccttgtgaatttgtgaaatattgtcataaagtgctttttcttactgtaatctttgtggtatcaactgtcataatgctctttttacacaaacatttatgtgcagtcacataaacatgcttttaaaaactctgtaagtctcttttttggggatgggatctctatattttgttgggttttttttgctagtagtgtgaagccatgttttattggacttaaagttacaatatattacaagcttgtgttggaaggcagcaaaactaattcagacaacaacatgtcttcagttactggatccctaattttcaggacaaaacctgtttttcaataagattgaacagtgcctatttgtggatttggagatgttactgtcaagatgactaatggagacatacgaccagctgtgtctgatgtcataaaacacgtgttcactgaaaggacaataagactatataccttctcaggtccccttgcaattctaaaactctgtgatcatataaattggaaggaaaggggaggggatatggttaatctttgcttaagctgtaagaataaaaaagttatctcctatactattaacttctgaaataagttctgagacgagacatctgaaaataagcagctgcattatttgtatgtttcttcactgccaagatgtgttcaagcctgctatacctgccattgtattggaaggcttaatgaatttcatttattttctgcaacaacgattacagaatttattgcacaaaatgagacattttgagagtgatattaattacatgagggacaataggcatgaactaggattgttctaagcaaatcggaatcgggtcaccctgccacgttcaggtgcttggaccttcaggaaaagattgcccatcttgtcatttgaccaggcactgaagtgacaagaccatccttgagaagtcacatccaaagataaaattctgatccatttctagttttagtgtttcgccactgaagacttaacatatgtcttttacactcaggttgcaaaacacaggcccaagacaaacttaacttctcccccaaatcttccttccgctggtttttccatctcgtaagtggtgccactatccatctgttaaattgtttaggggaaacctagaaaagcactaccttaatcagtgttatccttcttcttaactgtgcgtcctaatttctccacatctttcttaagtgcagtgaccaaaccggatgagaattctaacacgggcctgacatcaaatggaaaggaaggataatgtccaggagttggaatgttatccttgtttttaattaagatgcaattcacataaattaactttttaagtgaacaattaagtggtagtacatccacaatggtgtacaaccaccacttctatctagctccaaaacattctcatcactccaaaagtaaagtcccgttactctccattttctcctcccaccgcccttgtccctggcaaccaccaatctgcttcctgtttctttggatttacatccgggtatttcatgtgagactcatacactgtgtattacttctttcgtctagctttaatgtgttgttgaggttgatccattgtaacatgttatcactacttcattcctttttatagctaagtatactttttatagtaagtatgccattgtagatatataccacaagtttatcgattcatccagttgagttgtttctactgtttggctaatgttcatagtgctgttatgaatgttcgtgtacaagtatttgagtccgtgttttcaattatttggggtatatgcctgggagtggagttgctgggtcatgttgaaatcgcacatttaactttttgaggaactgtcaaactttccctcagcagctgtaccgttttaccttccaccattgatgtatgagggttccaatttctccacaccttcaccaacacttattttgccattttaaaaattatagccatcctcatgggtgtggtctctcattgtggttttgatttgcatttccctgattactaatgatgtggagcatcttttgttgtctttggccatctgcgtatcttctttgaagaaatgtctgttgaggtcctttgttcattgaaattttgttgttgggttctgagttccttatatattctgggtactaggcccttataatattttcgcctataagtttttgctttataatgtcctcattgttttcaaacttactttatgtaatatgtacacttctaaaaaaaagaaacatggaaaagggcaaactgtaaaaaaaaaaaaaaaaa

SEQ ID NO: 158 - DNA, 1888 bp, Homo sapiens
gtcttcttcggtggcgatccgcgtcctagaaagggcggtgggctccacctcggcctagaaggccagcgggagccgtaggaagccgtcgcgggaagctcagccgaattggagttggagcccccggattgcgctgaccctgagctctcagactccccagtacaatgactcaagcagaaattaagctctgttctttgttgctgcaagagcattttggagagattgtagaaaaaattggagtccatctgataagaaccggcagccagccactaagagtaattgcccatgacacaggaacatcactggatcaggtgaagaaagccctgtgtgtcctcgtccaacataacctggtgagttatcaagtgcacaaacgtggtgtggtggagtatgaagcccagtgcagccgggtattgcgaatgcttagatatccccggtacatctatactaccaaaactctgtacagtgacactggagagctgattgttgaggagcttctgttgaacggcaaactgacaatgtcagctgttgtgaagaaagtggcagaccggctcacagagaccatggaggatggcaagaccatggactatgctgaagtatcaaacacatttgtgcgactggcagacacacactttgtacaacgctgcccttcggtacctaccactgagaattcagaccctgggccaccaccacctgcccccacacttgtcattaatgaaaaggacatgtacctggttcctaaactcagcttgatagggaaaggtaaaaggaggagatcatctgatgaagatgctgctggggagcccaaggccaagagaccaaaatatactacagataacaaggagcccattccagatgatgggatttattggcaggccaaccttgacagattccaccaacacttccgtgaccaagccattgtgagcgcagttgctaacaggatggaccagacaagcagcgagattgtgcgaaccatgctccgaatgagtgagattaccacttcctctagtgctcccttcacccagccattgtcttccaatgagatcttcagatccctacctgttggctataacatctctaagcaagttcttgatcagtatctcactctgctggcagatgatccactagagtttgttggaaagtctggcgacagtggtggaggaatgtatgtcatcaacctccataaggcattagcatccctagccacagccactctggagtccgtcgtacaggagagatttgggtctcgctgtgctagaatattccgtctagttttgcagaagaaacacatagagcagaagcaagtggaagactttgcaatgattcctgcaaaggaggcaaaggatatgctatataagatgctctcagaaaatttcatgtcactccaggaaattcccaaaacaccagaccatgccccatccaggaccttctatttatatactgtgaacatcctgtcagctgcccgaatgttgttgcacaggtgctacaagagcatagccaacttgatagaaaggaggcaatttgaaaccaaagagaataagcgtctactagaaaaatctcagagggtagaagccatcattgcatctatgcaggctactggtgcagaggaagcacagttacaagaaatagaggagatgatcacagctcctgaacgtcagcagctagagaccctgaaacgtaatgtcaacaagttggatgccagtgagatccaggtggacgaaaccatcttcctgctggagtcttacattgagtgcaccatgaagagacagtgatccagaagaagcatcttcctcagaagatctggggggatggaaagcaaaataaaggaggtgcctggatgcattatttgcagtgggaaaaaaaaaaaaaaaaaaaaaaaaaaaaaaaaaaaaaa

SEQ ID NO: 159 - DNA, 2702 bp, Homo sapiens
agaagacgtgcggagggagacgcagagacagaggagaggccggcagccacccagtctcgggggagcacttagctcccccgccccggctcccaccctgtccggggggctcctgaagccctcagccccaaccccgggctccccatggaagccagctgtgccccaggaggagcaggaggaggtggagtcggctgaatgcccacggtgcgcccggggcccctgagcccatcccgctcctagccgctgccctaaggcccccgcgcgccccgcgccccccacccggggccgcgccgcctccgtccgcccctcccccggggcttcgccccggacctgccccccgcccgtttgccagcgctcaggcaggagctctggactgggcgcgccgccgccctggagtgagggaagcccagtggaagggggtcccgggagccggctgcgatggacgccgtcttggaacccttcccggccgacaggctgttccccggatccagcttcctggacttgggggatctgaacgagtcggacttcctcaacaatgcgcactttcctgagcacctggaccactttacggagaacatggaggacttctccaatgacctgttcagcagcttctttgatgaccctgtgctggatgagaagagccctctattggacatggaactggactcccctacgccaggcatccaggcggagcacagctactccctgagcggcgactcagcgccccagagcccccttgtgcccatcaagatggaggacaccacccaagatgcagagcatggagcatgggcgctgggacacaaactgtgctccatcatggtgaagcaggagcagagcccggagctgcccgtggaccctctggctgccccctcggccatggctgccgcggccgccatggccaccaccccgctgctgggcctcagccccttgtccaggctgcccatcccccaccaggccccgggagagatgactcagctgccagtgatcaaagcagagcctctggaggtgaaccagttcctcaaagtgacaccggaggacctggtgcagatgcctccgacgccccccagcagccatggcagtgacagcgacggctcccagagtccccgctctctgcccccctccagccctgtcaggcccatggcgcgctcctccacggccatctccacctccccactcctcactgcccctcacaaattacaggggacatcagggccactgctcctgacagaggaggagaagcggaccctgattgctgagggctaccccatccccacaaaactccccctcaccaaagccgaggagaaggccttgaagagagtccggaggaaaatcaagaacaagatctcagcccaggagagccgtcgtaagaagaaggagtatgtggagtgtctagaaaagaaggtggagacatttacatctgagaacaatgaactgtggaagaaggtggagaccctggagaatgccaacaggaccctgctccagcagctgcagaaactccagactctggtcaccaacaagatctccagaccttacaagatggccgccacccagactgggacctgcctcatggtggcagccttgtgctttgttctggtgctgggctccctcgtgccctgccttcccgagttctcctccggctcccagactgtgaaggaagaccccctggccgcagacggcgtctacacggccagccagatgccctcccgaagcctcctattctacgatgacggggcaggcttatgggaagatggccgcagcaccctgctgcccatggagcccccagatggctgggaaatcaaccccggggggccggcagagcagcggccccgggaccacctgcagcatgatcacctggacagcacccacgagaccaccaagtacctgagtgaggcctggcctaaagacggtggaaacggcaccagccccgacttctcccactccaaggagtggttccacgacagggatctgggccccaacaccaccatcaaactctcctaggccatgccaagacccaggacataggacggacccctggtacccagaagaggagttcttgctcactaacccggatccgcctcgtgcccctgcctcctggagcttcccattccaggagaaaaggctccacttcccagcccttccttgcccctgacatttggactcttcccttgggccgaccactctgttctcattctccttcccaccaacatccatccgtccttctcagacaaaccactcactgggtaccccacctcctctctcatatgcccaacacgaccactgcctccctgcccccacacctgcacccaaacagacacatcaacgcaccccactcacagacaccccttaccccacccccactgtacagagaccaagaacagaaattgtttgtaaataatgaaccttattttttattattgccaatcccctaagatattgtattttacaaatctccctcttcccttcgcccctcccttgttttatattttatgaagttagtgcgggctttgctgctccctggcccaggaaagagggactacctgaccctcacctggcacccccctgctgctgcccaagccgctgggcctttttaattgccaaactgctctcttcatcagctcagcacatgctttaagaaagcaaaaccaaaaaaaaaaaaaaaaagatgcagcatcaaaaaaaaaaaaaaaaaaaaaaaaaaaaaaaaa

SEQ ID NO: 160 - DNA, 7455 bp, Homo sapiens
ctgggtcctggagcagagccgaggagccctggggtccctcaaagtttgtgtctggagccgtagcggcaagtgggcttgcggctaagggattttcctgggatgagagcgggtcttctgccttcattttggatgcacatcccgctttagccccggcagcctttggtccggctcgtgtccctggggattctcggatctccgaggacaccggacgggagcgcttggccatcctctctccggcagaggagcagacgtttgctttccaagtgcaaaactacagacacgcgcgcgcacacacgcaagcacacgcggagagagaggaaccttgccggtccgaggcagctctgcgcgtcccctcctgcgcttagcatcctcggcccagcgcggcccgcaccgccatggaggtgctggagagcggggagcagggcgtgctgcagtgggaccgcaagctgagcgagctgtcagagcccggggacggcgaggccctcatgtaccacacgcacttctcagaacttctggatgagttttcccagaacgtcttgggtcagctcctgaatgatcctttcctctcagagaagagtgtgtcaatggaggtggaaccttccccgacgtccccggcgcctctcatccaggctgagcacagctactccctgtgcgaggagcctcgggcccagtcgcccttcacccacattaccaccagtgacagcttcaatgacgatgaggtggaaagtgagaaatggtacctgtctacagacttcccttcaacatccatcaagacagagccagttacagacgaaccacccccaggactcgttccgtctgtcactctgaccatcacagccatctccaccccgttggaaaaggaggaacctcctctggaaatgaacactggggttgattcctcgtgccagaccattattcctaaaattaagctggagcctcatgaagtggatcagtttctaaacttctctcctaaagaagccccagtggaccacctgcatttgccgcccacccctccgagcagtcacggcagtgactcagagggcagcctgagtcccaacccacgcctgcaccccttcagcctgcctcagacccacagcccctccagagctgcaccccgggccccctccgccctctccagctcccctctcctcacggctcctcataaactgcagggatcaggccctctggtcctgacagaggaggagaagaggaccctgatcgctgagggctatcccatccccaccaaattgcccctgtcaaaatcagaggagaaggccctgaagaaaattcggaggaagatcaagaataagatttctgctcaggaaagtaggagaaagaagaaagaatacatggacagcctggagaaaaaagtggagtcttgttcaactgagaacttggagcttcggaagaaggtagaggttctagagaacactaataggactctccttcagcaactccagaagcttcagactttggtgatgggcaaggtttctcgaacctgcaagttagctggcacgcagactggcacctgcctcatggttgtggtgctgtgctttgccgttgcattcggcagcttctttcaaggctacgggccctatccttctgccaccaagatggctctgcccagccagcattccctgcaggagccctacacagcctccgtggtgagatccagaaacctgctgatctacgaggaacattctcccccagaggagtcatccagcccgggctcggctggggagctggggggctgggatagaggttcctccctgctcagggtgtcagggctggagtccaggccggatgtggatcttccccatttcattatctcgaatgagaccagcctggagaagtcagtgcttttggagctgcagcagcacctggtcagcgccaaactggaggggaatgaaacactaaaagttgtagaactcgacagaagagtgaacaccactttctaaagaggctgcctgcaccccctccctttcccttaactctacttttacatccccaaaccacctttgtcatcagcttttcctctttgccactggatcttcatggagacatgggcaagcattagtggcttcagattggagaccagcctgggacttccctgcagtgagagagcatctccccctggtccatgcccctcctgtgcagaagggagcctgcatccctcccttcctttctcttactgccataggaaattattttaggggttggaggtgggacaagcaggcttgtttccaccaatagtgccaaaaagatattgcctaatgtgcacctgtgaggtgtaaccccccgctttggagacgagatggctcttgttcagtcaagaccccagactctggccacaaaaatgccataatgcctgttggtatttggcaaagcactgacccgtgtcctccgttgctcgcactggggtctctggtgtgaacacccccgacagcagccctccgcccactctgccccctgggagccctcgctggatcgtctcgtctcctgcagcagcactggcaggcgagggctctcgttcatattctcaggccgcaagtgcaatgcctgaggggatcaggcttttctactccaggcaaacctgccccatcttgtcgcttttaggacctcccacaacctggttccccacacatccatagttctgcctccccagcttctcctccccagttgtaaatagtatttattagcttgccgaggcttcctgctagcaaccacactgaagagatcgatgcctcctttcaagctagccaagttttctgcgagccttcagagctaggagggcaccctaggctctgggatcccgtgtctttccagacaatgttttgtttcctttcctttgttttttcttttaactggaataattaccattgaaaaagaagttcctttgagcatgtatgtgtctgcctctaggatgagctcagagcgagagatgacacaatgcctcactcaggccccgggctccctggccacaagctttttctatcctgttttcatgacagagaaggggaagccctgttctgacaacagacatttcagacaaccttgctggctttccacacctgcctggccccctcctccctccacacttccactttgtcctcctcgtcccctacctcaacaaagcagggtggggtaggtgacatttgtgtatccacattcttacctttggtagtcaggtttggctactttgcagctcgcccaaagagatacaacctaatccccaacctacttttagtttttttgttttttttttatggttaaaagtaacttttgtagtttaaaaaaatctttcctctttcatataaataagaagtggaaattgcctttttattgtgtaatgtagaaaaccctcaagtgttttttccgagcttgggaaagattttgtgtaggaaatgtgcatagagtttgtattttatttttattagcagctgaaatgcctttggttttggcttctctctctccctctctctctctgtctctccttctctctctccccccaccacccacccccacacacgtcatctgcattgttattggagcctgtacttagagggattaagcccacaccctggcttccattccatatcaggtacaggatttgatgttattaacatttgtcgtcatacctcataagtcggtccctgccttgtctgtctaggcccatttggggctccctgtgagtgattcccctctctctgctatgctggagacggttccagcctggaaagcggccaagttcatcttctcactgtgagtggaagctggatcgggcccccgtagtcctggcagccctgttgtctggagggttcttgttgtccctcccattagccagggcggagactgtctgagctgtgcaggaggagggttgctagtaggttctgcttctgcttctctctgctccactgtctgcagcccagatcctgttgggcctggctggtgtctggtaaccatgggcctccactgacccatccctctcttttaaactgtcaggtcattatcaggcataggcagcctatagggcccaaagaaggcaaaaagataagatttactcaagtagcatttgggcaatgaggaaggaaaggtttcaaatttaggggcagaagtgagagaatgagccaacccatgtacctgctgcaactgaaccagactgggttttcaaggctcccagacgtagagtaggaaacgtgctcttctaaatgaggagggagaagataaaggaaacttctagcccctgtccttagtgctttgaggattttattttctcccttactacgcttgcttgacgtcactctctctcgacctccaaacagcaggactctttctctgggaaaccatccttccaaaacggaatctatgtagacaatgggacgttaggcagagagctcagatggcccttttaagggggctccaagaaccaacatcactgctcttttagataaacctctgccctccactccttgcttgagtgggttaaaggaactaacagttgtccctttaggaggacaaaatggggtcaagaggacacagaagagttgtatagcaccagattggttccaaatagttaatggatgtgtgcacattttctgttcagggattaagaccagaatatcagtggatttgttttccccaccaagtggcctcttagactagtcattaacttatgattagctctaaagatttcaaatagtggcagacagtgtcttctgaatgtaagttttgagaaatacgagtctgtcagagcggccataagccataaagagtcaatctcttaattatatttttcatcatgtaaacaagtttcccatttccctttcttagattgcaccagtgaaggagatgttttgcaaagattcagagaactaatttttcactggataagacctgagtaacccagaccccccaccgtggttcttttcacagccctcgactttgcacttaaaaagggatattgtaaatgaaaggctgcagtgccagttttaagaaagaatttctgtgaagtgtgaggactctggagtctagctcacataaagagagtgttatataaaaatccgacagctgaactaggttgctcttttttggcagggagtggggatgagatttgacaccaatatgggcaaaattagataaccttttggttaatataaatgattttgatttggaggcctaatttgtagattgtgaaagcagcttttagtttaacttattcacagaccccttataattaccatgtttttttttttcttcctaaatctcttggttcagcttgtgaatcttacgtgcccgtaaagttgggatgttgaattggctcttctttgttctggcagtgagtcaagtgtccagcattttttcataagtgttttttaaaattgttctccagcattttatggctcctccctcccatgtcctcagacccagcaaaagcgtagaggcagaattagaggcctctccaggccagctcctctgcccacatgtcatacaaggtgtgaatttgagcacagtccagaaatggagacatcccacccccagttgaataatggcccattcatgccaaccttgccaacacggagagggcagagatgcactagaagaccttcatcctccccttcctctgccccaagtcactacagttggttctattgaagccagtctttaagaaacctgggttaaagacaccagcacttctgcttgctgggctggctggacctgtgaagccatgggcaggtagtgccctcttgagagtcattttatttggccaccttcaggtgagactatccatagacacatgctaggataggccccgctgggagggcagttacaggagagagtaggtggtggtgacgtgagggctgtgaaggatccagagacaagacttagatgtttcgttcattcactcactcattcagttactcctaagacttttcagtttcataaggaagagtgttgcctgaggccctagggaatattggggaatagaagggattgaggaaacattaataatagttattcaaaagacccaaatgcttatacttctctctcccttcttctctctctgacacacacacacacacacacacacacacacacacacacgtgcacattcctcccttacatgctcatttgtgccttaaatgtgccttataggtaaatccaggatgactgaggaatccctcgtcactgggagattttgtatatattcttttattattagattgagttgggtgtggggaaaaatttttttctgaaggctcaaaagtggtttcctaaaagtgagccactatcagatttgcacatcaggagaaaagaaatagggttacgtccattaggaaaatcccagtttgcaggagtgcaatcacatcaaaaaaacaaccagccaggattaaaggtattataaatcctcatagcggaacatttctcagggcaaaggaacctggctcatttgaagattaatgttccatgcctttgtggtcaaagggtcagcacttaacacaggaaaaaactaggtgttgttttgttttgttattttggacaacataaaattcaggaatgttttatttagccttggtttctagaaggaagggaaataatatttcttgagcatttactagggtgttgcgtgctgtgctaagtaaattttaagtctttcagttttatagatacggaaaacaagggtgactctttaccacaggatgaataaagaactaagtaatatgggaaatgcagcaatttctggactagctgagccgattccttcctgtgagcacactgtaagctttcaagttctctgggcaggaattacagcacctgtcccctgcaatggccctgctgtgtgatgctcatcgcttcccttcgtgctggagcagtcccccaggtgtccatctcctatctttttgttccaatcttctgtgagttccagctagcaggctttacatctggggaaaggaaaaccaggggttttagctctgttctctgctcccatccttcgctcaccagctgagtgagaacatgaactttttgcaccatgtacccatggcttacactacttagaaaatcaccttttcagataaaacagtttatgagttcatagagaacaccagcactctttgacaaaactgtgagtgaccctttttaaacaatgctgagcaggccctgagctataatcaacggtgagctttaatgtctatgctgacagttaggttttgctctcttttgtaacaggttacgtagaccagcagtgtttaaatctaaatacgttgtgagtctgttatctgtcctatcgcgttttttaaatgactttttattctttatcatagctaagtaaataccaaaaaaaaaaaaaagctttgtaggacacttgtacttagtttgggaaaaaaaaataaattgaaattgttatgcttttgtatttccatttcttgcaaataaatattttttcttaaatagtaa

SEQ ID NO: 161 - DNA, 2586 bp, Homo sapiens
acagagccacagagggctgtgagcttgcccagccccaggtaacgctggcggtgggtgggcctccagcttggagcagagaccccccgaggcatctgcagacagaactggatggacccatgaatacggatttagctgctggaaagatggcttctgctgcctgctccatggaccccatcgacagctttgagctcctggatctcctgtttgaccggcaggacggcatcctgagacacgtggagctgggcgagggctggggtcacgtcaaggaccagcaggtcctgccaaaccccgactctgacgacttcctcagctccatcctgggctctggagactcactgcccagctccccactctggtcccccgaaggcagtgatagtggcatctccgaagacctcccctccgacccccaggacacccctccacgcagcggaccagccacctcccccgccggctgccatcctgcccagcctggcaaggggccctgcctctcctatcatcctggcaactcttgctccaccacaaccccagggccagtgatccaagtacctgaagcctctgtgaccatagacctggaaatgtggagcccaggaggaaggatctgtgctgagaagccggctgatccggtggacctgtccccacgatgcaatctcaccgtgaaagacctcctcctttcgggcagcagtggggacctgcaacagcatcacctgggggcctcctacctcctgcgacctggggctgggcactgtcaggagctggtgctcaccgaggatgagaagaagctgctggctaaagaaggcatcaccctgcccactcagctgcccctcactaagtacgaggagcgagtgctgaaaaaaatccgccggaaaatccggaacaagcagtcggcgcaagaaagcaggaagaagaagaaggaatatatcgatggcctggagactcggatgtcagcttgcactgctcagaatcaggagttacagaggaaagtcttgcatctcgagaagcaaaacctgtccctcttggagcaactgaagaaactccaggccattgtggtgcagtccaccagcaagtcagcccagacaggcacctgtgtcgcagtcctgttgctgtcctttgccctcatcatcctcccctccatcagcccttttggccccaacaaaaccgagagccctggggactttgcgcctgtacgagtgttctccagaactttgcacaacgatgctgcctcccgcgtggctgctgatgctgtgccaggctccgaggccccaggaccccgacccgaggctgacacaacccgagaagagtctccaggaagccccggggcagactggggcttccaggacaccgcgaacctgaccaattcgacggaggagctggacaacgccaccctggtcctgaggaatgcaacagaggggctgggccaggtcgccctgctggactgggtggcgcctgggccgagcactggctcaggacgtgcagggctggaggcggcgggagacgagctgtgagccccgccaggactatgctcccaggcccctctgcccaggggtgccttggggatgctgcactgggcagctacccacctggggatgggacgtgaggccaagaccccagcagagatgccagaatgggggaggcacagctcatagccacacacccagggcctgactgaggcccacgcaggaaccgacactcagacacaaggcaaagagggccacaggacccgggaaatacacacagagccaggagcagaagcaaagagcagacacacatacagcctgaaacagacctggacagacagacacagcctgaaacagacccggacagacagacacagcctgaaacagacccagacaaacagacagacagacacagcctgaaacagacccagacagacagacagacagcctgaaacagacccagacacagcctgaaacagatccggacagacagacagaaacagcctgaaacagacccagacagacagacagacacagcctgaaacagacccggacagacagacagacacagcctgaaacagacccggacagacagacagacacagcctgaaacagacccggacagacagacagacacagcctgaaacagacctagacagacagacacagattgaaacagacccagacaaacagacagacacagcctgaaacagacccagacacagcctgaaacagacccggacagacagacagacacagcctgaaacagacccagacagacagacagacacagcctgaaacagacccagacagacagaccgacgcagcctgaaagagacccagacagagagacaggcagacacagcctaaaacagacctggacagacaggcagacgtagtctgaaacagacctgaacagacagacagacgcacacacacaacagatgcgcagcaactccccgcccagggacccctcccggcctccctcgcacactgggaggaggaagccgccgagactgcagggagcctggccccggagccccgggtgcgccctggtctttggagcagccacggcccacaatcaccccccttttctaagactgcctgatccgaaataaagtattttgacaaa

SEQ ID NO: 162 - DNA, 1747 bp, Homo sapiens
ccatgatctccctcttgcaaaagcgagggctacagaacaggcattcaggagtcctgtgctccagtcacagccttttctgttcttcagctaggagacaccaaaccctcaggaagatttactatagctaagagaaaactgcagcagaaagggcgcggctacctacttcttaaattccgtttgtggaccctcagactcttagtcccctactcccagatacagcggccctaccgtggctcctggcaaggtggcatccacttttgtagtaagcatggatctcggaatccctgacctgctggacgcgtggctggagcccccagaggatatcttctcgacaggatccgtcctggagctgggactccactgcccccctccagaggttccggtaactaggctacaggaacagggactgcaaggctggaagtccggtggggaccgtggctgtggccttcaagagagtgagcctgaagatttcttgaagcttttcattgatcccaatgaggtgtactgctcagaagcatctcctggcagtgacagtggcatctctgaggacccctgccatccagacagtccccctgcccccagggcaaccagttctcctatgctctatgaggttgtctatgaggcaggggccctggagaggatgcagggggaaactgggccaaatgtaggccttatctccatccagctagatcagtggagcccagcatttatggtgcctgattcctgcatggtcagtgagctgccctttgatgctcatgcccacatcctgcccagagcaggcaccgtagccccagtgccctgtacaaccctgctgccctgtcaaaccctgttcctgaccgatgaggagaagcgtctgctggggcaggaaggggtttccctgccctctcacctgcccctcaccaaggcagaggagagggtcctcaagaaggtcaggaggaaaatccgtaacaagcagtcagctcaggacagtcggcggcggaagaaggagtacattgatgggctggagagcagggtggcagcctgttctgcacagaaccaagaattacagaaaaaagtccaggagctggagaggcacaacatctccttggtagctcagctccgccagctgcagacgctaattgctcaaacttccaacaaagctgcccagaccagcacttgtgttttgattcttcttttttccctggctctcatcatcctgcccagcttcagtccattccagagtcgaccagaagctgggtctgaggattaccagcctcacggagtgacttccagaaatatcctgacccacaaggacgtaacagaaaatctggagacccaagtggtagagtccagactgagggagccacctggagccaaggatgcaaatggctcaacaaggacactgcttgagaagatgggagggaagccaagacccagtgggcgcatccggtccgtgctgcatgcagatgagatgtgagctggaacagaccttcctggcccacttcctgatcacaaggaatcctgggcttccttatggctttgcttcccactgggattcctacttaggtgtctgccctcaggggtccaaatcacttcaggacaccccaagagatgtcctttagtctctgcctgaggcctagtctgcatttgtttgcatatatgagagggtacctcaaatacttctgttatgtatctgtgattttatttcttctttgggtatagggttgaggggaaataagttttgagtgagaaataaacgttttagctg

SEQ ID NO: 163 - DNA, 8213 bp, Homo sapiens
ttttagtggtggagtcaatttatttctgagacgatctcatttacctgaatgaggagctcatatttattttcaggatttatgaggaatccaagatgaatttggagcaggagaggccgtttgtctgcagtgccccaggctgctcccagcgcttcccaacagaggaccatctgatgattcataggcacaaacatgaaatgactttgaagtttccttcaataaaaacagacaatatgttatcagatcaaactccgaccccaacgagattcctgaagaactgcgaggaggtgggcctcttcagcgagctggactgctccctggagcacgagttcaggaaggctcaggaagaggagagcagcaagcggaatatctcgatgcataatgcagttggtggggccatgacggggcccggaactcaccagcttagcagcgctcggctgcccaaccatgacaccaacgttgtgattcagcaagccatgccgtcgcctcagtccagctctgtcatcactcaggcaccttccaccaaccgccagatcgggcctgtcccaggctctctatcttctctgctacatctccacaacagacagagacagcccatgccagcctccatgcctgggaccctgcccaaccctacaatgccaggatcttccgccgtcttgatgccaatggagcgacaaatgtcagtgaactccagcatcatggggatgcaaggtccaaatctcagcaacccctgtgcttctccccaggtccagccaatgcattcagaagccaaaatgaggttgaaggctgcattgactcaccaccctgctgccatgtcaaatgggaacatgaacaccatgggacacatgatggagatgatgggctcccggcaggaccagacgccacaccatcacatgcactcgcacccgcatcagcaccagacactgccaccccatcacccttacccacaccagcaccagcacccagcacaccatcctcaccctcaaccccatcaccagcagaaccatccacatcaccactcccattcccaccttcatgcacacccagcacatcaccagacctcgccacatccgcccctgcacaccggcaaccaagcacaggtttcaccagcaacacaacagatgcagccaacccagacaatacagccaccccagcccacaggggggcgccggcgaagggtggtagacgaggatccggacgagaggcggcggaaatttctggaacggaaccgggcagctgccacccgctgcagacagaagaggaaggtctgggtgatgtcattggaaaagaaagcagaagaactcacccagacaaacatgcagcttcagaatgaagtgtctatgttgaaaaatgaggtggcccagctgaaacagttgttgttaacacataaagactgcccaataacagccatgcagaaagaatcacaaggatatctaagtccagagagtagccctcctgctagtcctgtcccagcttgctcccagcaacaagtcatccagcataataccatcactacttcctcatcggtcagcgaggtggtaggaagctccaccctcagccagctcaccactcacagaacagacctgaatccgattctttaaaatgcaccatcagacctggcctccaagaagagctgtagcgtaccatgcgtcctttcttttaagggcatttttagaattaactcagacctggaagactcctcagttcttcaaagactggctttcatttttatagttattatggaaatgttgtcttttatacttagttatataagaaaaaagggagttatgcaattaatatctatcagcttgggaaacgctttggtgcttttctccagttttctggtaccagttacttgtttataaactgaaccttttctgtatatagccatggtttcattcttatcagtccaaccctttgcctgaaacattgaatcttgttaaaccacagcttttagctaaaatgaggtatacctagatgtcaagtaagacagatccaaggtaactgggtaggaaatcttttgacatcttaactcatgttgagtttgtgctgtggtgtcaccagaattccagataaacacacagcctttcccatacctttttttttcttactataaaatattataagatccattgatgtccaaataataccaccaagcatctcttcacctctcctcctcttggtccacttgctaatgcccagttttcttctccatttccactttttcttaggctccctatttactattcattttgacttccttctgttttatttttttccctttagcattgcatgtgaataagaaaataatgtttaaagaaaaaaaaaaaaaagcaaacctccaaaacgtggacctaaccattgcttcacttacacttcacccacagctggagttcattcaactcttgcttttcacaaaatagtaaccaggagatgtttaatgtgcctgatttaatgtttttaataatcacagcaaatgaaaggtggtttagttataagtgaagcatggttgaataccagctggggagacactagggaagggagctttgtaagccttgattgcgaaagtccaaattttgatgtggggctataacatgacacccttggattgcgactggttttatacggcctgcctataacgttgaaaatccatgtactacataataattcagaagggctctattcactacacagattacattgttcaatcatcagctgctaatagcctaagatttatttttttttttttcttaagcctatggaaccggctttgctgttctggggggtgaaaatagactaactactggagaaacaaagagagaaagaaaacccagtgtttccataggggcacttttagccttcccacaacagttaagcactctttgactgctgaaggaaccccatggatgaggtgcaggctacttcactctttttttttcttttttgagacagagtctcacctattgcccagactgaagtgcagtggtgcgatcatggatcactgcagcagcatcctccgagttcaagctatccttccacctccgcctcctgagtagctgggaccacaggttcacataaccatgcctggctaatttatttttacttttattttaaaataaaagatgaggtctgtcttatgttgcccaggctggtctcaaactatcctacttcttcctcccaaagtgttgggattataggtgtgagccactgcacccagcctacttcactcttctgaattattctgatttattttcaacaacttttgtgaacttgcccgtgatacaaagcagatagtccctgaaccacagtcgtgcctccttgaaacaagccattctactgtgctaatgttttaatatcacatctcacaaataacaggggtgaatgtttctctctagcaatctaggcaggtgctggtgtttcatctccatttgaatgcttgacctcttaatgtgtgtgtgtgtgtgtgtgtgtgtgtgtgtgttcatgggttttaaaagaacagtattttacaaaaggtgtagcttttataagagtgcagaaaagggaaggatgtgtttttttctctcactatagtataagaatctattttggagaaaaaaagaaaatatgagggtctcgaagcatgatttttatataactagtttcagttttatctaataacttactttttaaatcaatatttatcaacaatctttccttgtatgcagtgctttcaaaagatggttttgagtgtccagtgaaacttatgacttggatatatggttgaagaatcaaaacaaaagcaaaaaaaaaaagcaaaaaaagaaaagagaaaaaaagaaaaaatgcaaatggaataattttctattatattttagacaaacatatcattttcgagtattttaaatactgaattcatagttgttgttttttaaattccaacagtaacagctgaatggtttaatctgactggcttcctaagaaatgtttaagactcagctttaaaaagaagttaacattcatatctctgttttgaaatcaaaaatcatatttcaaaattctttcctaggaccatctatgtgtctcccctcccctccacaaaaaggagaaagagtgcattaaaatgtttagttgggttttttaatttttaatttttatgttatgttttgctttgttttaagtaaacaaaaatttttctttctttactgcatgcatagcacttaataaaatggatttttaaaaaatccactagtaatatcagaatgtccagggagtgactgtcactacaatgatggtttagtttacttctgttccaccttttgattgaaatatttagttgttaggctgaaagcctcggcagttaagaacttgcctgagttttcttcgttcagcaacttgacagtttgactgatgtgcattatatatagctcaattatgtctgttttttatgctaagtaggaaaaccaaccacacacattagcaaaccggcctcaacatataattagaataaactgtcttcttgttctactcagggcctttaggtgtgttcattcacggtatggaaatacagtaaatgaaagattccaactagttgtcagtgcttcttgaaattccaaacagaaagatacattggtcaaatccaacacttggcttatcaatattaagtcttttacctaaaggcccagccgtcaccagacaacagaataatcaatctgcctgaaaatccctcctccttgtcctacactttttgcctgtttgggagaatatctttgtactccattctcctccctcagccagttactgggtcacccatccatgtgttcatgaatcaatcatcacggcctgcagagcacctgtcctaaggagggaaaatcctgtcacactgcctctccccattcgtgtgtggttttcttgatcggtgagatctgtctctgaagtcactgccagcctccctgggaacgtctatagtgcctcccctgccttatgtgatgggagttaacaactcagataagtacacctgagagcatttctatcaggtaaactgtcacttaaatggaggtgtccacatcttaattgtttctccttgacacatttctcaatccacgaagccaggagaggtagagtgaaaatcccagccatggatgaatgtactaatttgaaagccaagtgttaagtcggatgttttcccgttacactactactcagccctctcctgcggccacatcaacggatgcaagtcacagtcttaacacagcctgtgggagacaagcagtttgtgtgctcacagtatatattatagtaattagggtgacttagagcaaatactcttcagatcctatgtagtcagtgaaacaaaatggagagcgtattctgatagaaggacgtcgacggtgaatgttctggtggttgttgcctgttaagtaaactttagtgtgtaagttgagtttgtcattaaaatcataaaccagctgcggtaacagacaagcctttggctggggagttttaagcctcggtaactgctataaaactagccatccagttaggatagaatgtgtttctttctggttaaaaaaaggaaaaaccatctaagaaaatatatatgtatgtatgtgtgtatacagtggaattcaaaggaccaaagcaaaatttgaacaggaatctattaatttagaattttataagatatttattaataaatgttatttttaaacattccatttgaacagtattctgtaggatctacttgtttttaaagtgttagtccataataaactactatagttatgtgtattttcatttttcagggtttcaaatggctattctccatcatttggtggaaatgtttgcttagatctctgtgcatagacatttcaaggatttttattgctctgtgagttattttttaatcaacattctgaacagttttttttaaacatttatttctgtgtgttcatttttaaagtaagctctttcatttaggaagcagagttcagctaaagggaatcagtaactctaactggaacagctttcttgtagaagtgtaaaaacagcttcatctctgcctctctccaccccaccccaatttcctagaaagccttgcactattcagctcccttagtgctttttgtcccttcccgaacaatatgcagtagctttaagccattcaagctccattatgcagtatatctgagaagggaaaggaaacaacccatttaaatttgaataaaaccgtgcctatgcgaacagtagcaatttagaatctcttttctgcttttaaaataatttatatttaaaaattgcactttagctttttgatccctttgtatttctcttattctctttctaacctcttctctgtcctcaaacttgcctttgctctcctttacaataccccccacccctcctccaaggctctgagcggcatcatttaaaatactttacagatatttgcaccaggtacatttatgtgcgtccattggtagcacagctgagacctgtgtctcacatcagcctaggtgaagcctactacaagaatgccaaggagaagagccagtacactatatggtttatactctttatccctttattcatagcatgttttttaaaaatgttatattatgcaacagatgtgaggcagcagctaagctatacttaagaattttctctcaccttccaaaccaaagtgtcctgaataagccaggagacttattcttttgtgcaccctggtgcacatctgactgttgtcctagccatagactctctgaggccactgaaagaacagtggccctatcgatttcattcctaggtctcaaaaatacaatgttgccttgtaacataattagggacagcacctctatttcacaattataatctaaggtaggataagacgacacagcagcaataaacttacaagtaaaattcaataccaaaacaaacacaaagaaatttaaaaaacaaaaaacctagctcatcatgttgtgaaaatgaaaaagtgaatgtccattcaaaatattttactatttcttgtggagtttttcagtgatgtaatgcttgtagccaaattgcttaaagagtgtttatatatttttttccttataaattgtctattttttaaaaaagctatttaaccacagctgaagtggggggtaaggccaaattgccaacacttgttaaaagattaatactcttaagtggcactctgatacctttccaacttgtcatcagaaaggaatcaataattaccaactgttgtatttagaccaacttacaatatctagctcattagaagccaggatctagaaagctccttctaagccatttaagatattcttacattgagcttcatattatagaactttataggattggatattttacaatagaataatttagcctcaggactgagaatgtggaagctgaataaattagctttaaatacatcattaaaatcttatgcacaataagctcattagattctagttttctcctttagaataccaatgccacagacactacaggagataatgaaaggtatcagttgtgttgagtggagggagtttaagagaaaggacccttcccaaccagcagccagtagaaaatacaacctactcacctttttcccttctaagttctgctaaatcacatctgcctcatagagaaaggaatgttgcctttgagaactgtcttggagaacagataagcttgaaatgttctctctagagaggacatagggtttgggatcctctgaaaaggcccagaaaaatagctcagttcaaatacaatgttctaggacaattggaatataaatattgtccaaaaatataattaaaagaaaaaagtttagcactgtgtaaagtaagtgttaactgaggaagtcccaaaaaggtgctgtcactttaagttctggacttggggttctttgtatttgtaaacagcaaagcatttgtgtttgtttgtctatttgtaaagcaaccaccttccttattggaaggagaaaaaaaggggtacatacatgtaaatacttgctgcagcatttaatatgtttaattttgtgttaagctttttgttgcatcgtgaacacatttattgttaccaatggacaatgagttcattaagactgttcaactaggtcagatttttacatctctttctagcaagaagagacaagattttgtgcatttgtacaaatgttaatatcactgcaattccaatataataaagcactcaaatgcaaataa

SEQ ID NO: 164 - DNA, 10197 bp, Homo sapiens
ctgcggggcgctgttgctgtggctgagatttggccgccgcctcccccacccggcctgcgccctccctctccctcggcgcccgcccgcccgctcgcggcccgcgctcgctcctctccctcgcagccggcagggcccccgacccccgtccgggccctcgccggcccggccgcccgtgcccggggctgttttcgcgagcaggtgaaaatggctgagaacttgctggacggaccgcccaaccccaaaagagccaaactcagctcgcccggtttctcggcgaatgacagcacagattttggatcattgtttgacttggaaaatgatcttcctgatgagctgatacccaatggaggagaattaggccttttaaacagtgggaaccttgttccagatgctgcttccaaacataaacaactgtcggagcttctacgaggaggcagcggctctagtatcaacccaggaataggaaatgtgagcgccagcagccccgtgcagcagggcctgggtggccaggctcaagggcagccgaacagtgctaacatggccagcctcagtgccatgggcaagagccctctgagccagggagattcttcagcccccagcctgcctaaacaggcagccagcacctctgggcccacccccgctgcctcccaagcactgaatccgcaagcacaaaagcaagtggggctggcgactagcagccctgccacgtcacagactggacctggtatctgcatgaatgctaactttaaccagacccacccaggcctcctcaatagtaactctggccatagcttaattaatcaggcttcacaagggcaggcgcaagtcatgaatggatctcttggggctgctggcagaggaaggggagctggaatgccgtaccctactccagccatgcagggcgcctcgagcagcgtgctggctgagaccctaacgcaggtttccccgcaaatgactggtcacgcgggactgaacaccgcacaggcaggaggcatggccaagatgggaataactgggaacacaagtccatttggacagccctttagtcaagctggagggcagccaatgggagccactggagtgaacccccagttagccagcaaacagagcatggtcaacagtttgcccaccttccctacagatatcaagaatacttcagtcaccaacgtgccaaatatgtctcagatgcaaacatcagtgggaattgtacccacacaagcaattgcaacaggccccactgcagatcctgaaaaacgcaaactgatacagcagcagctggttctactgcttcatgctcataagtgtcagagacgagagcaagcaaacggagaggttcgggcctgctcgctcccgcattgtcgaaccatgaaaaacgttttgaatcacatgacgcattgtcaggctgggaaagcctgccaagttgcccattgtgcatcttcacgacaaatcatctctcattggaagaactgcacacgacatgactgtcctgtttgcctccctttgaaaaatgccagtgacaagcgaaaccaacaaaccatcctggggtctccagctagtggaattcaaaacacaattggttctgttggcacagggcaacagaatgccacttctttaagtaacccaaatcccatagaccccagctccatgcagcgagcctatgctgctctcggactcccctacatgaaccagccccagacgcagctgcagcctcaggttcctggccagcaaccagcacagcctcaaacccaccagcagatgaggactctcaaccccctgggaaataatccaatgaacattccagcaggaggaataacaacagatcagcagcccccaaacttgatttcagaatcagctcttccgacttccctgggggccacaaacccactgatgaacgatggctccaactctggtaacattggaaccctcagcactataccaacagcagctcctccttctagcaccggtgtaaggaaaggctggcacgaacatgtcactcaggacctgcggagccatctagtgcataaactcgtccaagccatcttcccaacacctgatcccgcagctctaaaggatcgccgcatggaaaacctggtagcctatgctaagaaagtggaaggggacatgtacgagtctgccaacagcagggatgaatattatcacttattagcagagaaaatctacaagatacaaaaagaactagaagaaaaacggaggtcgcgtttacataaacaaggcatcttggggaaccagccagccttaccagccccgggggctcagccccctgtgattccacaggcacaacctgtgagacctccaaatggacccctgtccctgccagtgaatcgcatgcaagtttctcaagggatgaattcatttaaccccatgtccttggggaacgtccagttgccacaagcacccatgggacctcgtgcagcctccccaatgaaccactctgtccagatgaacagcatgggctcagtgccagggatggccatttctccttcccgaatgcctcagcctccgaacatgatgggtgcacacaccaacaacatgatggcccaggcgcccgctcagagccagtttctgccacagaaccagttcccgtcatccagcggggcgatgagtgtgggcatggggcagccgccagcccaaacaggcgtgtcacagggacaggtgcctggtgctgctcttcctaaccctctcaacatgctggggcctcaggccagccagctaccttgccctccagtgacacagtcaccactgcacccaacaccgcctcctgcttccacggctgctggcatgccatctctccagcacacgacaccacctgggatgactcctccccagccagcagctcccactcagccatcaactcctgtgtcgtcttccgggcagactcccaccccgactcctggctcagtgcccagtgctacccaaacccagagcacccctacagtccaggcagcagcccaggcccaggtgaccccgcagcctcaaaccccagttcagcccccgtctgtggctacccctcagtcatcgcagcaacagccgacgcctgtgcacgcccagcctcctggcacaccgctttcccaggcagcagccagcattgataacagagtccctaccccctcctcggtggccagcgcagaaaccaattcccagcagccaggacctgacgtacctgtgctggaaatgaagacggagacccaagcagaggacactgagcccgatcctggtgaatccaaaggggagcccaggtctgagatgatggaggaggatttgcaaggagcttcccaagttaaagaagaaacagacatagcagagcagaaatcagaaccaatggaagtggatgaaaagaaacctgaagtgaaagtagaagttaaagaggaagaagagagtagcagtaacggcacagcctctcagtcaacatctccttcgcagccgcgcaaaaaaatctttaaaccagaggagttacgccaggccctcatgccaaccctagaagcactgtatcgacaggacccagagtcattacctttccggcagcctgtagatccccagctcctcggaattccagactattttgacatcgtaaagaatcccatggacctctccaccatcaagcggaagctggacacagggcaataccaagagccctggcagtacgtggacgacgtctggctcatgttcaacaatgcctggctctataatcgcaagacatcccgagtctataagttttgcagtaagcttgcagaggtctttgagcaggaaattgaccctgtcatgcagtcccttggatattgctgtggacgcaagtatgagttttccccacagactttgtgctgctatgggaagcagctgtgtaccattcctcgcgatgctgcctactacagctatcagaataggtatcatttctgtgagaagtgtttcacagagatccagggcgagaatgtgaccctgggtgacgacccttcacagccccagacgacaatttcaaaggatcagtttgaaaagaagaaaaatgataccttagaccccgaacctttcgttgattgcaaggagtgtggccggaagatgcatcagatttgcgttctgcactatgacatcatttggccttcaggttttgtgtgcgacaactgcttgaagaaaactggcagacctcgaaaagaaaacaaattcagtgctaagaggctgcagaccacaagactgggaaaccacttggaagaccgagtgaacaaatttttgcggcgccagaatcaccctgaagccggggaggtttttgtccgagtggtggccagctcagacaagacggtggaggtcaagcccgggatgaagtcacggtttgtggattctggggaaatgtctgaatctttcccatatcgaaccaaagctctgtttgcttttgaggaaattgacggcgtggatgtctgcttttttggaatgcacgtccaagaatacggctctgattgcccccctccaaacacgaggcgtgtgtacatttcttatctggatagtattcatttcttccggccacgttgcctccgcacagccgtttaccatgagatccttattggatatttagagtatgtgaagaaattagggtatgtgacagggcacatctgggcctgtcctccaagtgaaggagatgattacatcttccattgccacccacctgatcaaaaaatacccaagccaaaacgactgcaggagtggtacaaaaagatgctggacaaggcgtttgcagagcggatcatccatgactacaaggatattttcaaacaagcaactgaagacaggctcaccagtgccaaggaactgccctattttgaaggtgatttctggcccaatgtgttagaagagagcattaaggaactagaacaagaagaagaggagaggaaaaaggaagagagcactgcagccagtgaaaccactgagggcagtcagggcgacagcaagaatgccaagaagaagaacaacaagaaaaccaacaagaacaaaagcagcatcagccgcgccaacaagaagaagcccagcatgcccaacgtgtccaatgacctgtcccagaagctgtatgccaccatggagaagcacaaggaggtcttcttcgtgatccacctgcacgctgggcctgtcatcaacaccctgccccccatcgtcgaccccgaccccctgctcagctgtgacctcatggatgggcgcgacgccttcctcaccctcgccagagacaagcactgggagttctcctccttgcgccgctccaagtggtccacgctctgcatgctggtggagctgcacacccagggccaggaccgctttgtctacacctgcaacgagtgcaagcaccacgtggagacgcgctggcactgcactgtgtgcgaggactacgacctctgcatcaactgctataacacgaagagccatgcccataagatggtgaagtgggggctgggcctggatgacgagggcagcagccagggcgagccacagtcaaagagcccccaggagtcacgccggctgagcatccagcgctgcatccagtcgctggtgcacgcgtgccagtgccgcaacgccaactgctcgctgccatcctgccagaagatgaagcgggtggtgcagcacaccaagggctgcaaacgcaagaccaacgggggctgcccggtgtgcaagcagctcatcgccctctgctgctaccacgccaagcactgccaagaaaacaaatgccccgtgcccttctgcctcaacatcaaacacaagctccgccagcagcagatccagcaccgcctgcagcaggcccagctcatgcgccggcggatggccaccatgaacacccgcaacgtgcctcagcagagtctgccttctcctacctcagcaccgcccgggacccccacacagcagcccagcacaccccagacgccgcagccccctgcccagccccaaccctcacccgtgagcatgtcaccagctggcttccccagcgtggcccggactcagccccccaccacggtgtccacagggaagcctaccagccaggtgccggcccccccacccccggcccagccccctcctgcagcggtggaagcggctcggcagatcgagcgtgaggcccagcagcagcagcacctgtaccgggtgaacatcaacaacagcatgcccccaggacgcacgggcatggggaccccggggagccagatggcccccgtgagcctgaatgtgccccgacccaaccaggtgagcgggcccgtcatgcccagcatgcctcccgggcagtggcagcaggcgccccttccccagcagcagcccatgccaggcttgcccaggcctgtgatatccatgcaggcccaggcggccgtggctgggccccggatgcccagcgtgcagccacccaggagcatctcacccagcgctctgcaagacctgctgcggaccctgaagtcgcccagctcccctcagcagcaacagcaggtgctgaacattctcaaatcaaacccgcagctaatggcagctttcatcaaacagcgcacagccaagtacgtggccaatcagcccggcatgcagccccagcctggcctccagtcccagcccggcatgcaaccccagcctggcatgcaccagcagcccagcctgcagaacctgaatgccatgcaggctggcgtgccgcggcccggtgtgcctccacagcagcaggcgatgggaggcctgaacccccagggccaggccttgaacatcatgaacccaggacacaaccccaacatggcgagtatgaatccacagtaccgagaaatgttacggaggcagctgctgcagcagcagcagcaacagcagcagcaacaacagcagcaacagcagcagcagcaagggagtgccggcatggctgggggcatggcggggcacggccagttccagcagcctcaaggacccggaggctacccaccggccatgcagcagcagcagcgcatgcagcagcatctccccctccagggcagctccatgggccagatggcggctcagatgggacagcttggccagatggggcagccggggctgggggcagacagcacccccaacatccagcaagccctgcagcagcggattctgcagcaacagcagatgaagcagcagattgggtccccaggccagccgaaccccatgagcccccagcaacacatgctctcaggacagccacaggcctcgcatctccctggccagcagatcgccacgtcccttagtaaccaggtgcggtctccagcccctgtccagtctccacggccccagtcccagcctccacattccagcccgtcaccacggatacagccccagccttcgccacaccacgtctcaccccagactggttccccccaccccggactcgcagtcaccatggccagctccatagatcagggacacttggggaaccccgaacagagtgcaatgctcccccagctgaacacccccagcaggagtgcgctgtccagcgaactgtccctggtcggggacaccacgggggacacgctagagaagtttgtggagggcttgtagcattgtgagagcatcaccttttccctttcatgttcttggaccttttgtactgaaaatccaggcatctaggttctttttattcctagatggaactgcgacttccgagccatggaagggtggattgatgtttaaagaaacaatacaaagaatatatttttttgttaaaaaccagttgatttaaatatctggtctctctctttggtttttttttggcgggggggtggggggggttcttttttttccgttttgtttttgtttggggggaggggggttttgtttggattctttttgtcgtcattgctggtgactcatgcctttttttaacgggaaaaacaagttcattatattcatattttttatttgtattttcaagactttaaacatttatgtttaaaagtaagaagaaaaataatattcagaactgattcctgaaataatgcaagcttataatgtatcccgataactttgtgatgtttcgggaagatttttttctatagtgaactctgtgggcgtctcccagtattaccctggatgataggaattgactccggcgtgcacacacgtacacacccacacacatctatctatacataatggctgaagccaaacttgtcttgcagatgtagaaattgttgctttgtttctctgataaaactggttttagacaaaaaatagggatgatcactcttagaccatgctaatgttactagagaagaagccttcttttctttcttctatgtgaaacttgaaatgaggaaaagcaattctagtgtaaatcatgcaagcgctctaattcctataaatacgaaactcgagaagattcaatcactgtatagaatggtaaaataccaactcatttcttatatcatattgttaaataaactgtgtgcaacagacaaaaagggtggtccttcttgaattcatgtacatggtattaacacttagtgttcggggttttttgttatgaaaatgctgttttcaacattgtatttggactatgcatgtgttttttccccattgtatataaagtaccgcttaaaattgatataaattactgaggtttttaacatgtattctgttctttaagatccctgtaagaatgtttaaggtttttatttatttatatatattttttgagtctgttctttgtaagacatggttctggttgttcgctcatagcggagaggctggggctgcggttgtggttgtggcggcgtgggtggtggctgggaactgtggcccaggcttagcggccgcccggaggcttttcttcccggagactgaggtgggcgactgaggtgggcggctcagcgttggccccacacattcgaggctcacaggtgattgtcgctcacacagttagggtcgtcagttggtctgaaactgcatttggcccactcctccatcctccctgtccgtcgtagctgccacccccagaggcggcgcttcttcccgtgttcaggcggctccccccccccgtacacgactcccagaatctgaggcagagagtgctccaggctcgcgaggtgctttctgacttccccccaaatcctgccgctgccgcgcagcatgtcccgtgtggcgtttgaggaaatgctgagggacagacaccttggagcaccagctccggtccctgttacagtgagaaaggtcccccacttcgggggatacttgcacttagccacatggtcctgcctcccttggagtccagttccaggctcccttactgagtgggtgagacaagttcacaaaaaccgtaaaactgagaggaggaccatgggcaggggagctgaagttcatcccctaagtctaccacccccagcacccagagaacccactttatccctagtcccccaacaaaggctggtctaggtgggggtgatggtaattttagaaatcacgccccaaatagcttccgtttgggcccttacattcacagataggttttaaatagctgaatacttggtttgggaatctgaattcgaggaacctttctaagaagttggaaaggtccgatctagttttagcacagagctttgaaccttgagttataaaatgcagaataattcaagtaaaaataagaccaccatctggcacccctgaccagcccccattcaccccatcccaggaggggaagcacaggccgggcctccggtggagattgctgccactgctcggcctgctgggttcttaacctccagtgtcctcttcatcttttccacccgtagggaaaccttgagccatgtgttcaaacaagaagtggggctagagcccgagagcagcagctctaagcccacactcagaaagtggcgccctcctggttgtgcagccttttaatgtgggcagtggaggggcctctgtttcaggttatcctggaattcaaaacgttatgtaccaacctcatcctctttggagtctgcatcctgtgcaaccgtcttgggcaatccagatgtcgaaggatgtgaccgagagcatggtctgtggatgctaaccctaagtttgtcgtaaggaaatttctgtaagaaacctggaaagccccaacgctgtgtctcatgctgtatacttaagaggagaagaaaaagtcctatatttgtgatcaaaaagaggaaacttgaaatgtgatggtgtttataataaaagatggtaaaactacttggattcaaa

SEQ ID NO: 165 - DNA, 2622 bp, Homo sapiens
aaccgtctcctggttggggggtgggggggaaagatggcggagctgatgctgctcagcgagattgctgacccgacgcgtttcttcaccgacaacctgcttagcccggaggactggggtctgcagaacagcaccttgtattctggcctagatgaagtggccgaggagcagacgcagctcttccgttgcccggagcaggatgtcccgtttgacggcagctccctggacgtggggatggatgtcagcccctctgagcccccatgggaactcctgccgatcttcccagatcttcaggtgaagtctgagccatcttccccctgctcttcctcctccctcagctccgagtcatcgcgtctctccacagagccatccagcgaggctcttggggtaggggaggtgctccatgtgaagacagagtccttggcacccccactgtgtctcctgggagatgacccaacatcctcatttgaaaccgtccagatcaacgttatccccacctctgatgattcctcagatgtccagaccaagatagaacctgtctctccatgttcttccgtcaactctgaggcctccctgctctcagccgactcctccagccaggcttttataggagaggaggtcctggaagtgaagacagagtccctgtccccttcaggatgcctcctgtgggatgtcccagccccctcacttggagctgtccagatcagcatgggcccatcccttgatggctcctcaggcaaagccctgcccacccggaagccgccactgcagcccaaacctgtagtgctaaccactgtcccaatgccatccagagctgtgcctcccagcaccacagtccttctgcagtccctcgtccagccacccccagtgtccccagttgtcctcatccagggtgctattcgagtccagcctgaagggccggctccctctctaccacggcctgagaggaagagcatcgttcccgctcctatgcctggaaactcctgcccgcctgaagtggatgcaaagctgctgaagcggcagcagcgaatgatcaagaaccgggagtcagcctgccagtcccggagaaagaagaaagagtatctgcagggactggaggctcggctgcaagcagtactggctgacaaccagcagctccgccgagagaatgctgccctccggcggcggctggaggccctgctggctgaaaacagcgagctcaagttagggtctggaaacaggaaggtggtctgcatcatggtcttccttctcttcattgccttcaactttggacctgtcagcatcagtgagcctccttcagctcccatctctcctcggatgaacaagggggagcctcaaccccggagacacttgctggggttctcagagcaagagccagttcagggagttgaacctctccaggggtcctcccagggccctaaggagccccagcccagccccacagaccagcccagtttcagcaacctgacagccttccctgggggcgccaaggagctactactaagagacctagaccagctcttcctctcctctgattgccggcacttcaaccgcactgagtccctgaggcttgctgacgagttgagtggctgggtccagcgccaccagagaggccggaggaagatccctcagagggcccaggagagacagaagtctcagccacggaagaagtcacctccagttaaggcagtccccatccaaccccctggacccccagaaagggattctgtgggccagctgcaactatatcgccacccagaccgttcgcagccagcattcttggatgcaattgaccgacgggaagacacattttatgttgtctctttccgaagggaccacctgctgctcccagccatcagccacaacaagacctcccggcccaagatgtccctggtgatgcctgccatggcccccaatgagaccctgtcaggccgtggggccccgggggactatgaggagatgatgcagatcgagtgtgaggtcatggacaccagggtgattcacatcaagacctccacagtgcccccctcgctccgaaaacagccatccccaaccccaggcaatgccacaggtggccccttgccagtctctgcagccagccaggcccaccaggcctcccaccagcccctctacctcaatcatccctgacctctgccattcacactgacttagaacggggggagggggtaccaggtggccaggtgggactgtttcaaatttccctgatccccaggcttggggcaattggtaaaggaaagagcaggtgtgggggttaagcacttatttgaggtgggggtgttcacctctcttctcatcccttttcagaatatagggctcctctcattcctgtgaacccccagtcctggcttctttgtttgaggggattgtgtgaggttcagttgtggggtgggtggtgagctgctgcatattttttattttgtttctctagtgttatggcagtggaggtgggaatttagtccccaggtgggacaagggaagttttttcattttggagctagttactgggagtaagggagggtggggtgggggggagttcaggtttatgtgtgtgcatttcttttttattattattaaataaacaacttggagggagttgaaaaaaaa

SEQ ID NO: 166 - DNA, 3748 bp, Homo sapiens
cgtctgtaaacacccagagactgtcatggagggggaggaggaggcggcggcggcgaagggaggcgtttggggccgcctccagggtccgctctgccattcctgaactggtccctcgtccccgtgactctggcatcagggaagcgaactgttaggcgagaggaggaggcagccagaaccatatccccttcttcctcggggcgggggccgggccaggccggctgagccgggggagggctccgggagggagtgcctggccaggccggcctgtctgccgcgatggatgacagtaaggtggttggaggcaaagtaaagaagcccggtaaacgtggtcggaagccagccaaaattgacttgaaagcaaaacttgagaggagccggcagagtgcaagagaatgccgagcccgaaaaaagctgagatatcagtatttggaagagttggtatccagtcgagaaagagctatatgtgccctcagagaggaactggaaatgtacaagcagtggtgcatggcaatggaccaaggaaaaatcccttctgaaataaaggccctactcactggagaagagcagaacaaatctcagcagaactcaagcaggcataccaaggctgggaagacagatgctaatagcaattcctggtgaagattatataaagatgagtcagtgattgaagccaatattctgattcccatggaagatggatgggcaagagtgtacttcttggctccatttactacctactgctcagtagtcatctctgtaaatctgcaatttctaccaaaatgtgtgatcgtagatctcaaaggatcttgctttaactttcaacacttagaaaatctacaaacattcagacctgtctgggttggtattgccacccatgacatttaacatgttgtgatgcttgaaaacacaggagtagagaaaatcgatgaagattgtatttttgcaccttaactccacattgctttattggttaatttatattctttccatgtaattcatgtaattgtatgtctgtgtgtgttttatgtgtcaccacctttcatgtttttgattgccctacaaagagaaaccaaatgagctgattactgactataagttctcagcctttatggacctaatcttatttttatttacttgagtaatgtttattctctgcatgaaccatgatttctcctgtgagccattccagcataagctgtgaatatgtattaacaaatatatacatttctatttttataatccataaggatatgcctgttttaaataacatacatattaacaatatctatcaggaaaaccctcaagacagcttctagttaaaacctttgttgctgtcctctcaaactatatttataaaaatttgctagggccaaatccatacttgcagaataattcatcaaattttatttttaagtgaaaagtaacctttcaggcatttcagcagcatacattgacaatctagggtatatatgtatgtatgtttcttattgtatgtctatatatgtatgtggggaggacaggagtgaatgttcacacacttttcttgcgtactcaactaaattggagaatgtttctgaagaaaattggatgaaattagctgctgagattgagtttctgccttaaaatctgaaacaaaaaaagggacaaattgctggtagatctactgactgtagccatcaccagaacacttagtttcttcccagacatgaatttcctgacaggctctgagccagaaacacactgtgggcgtgcatctggttcagccctggatatgcctccactgtggagggaagcattggaactggagttgtgcacagcaccgcagctagtgggcctggctgggggtgcagaagggcagggtagttctttccatttccccttgcagctacacttactttctccctgactaccaaatggagtgacggttgaagaatcaagctcataatatgatacacccagacagacccagaaatcttttgatttccccagcgagatacttaccactctctcttctctttcccatggttaaaacaggagttgtgttctctgtcgctgctaaattattcttcacttgagtgaagcaaatatttagcttccaaataaagtatattttgttctgaactggcagtttaagaggagataccgtagtctagattgtctttgaggtagaatatatgatggaccacatagtttaagattacaaggtactttccctcttctctcaggccatgcatttgaataaagtgcctcccttagcctgagctcctaaagacctcttgtacttggttgcaaactcagatctctagtctagtctagtctagtctagtctagtcatgtgtgactgtgtactgagataccactagcccagtttgctgggtctctatgttttggaagttgggggtttaataatatttaatgtctttttaggatcataaacataaataggtttgttgatattcaggccttcagaatttaagggttttaaatatagcattcagattgtaattggtatgtttttgccatctggtccactcaattgtatatttttattttgcaaaacaacccaaaacttactttatgttgctttgttcagtaccttttgaattcccccagaagagttgttttcaaaacaaacattccagaatgaatgtcgctcttcaatggaacgtctttattgtgcttgaagtatttcttctctggttgtaattctaaattacagagtcatttgagctttctcccctcccgctagtatctttacaggagcagggaagagcagtagaggatgtataattttgggcgaagttaaattacaatttatttgaggttattcctaaacctatttatttggtgttttggaggagatcacacactaagagaacgttgattgcctcggctattgtgctggctggacactttggtcacttttgaagcatgttaataaatgtcactgattaaaacagctggagcatttccttccctttccagtgaaggagcagcatagtgaaatcctggcacccctcacctttttgtgatgacaagatggctgacagtcacggagtccaggagaaggtgctgctctccttgctttctgagtaaacagagtaatgttttttttcttattttcccaaagaaagaaaagggggaaaatatatttgtatgtttagaccagccaaattctgtcattattttagtatcaacctgctgtatattagagcaactgaatataatatggaataagtttgaccaggtcaagttttaggatatagttgaatttctttaaaaagttttctattttatctaaaatctttctattatatctaaattagaatgatcatcctgcgcaaattcagattactgtttgctggctaattgacagtatttctcagcatcactatgtagcattctgttttagcatctttgaattatgatcatttgatttggctaattacaaaaagtacaggtttaaactggacttaccttgagttaaaggcaaagaaaatctaaaaacataaatgttatatttcacaagaaatcagttgcatattatccattacatatttagttttaaaaggaggagtcaccttgaattattttctgagtcaccttgagttatttgatctctcagcctgctttctcatctgtaaaaaaggggggaggataactttcacagggtaattggtaggctaaataggagttacagaaaactgttaaatagggaagaactacattaaatttaaatattcacatt

SEQ ID NO: 167 - DNA, 2048 bp, Homo sapiens
ggcggggcctgggcgcgccgagctccggctgggtccctgcaggtcttggggcccgggactcttcctggagacaccgccatggccgggctatcccgcgggtccgcgcgcgcactgctcgccgccctgctggcgtcgacgctgttggcgctgctcgtgtcgcccgcgcggggtcgcggcggccgggaccacggggactgggacgaggcctcccggctgccgccgctaccaccccgcgaggacgcggcgcgcgtggcccgcttcgtgacgcacgtctccgactggggcgctctggccaccatctccacgctggaggcggtgcgcggccggcccttcgccgacgtcctctcgctcagcgacgggcccccgggcgcgggcagcggcgtgccctatttctacctgagcccgctgcagctctccgtgagcaacctgcaggagaatccatatgctacactgaccatgactttggcacagaccaacttctgcaagaaacatggatttgatccacaaagtcccctttgtgttcacataatgctgtcaggaactgtgaccaaggtgaatgaaacagaaatggatattgcaaagcattcgttattcattcgacaccctgagatgaaaacctggccttccagccataattggttctttgctaagttgaatataaccaatatctgggtcctggactactttggtggaccaaaaatcgtgacaccagaagaatattataatgtcacagttcagtgaagcagactgtggtgaatttagcaacacttatgaagtttcttaaagtggctcatacacacttaaaaggcttaatgtttctctggaaagcgtcccagaatattagccagttttctgtcacatgctggtttgtttgcttgcttgtttacttgcttgtttaccaatagagttgacctgttattggatttcctggaagatgtggtagctacttttttcctattttgaagccattttcgtagagaaatatccttcactataatcaaataagttttgtcccatcaattccaaagatgtttccagtggtgctcttgaagaggaatgagtaccagttttaaattgcccattggcatttgaaggtagttgagtatgtgttctttattcctagaagccactgtgcttggtagagtgcatcactcaccacagctgcctcctgagctgcctgagcctggtgcaaaaggattggcccccattatggtgcttctgaataaatcttgccaagatagacaaacaatgatgaaactcagatggagcttcctactcacgttgatttatgtctcacaatcctgggtattgttaattcaacatagggtgaaactatttctgataaagaacttttgaaaaactttttatactctaaagtgatactcagaacaaaagaaagtcataaaactcctgaatttaatttccccacctaagtcgaaacagtattatcaaaacacatgtgcacacagattattttttggctccaaaactggattgcaaaagaaagaggagaagaatattttgtgtgttcctggtattcttttataagtaaagtttacccaggcatggaccagcttcagccagggacaaaatcccctcccaaaccactctccacagctttttaaaaatacttctactcttaacaattacctaaggcttcctcaactgccccaaatctcttaatagcttctagtgctgctacaatctaagtcaggtcaccagagggaagagaacatggcattaaaagaatcacatcttcagaagagaagacactaatattattacccatatacatgatttcagaagatgacataagattcctcttaaagaggaaatgtcaggaatcaagccactgaatccttaaagagaaaagttgaatatgagtcattgtgtctgaaaactgcaaagtgaacttaactgagatccagcaaacaggttctgtttaagaaaaataatttatactaaatttagtaaaatggacttcttattcaaagcatcaataattaaaagaattattttaatgaaaaaaaaaaaaaaaaaaaaaaaaa

SEQ ID NO: 168 - DNA, 1308 bp, Homo sapiens
gctggcggccggcagggggcggagttcgagcctggatttttttcctcggggcctcccccgggaggccgtcccggcgtgggggaggggaggacggggcgggaggacgcggttcggtcggctgcagcgctacttttggtccggggtcggcagggaggccgcggctaccgcatcacagctgacgtgaggactacgtggggccgctgccggctccgggttgctgggcggcggcgccgctgctgagcggcggtcgggctcgccgtctccacctcctcgcgtccgtaatcagtgacgaggtccgctacgtaaatccctttgcggcggacaaatgaccatggaaacagttgaatcccagcatgatggaagtataacagcttctttgacagagagcaagtctgctcatgtgcagactcagactggccaaaattcaatccctgctttagctcaggtagcagcaattgcagagacagatgaatctgcagaatcagaaggtgtaattgattctcataaacgtagagaaatcctttcacgaagaccctcttataggaaaatactgaatgaactgtcctctgatgtgcctggtgttcccaagattgaagaagagagatcagaggaagaaggaacaccacctagtattgctaccatggcagtaccaactagcatatatcagactagcacggggcaatacagtatgtatgctgcaattcgatatgatacagtgctagctttaagtcttctctagttatattgaagcaactcaggttttggcattaaattgttccattttaaaatgcatcattaatacctaaactgtatcatagaatgaaagtatatgttaaaaagtgagatctttgtattgacagctgtcatataattttgaaaagtaaaaattttgactgccgaatatagaagaaaattttggggtaaaaaggagaatttttcctatttacatgtttatattaatctctagtaaaacattgtttttgttgtctttatgatgcatgcgaacataaatgtctgtatttcattcttgttggcttttgttacccacaattacatactattcttactaatctgagagttttctaaagtatgttttcaatgtttcactactctctactctgttaatttgtgctacagtttttcctaaaagagaatggaaaaatgatttaattttttaaactgtagcaattggatagataattttatttgaaattttacacactgaaagctctaaataaacagatacattcacattcaaaaaaaaaaaaaaaaaaaaaaaaaaaaaaaaaaaaaaaaaaaaaaaaaaaa

SEQ ID NO: 169 - DNA, 480 bp, Homo sapiens
agcgctgggctaggggcgcggcttgaactcgcctaaagagctgcgccctctcatctcgcgcctgcagcccgtgccgccccagccgctgccgcctgcaccggacccggagccgtcatgcccaagtgtcccaagtgcaacaaggaggtgtacttcgccgagagggtgacctctctgggcaaggactggcatcggccctgcctgaagtgcgagaaatgtgggaagacgctgacctctgggggccacgctgagcacgaaggcaaaccctactgcaaccacccctgctacgcagccatgtttgggcctaaaggctttgggcggggcggagccgagagccacactttcaagtaaaccaggtggtggagaccccatccttggctgcttgcagggccactgtccaggcaaatgccaggccttgtccccagatgcccagggctcccttgttgcccctaatgctctcagtaaacctgaacacttggaaaa

SEQ ID NO: 170 - DNA, 1236 bp, Homo sapiens
gctgggcgcgggcggcggcggcccggaggagaacgggcggagggcgcgggccgaccgggcgcaccgaccatggcctccaaatgccccaagtgcgacaagaccgtgtacttcgccgagaaggtgagctccctggggaaggactggcacaagttctgcctcaagtgcgagcgctgcagcaagacgctgacgcccgggggccacgccgagcatgacgggaagccgttctgccacaagccgtgctacgccaccctgttcggacccaaaggcgtgaacatcgggggcgcgggctcctacatctacgagaagcccctggcggaggggccgcaggtcaccggccccatcgaggtccccgcggcccgagcagaggagcggaaggcgagcggccccccgaaggggcccagcagagcctccagtgtcaccactttcaccggggagcccaacacgtgcccgcgctgcagcaagaaggtgtacttcgctgagaaggtgacgtctctgggcaaggattggcaccggccctgcctgcgctgcgagcgctgcgggaagacactgacccccggcgggcacgcggagcacgacggccagccctactgccacaagccctgctatggaatcctcttcggacccaagggagtgaacaccggtgcggtgggcagctacatctatgaccgggaccccgaaggcaaggtccagccctaggctacagcggctctcatgatgtgggctcacctgcgccccagaccctgcaggggcccccctgcttggctctgctgggagagtgctcagccgcccagtcctgcctgcaagcccagggcgagtattggaggaggggcagccacgggcagagcaccatgcccatccccgagtctctggtgtgtctgccccctctggcatcctctgggcgtcccatgatcccttctgtgtctgcgtgtccgaatccccgtgtgaccctgtcccagcattttcccgccgaccctgcgtgtccccgtggcgctgtccgctctccctctcctgctgcccacccacctgccagtgttatttatgctcccttcgtgggtgatggccacgccctcaccatgtccctggcagagggcttccctccgggatcccctgcctggtgcccacactgcctcgcaagcgctcgccaccctcacgtggctcacctgctgttgagccttgtgctgtcaataaacggtttgaggattgcagaaaaaaaaaaaaaaaaaaaaaaaaaaaaaa

SEQ ID NO: 171 - DNA, 879 bp, Homo sapiens
ctcctcacagaagcctggagctgggcatccaagaagaagcagcctcatttgttttctggtgtcatcgtaggtggccacctatggcttttgggaatgtaaaaagggcagctctctggcatgttcctgactgaggatctcataacatttaacttgaggaacttcctccttttccagctttgggagtcaagcttctcacctggggcgggtgggttctgcaccaccctcccaccctccttcctccgtgtggacgatagagccacatccagcaccacggacagctcccgggcgccttcatctcctcgtcctccaggcagcacaagccattgtggaatctccaccaggtgtacagaacggtgcctctgcgtcctgccactcaggacctctcaagtccccgatgtgatggctcctcagcatgatcaggagaaattccatgatcttgcttattcctgtcttgggaagtccttctccatgtctaaccaagatctatatggctatagcaccagctctttggctcttggcttggcatggctaagttgggagaccaaaaagaagaatgtacttcatctggttgggctggattccctctgataagccttcccagttgactgaaagatgaggctaggctctagcaagttgaagtcaaaccagctccttcaagaagctttgagcagaatgaagtggggaggacccagcttccagcccaggaagcccactgtacctggagccatctgggataagactttgacccatgactcccatatccacagcctgtccatcctagcccatcccagtttatcctgtatcatttgagctgggattcccacatcctctgagttggaagtcccatctcaagtcttcaataaagactcttgaatattg

SEQ ID NO: 172 - DNA, 1404 bp, Homo sapiens
gagctgctgtggcggcggcaacatggcggacgtgataaatgtcagtgtgaacctggaggccttttcccaggccattagtgccatccaggcgctgcgctccagcgtgagcagggtgttcgactgcctgaaggatgggatgcggaacaaggagacgctggagggccgggagaaggcctttattgcgcacttccaggacaacttacattcggtcaaccgggacctcaatgagctggaacgtctgagcaatctggtaggcaagccatctgagaaccatcctcttcataacagtgggctgttaagcctggatcctgtgcaggacaaaactcctctctatagtcaactccttcaagcatataagtggtcaaacaagttgcagtaccatgcaggactagcatctggccttttaaatcagcagtcattgaagcgttccgctaatcagatgggagtatctgccaaacgtagaccaaaggctcagcccacaactcttgtcctaccacctcaatatgttgatgatgtgatcagccgcattgacaggatgtttcctgaaatgtccatccacttatccagacccaatggaacatcagcaatgcttctggtgaccttgggaaaggtgttgaaagtgatcgtcgtcatgcggagcctgttcattgatcgaacaatagtaaagggatataacgagaatgtctacacagaagatggcaagcttgatatatggtccaaatccaactatcaagtattccagaaggtgacagaccatgccaccactgccctgctccactatcagctgccccagatgccggatgtcgtggtccgatccttcatgacctggttaagaagttacataaagctgttccaggccccgtgccagcgctgcgggaagtttctgcaggacggccttcccccgacatggagggatttccgaaccctcgaagccttccatgacacctgccggcagtagcccccacgctggccccagcctcagaccccacccagcaccttcccagacacgcaggaagcccacagaaggctcagctggttcctcactgcccagatgtgtacagctgctcctccctttcataaagcagcgccatgtgtgcagaggccactcttgaagagcagactccctctgtggctgatgggactaattattcccactagccagcggactgaaggcaaagaagacctttctagaacctggtagaaggaagctgtgcagcatgctcctcgtccatgtgtgtcggcagtgctggtgtctgtcgtctccgcgagctgttactggaatgagcccttgtgttcatgggtatcgtcatgcggggttcttgtgttttgtggggcttgggttttggtaacttatttttataagcaataaaccttttgtatcctgaaaaaaaaaaaaaaaaaaaa

SEQ ID NO: 173 - DNA, 1116 bp, Homo sapiens
gacagagtcggtggcttcttcccggaggagaccggaagttggtttcggctgcagaggggaaggcggctaccagtgtaaagccagagctgaggttcttgatagtccacaatgggtgaaccacagcaagtgagtgcacttccaccacctccaatgcaatatatcaaggaatatacggatgaaaatattcaagaaggcttagctcccaagcctccccctccaataaaagacagttacatgatgtttggcaatcagttccaatgtgatgatcttatcatccgccctttggaaagtcagggcatcgaacggcttcatcctatgcagtttgatcacaagaaagaactgagaaaacttaatatgtctatccttattaatttcttggaccttttagatattttaataaggagccctgggagtataaaacgagaagagaaactagaagatcttaagctgctttttgtacacgtgcatcatcttataaatgaataccgaccccaccaagcaagagagaccttgagagtcatgatggaggtccagaaacgtcaacggcttgaaacagctgagagatttcaaaagcacctggaacgagtaattgaaatgattcagaattgcttggcttctttgcctgatgatttgcctcattcagaagcaggaatgagagtaaaaactgaaccaatggatgctgatgatagcaacaattgtactggacagaatgaacatcaaagagaaaattcaggtcataggagagatcagattatagagaaagatgctgccttgtgtgtcctaattgatgagatgaatgaaagaccatgaaagatgtttctttttctttttttccttttgataatagcatcatatattagttcattttcttttggacagtcttaagagaagtttcactaaaaatgtaaacagctttaatcttgactccaaatttttcaattatgagatgtcataggcagtaatttcgctgtataacaagcatagacaaatgagtgtccctgcactaagaagaatcactttaaaaagcaaagtgttagctgctgttgtatgggacattcctatgttttagagttgcagtaaaactttgatgataacctcaaaaaaaaaaaaaaaaaa

SEQ ID NO: 174 - DNA, 4482 bp, Homo sapiens
accttggccgggattaccctccgagttccaggccatgacaaatgacatcactcccggcccaggcttaaaatctccccatgtgaggggatgtgtttccttcagcctctgctgtctggccgctctgtctaggtcctgggccacgggagagccccgtccctcctttctgaaggccccctgacttgggcctcagtgtccccgaagatcatgatggcgtatatgaacccggggccccactattctgtcaacgccttggccctaagtggccccagtgtggatctgatgcaccaggctgtgccctacccaagcgcccccaggaagcagcggcgggagcgcaccaccttcacccggagccaactggaggagctggaggcactgtttgccaagacccagtacccagacgtctatgcccgtgaggaggtggctctgaagatcaatctgcctgagtccagggttcaggtttggttcaagaaccggagggctaaatgcaggcagcagcgacagcagcagaaacagcagcagcagcccccagggggccaggccaaggcccggcctgccaagaggaaggcgggcacgtccccaagaccctccacagatgtgtgtccagaccctctgggcatctcagattcctacagtccccctctgcccggcccctcaggctccccaaccacggcagtggccactgtgtccatctggagcccagcctcagagtcccctttgcctgaggcgcagcgggctgggctggtggcctcagggccgtctctgacctccgccccctatgccatgacctacgccccggcctccgctttctgctcttccccctccgcctatgggtctccgagctcctatttcagcggcctagacccctacctttctcccatggtgccccagctagggggcccggctcttagccccctctctggcccctccgtgggaccttccctggcccagtcccccacctccctatcaggccagagctatggcgcctacagccccgtggatagcttggaattcaaggaccccacgggcacctggaaattcacctacaatcccatggaccctctggactacaaggatcagagtgcctggaagtttcagatcttgtagaggacgcagtctccatctctctccatcgggcctcgggaccctttctcttctgaatctgcttccctgcagtttagatcccgggatggcattcctgagaaagcaacccgaaccagctgtccttctgacagctcggtgttcagcttacagagaccacccctttcctccacagggagaggctcctccctctcctgggacagctcacaggtcctagtgattctctcaaccctaacaccgtctggcacgattgtgaccgctgaagtacaccacgagctccaggcttcagaaagtggtgctgagaacttgctccaagaagaagtcaaaccaaacttgcagttgatttggggtcatgtttaggtcagaatcaccgtgcccttgaacaagcaggtaggggggcttgataacttaactttccacgtggacagaatttttttttttgttttgtttttgttttgcagacacagtctagctctgtcgcccaggctggagtgcagtggcacgatctcagctcactgcaagctctacctcccgggttcacgccattctcctgcctcagcctcccgagtagctgggactacagatgcccaccaccaggcccggctaattttttttgtatttttagtagagacggggtttcaccgtgttagccaggatggtctcgatctcctgacctcgtgatccgcccgcctcggcctcccaaagtgctaggattacaggcgtgagccaccgcgcccggcccttttttttttttttttttttaattgagacggagtctcactcttttgcttaggctggagtgcagtggtgtgatctcagctcactgactgcaacctccacctcccgggttgaagcgttgctcctgcctcaatctcccaattagctgggattacaggtgtgctccatcatgcccggctaatttttctattattagtagagacagggttttaccatgttggccaggctggtctggaacccctgacctcaagtgatccgcctgcctcggcctcccaaagtgctgggattacaggcatgagccattgtgcctggccctacacgtggacacttctttagcatatggttagggacctttctagaaattccaaagacagactttaagaagccccgtcgggaaaccttaggccaatgatgtggttacattaaaaataaattatctgggaatttcacagacttcacaaatgtcaggcttacatggtaggtttaggggaccgtttgagagacaaagatctacattcatatatgtagctatacatatatgtactttttcttcttagtttctttttaaagacattttatcactcattcgctcattagcacattgggaatgtgtgtatttggtagggaaatgaaaggcaccttgcctgttccatctctactccttttttcttttgttttaggattttctaaaggtgagacactggtggaactggggtagctgcttgggacgtaccacctatagttgtggctatttcacagagaagcagcagctagacagactcccatctgtaaataaacaagagataggaagagggggaaatagatttggaggaggcagccctacatttcaaacatacattcccttttttagatttttttttttttttttttggttttcagttttgatggtgggattggaaaatagagcttggcttgaggacattttcctggggtggcaccattatttcttgaaatagaatcttacttatggtgacactggcaagcacttgtgagaacctgaagacggattgaggtcatttgatgctcagaagttgggtgctgggtccctgccttctcagtccgagttctcctttcatttttgggtggggaggcgggttccaagagcccttcattggtggagttcacaaggcaaggtgtaaaaaaaaaagtagggcaggaagacagtggtgtgctggcagaggtctaacaatgggctctccaaggaagaggaaaaggttggttgtggagtgtttgtcagtttccgtggtgtaaatactcccaccacggctgacttcaagctagcaaccggaggtcactgaactaagagttgggaagagatagggcacaatatatgcttacgagttggtacacaccgtcagcagcagccagggtcaggagaaaggcgagatgtgaagagaggccgggaggtatcagatgacgtttccagcactagaccagaagaggtgcacacagcctagaccccctgaggggtacaccctgatctctagagcccacaaagaggtttttattcaacataaaacgtgttcatctctcataggcctgagtcatgctgggttctgggacattaagcccaggagtgggccgggtgcggtggctcacgcctgtaatcccagcactttgggaggccgaggcgggtggatcacctgaggtcaggagttcgagaccagcctggccaacatggtgaaaccctgtctctactaataatacaaaaattagccgggcatggtggcacgcgcctgtaatcccagctactcgggaggctgaggcaggagaattgctggaacccgggaggcggaggttgaagagagcagagattgtgccactgtgctctagcctgggtcacaagagcgaaactccgtctcaataataacaacaacaaaaataacccaggagtggctcaagagtccagtgtgggatgaaaatataaacagaggaagacaacatatgtcactggggaggctgggggagctagacaaaattcacacgggaggggcagggatgagacaatattgtgccctgggtctgtgcaaacgttgggaccagaatccactataagtttcattcttcggagacacggaagctctgcactggaggccgggactcaggcgtggaagagaatcttctccttattcaccggggaggctgtgtcttgtgcaaacaagtcatagaaacttgatgggagttggggagggactgaaggatgcatgcaaggttctgggaaggagtgagaagtagtgaaggccaaggggcccccatcacaggccgatggggtaagacttcgagagagcctgatcctggggtcttctgagactccaccaggagccggagagggcagggagccaaatccagctaggaggttacagattgcttttcctgggctgggctcctgagtgttggttcttccagctgtgcacaggggatttcaaacgttctacgtcctaaagccaggaagagtgacaaggcaggtggggacagaaggaagaagccaggagcctccctgagaaggtgtcaccttatctgtcctcctcttccccacacactggcctctgggtcccccttctctgtccacccacagagtgaaaccaattaaaatgttggatctcatttaaaaaaaaaaaaaaaaaa

SEQ ID NO: 175 - DNA, 1976 bp, Homo sapiens
agaaaaacttgtgcggggccatttttggggcagtaagatcgagcgaggagcccaagagcgagcgcgcagcacgaagctcgagccgcctccgccgcgcgaccccacctcggccgccgccgcctgcgccgcgagatccgccccggcctccccgagagcgagccccggccgccgcgaccaccagccgcgctaaccgccgaccaaccgccaccgaggcgcctgagcgagagcagaggaggaggaggcatgagtgaggcgggcgaggccaccaccaccaccaccaccaccctcccgcaggctccgacggaggcggccgccgcggctccccaggaccccgcgcccaagagcccggtgggcagcggtgcgccccaggccgcggccccggcgcccgccgcccacgtcgcaggaaaccccggtggggacgcggcccccgcagccacgggcaccgcggccgccgcctctttagccaccgccgccggcagcgaagacgcggagaaaaaagttctcgccaccaaagtccttggcactgtcaaatggttcaacgtcagaaatggatatggatttataaatcgaaatgacaccaaagaagatgtatttgtacatcagactgccatcaagaagaataacccacggaaatatctgcgcagtgtaggagatggagaaactgtagagtttgatgtggttgaaggagagaagggtgcagaagctgccaatgtgactggcccggatggagttcctgtggaagggagtcgttacgctgcagatcggcgccgttacagacgtggctactatggaaggcgccgtggccctccccggaattacgctggggaggaggaggaggaagggagcggcagcagtgaaggatttgacccccctgccactgataggcagttctctggggcccggaatcagctgcgccgcccccagtatcgccctcagtaccggcagcggcggttcccgccttaccacgtgggacagacctttgaccgtcgctcacgggtcttaccccatcccaacagaatacaggctggtgagattggagagatgaaggatggagtcccagagggagcacaacttcagggaccggttcatcgaaatccaacttaccgcccaaggtaccgtagcaggggacctcctcgcccacgacctgccccagcagttggagaggctgaagataaagaaaatcagcaagccaccagtggtccaaaccagccgtctgttcgccgtggataccggcgtccctacaattaccggcgtcgcccgcgtcctcctaacgctccttcacaagatggcaaagaggccaaggcaggtgaagcaccaactgagaaccctgctccacccacccagcagagcagtgctgagtaacaccaggctcctcaggcaccttcaccatcggcaggtgacctaaagaattaatgaccattcagaaataaagcaaaaagcaggccacaaccttaaccaacaccaaagaaacatccaagcaataaagtggaagactaaccaagatttggacattggaatgtttactgttattctttaagaaacaactacaaaaagaaaatgtcaacaaatttttccagcaagctgagaacctgggaattcctgcacggaagacaagagagtagcctctccagtttcagcaaccgctaggtttctattttttttcctggtttttactgttttggtaatatatatattgaaacaagaaatattaataccacatggggagaaccccaaccaaagaaatctgaaatatatagtaaatgcttttttttccgtttttgttcattttggatgctggtgctaaacctccaagtgtcatgatttaaaaaaaaaaaaaatttatgtccttcttatttatttctaggatgaggggaggataacatttttgctttcttatgtgactctctttgaaaatgtgcagtaagaaattcctcaaaaataaaatttttacccttcagaggacagaatgtttaaaa

SEQ ID NO: 176 - DNA, 2928 bp, Homo sapiens
gacaattacgtctgggtccaagcaaacatgaggcagctgccagccggcctgggcagtcttgtctgcctcggctgtgaagtggggaggctggcaacagttttcttcagcgcccaggatgcagccggctaaggaagtgacaaaggcgtcggacggcagcctcctgggggacctcgggcacacaccacttagcaagaaggagggtatcaagtggcagaggccgaggctcagccgccaggctttgatgagatgctgcctggtcaagtggatcctgtccagcacagccccacagggctcagatagcagcgacagtgagctggagctgtccacggtgcgccaccagccagaggggctggaccagctgcaggcccagaccaagttcaccaagaaggagctgcagtctctctacaggggctttaagaatgagtgtcccacgggcctggtggacgaagacaccttcaaactcatttacgcgcagttcttccctcagggagatgccaccacctatgcacacttcctcttcaacgcctttgatgcggacgggaacggggccatccactttgaggactttgtggttggcctctccatcctgctgcggggcacagtccacgagaagctcaagtgggcctttaatctctacgacattaacaaggatggctacatcaccaaagaggagatgctggccatcatgaagtccatctatgacatgatgggccgccacacctaccccatcctgcgggaggacgcgccggcggagcacgtggagaggttcttcgagaaaatggaccggaaccaggatggggtagtgaccattgaagagttcctggaggcctgtcagaaggatgagaacatcatgagctccatgcagctgtttgagaatgtcatctaggacacgtccaaaggagtgcatggccacagccacctccacccccaagaaacctccatcctgccaggagcagcctccaagaaacttttaaaaaatagatttgcaaaaagtgaacagattgctacacacacacacacacacacacacacacacacacacagccattcatctgggctggcagaggggacagagttcagggaggggctgagtctggctaggggccgagtccaggagccccagccagcccttcccaggccagcgaggcgaggctgcctctgggtgagtggctgacagagcaggtctgcaggccaccagctgctggatgtcaccaagaaggggctcgagtgcccctgcaggggagggtccaatctccggtgtgagcccacctcgtcccgttctccattctgctttcttgccacacagtgggccggccccaggctcccctggtctcctccccgtagccactctctgcccactacctatgcttctagaaagcccctcacctcaggaccccagagggaccagctggggggcaggggggagagggggtaatggaggccaagcctgcagctttctggaaattcttccctgggggtcccaggatcccctgctactccactgacctggaagagctgggtaccaggccacccactgtggggcaagcctgagtggtgaggggccactgggccccattctccctccatggcaggaaggcgggggatttcaagtttagggattgggtcgtggtggagaatctgagggcactctctgccagctccacagggtgggatgagcctctccttgccccagtcctggttcagtgggaatgcagtgggtggggctgtacacaccctccagcacagactgttccctccaaggtcctcttaggtcccgggaggaacgtggttcagagactggcagccagggagcccggggcagagctcagaggagtctgggaaggggcgtgtccctcctcttcctgtagtgcccctcccatggcccagcagcttggctgagccccctctcctgaagcagtgtcgccgtccctctgccttgcacaaaaagcacaagcattccttagcagctcaggcgcagccctagtgggagcccagcacactgcttctcggaggccaggccctcctgctggctgaggcttgggcccagtagccccaatatggtggccctggggaagaggccttgggggtctgctctgtgcctgggatcagtggggccccaaagcccagcccggctgaccaacattcaaaagcacaaaccctggggactctgcttggctgtcccctccatctggggatggagaatgccagcccaaagctggagccaatggtgagggctgagagggctgtggctgggtggtcagcagaaacccccaggaggagagagatgctgctcccgcctgattggggcctcacccagaaggaacccggtcccaggccgcatggcccctccaggaacattcccacataatacattccatcacagccagcccagctccactcagggctggcccggggagtccccgtgtgccccaagaggctagccccagggtgagcagggccctcagaggaaaggcagtatggcggaggccatgggggcccctcggcattcacacacagcctggcctcccctgcggagctgcatggacgcctggctccaggctccaggctgactgggggcctctgcctccaggagggcatcagctttccctggctcagggatcttctccctcccctcacccgctgcccagccctcccagctggtgtcactctgcctctaaggccaaggcctcaggagagcatcaccaccacacccctgccggccttggccttggggccagactggctgcacagcccaaccaggaggggtctgcctcccacgctgggacacagaccggccgcatgtctgcatggcagaagcgtctcccttggccacggcctgggagggtggttcctgttctcagcatccactaatattcagtcctgtatattttaataaaataaacttgacaaaggaaaaaaaaaaaaaaa

SEQ ID NO: 177 - DNA, 1970 bp, Homo sapiens
ggagggcagcaccgccgggcttcgcgccatgacatcagccctggagtggtgcagtgtgcaaagcccactggttggcgtggcccgggacacgccttccgcggagcggaacaaaacggcgcgcaggccgggcgcacccagccgccacttccgagagcgcctgccgcccctgcgccgccgagccagctgccagaatgccgaactggggaggaggcaagaaatgtggggtgtgtcagaagacggtttactttgccgaagaggttcagtgcgaaggcaacagcttccataaatcctgcttcctgtgcatggtctgcaagaagaatctggacagtaccactgtggccgtgcatggtgaggagatttactgcaagtcctgctacggcaagaagtatgggcccaaaggctatggctacgggcagggcgcaggcaccctcagcactgacaagggggagtcgctgggtatcaagcacgaggaagcccctggccacaggcccaccaccaaccccaatgcatccaaatttgcccagaagattggtggctccgagcgctgcccccgatgcagccaggcagtctatgctgcggagaaggtgattggtgctgggaagtcctggcataaggcctgctttcgatgtgccaagtgtggcaaaggccttgagtcaaccaccctggcagacaaggatggcgagatttactgcaaaggatgttatgctaaaaacttcgggcccaagggctttggttttgggcaaggagctggggccttggtccactctgagtgaggccaccatcacccaccacaccctgcccactcctgcgcttttcatcgccattccattcccagcagctttggagacctccaggattatttctctgtcagccctgccacatatcactaatgacttgaacttgggcatctggctccctttggtttgggggtctgcctgaggtcccaccccactaaagggctccccaggcctgggatctgacaccatcaccagtaggagacctcagtgttttgggtctaggtgagagcaggcccctctccccacacctcgccccacagagctctgttcttagcctcctgtgctgcgtgtccatcatcagctgaccaagacacctgaggacacatcttggcacccagaggagcagcagcaacaggctggagggagagggaagcaagaccaagatgaggaggggggaaggctgggttttttggatctcagagattctcctctgtgggaaagaggttgagcttcctggtgtccctcagagtaagcctgaggagtcccagcttagggagtcactattggaggcagagaggcatgcaggcagggtcctaggagcccctgcttctccaggcctcttgcctttgagtctttgtggaatggatagcctcccactaggactgggaggagaataacccaggtcttaaggaccccaaagtcaggatgttgtttgatcttctcaaacatctagttccctgcttgatgggaggatcctaatgaaatacctgaaacatatattggcatttatcaatggctcaaatcttcatttatctctggccttaaccctggctcctgaggctgcggccagcagagcccaggccagggctctgttcttgccacacctgcttgatcctcagatgtggagggaggtaggcactgcctcagtcttcatccaaacacctttccctttgccctgagacctcagaatcttccctttaacccaagaccctgcctcttccactccacccttctccagggacccttagatcacatcactccacccctgccaggccccaggttaggaatagtggtgggaggaaggggaaagggctgggcctcaccgctcccagcaactgaaaggacaacactatctggagccacccactgaaagggctgcaggcatgggctgtacccaagctgatttctcatctggtcaataaagctgtttagaccagaaaaaaaaaaaaaaaa

SEQ ID NO: 178 - DNA, 901 bp, Homo sapiens
gggatctcggactccctggaccctccctccagcccagcctcgctagctccgcctgcggtacgtgctcccgcctccgactcaaaatgcctgtctggggaggtggaaacaagtgtggggcctgtgggaggaccgtgtaccacgcagaagaggtgcagtgtgatggcaggagcttccaccgctgctgctttctctgcatggtttgcaggaaaaatttagatagcacaacagtggcaattcacgatgaagagatctactgcaaatcctgctacggaaagaagtatgggccaaaaggctacggttatggccagggcgctggcacgcttaacatggaccgtggcgagaggctgggcatcaaaccagagagtgttcagcctcacaggcctacaacaaatccaaacacttctaaatttgctcagaaatatggaggtgctgagaagtgttccagatgtggggattctgtatatgctgccgagaagataattggagctggaaagccctggcacaaaaactgtttccgatgtgcaaagtgtgggaagagtcttgaatcaacaactctgactgaaaaagaaggtgaaatctattgtaaaggatgctatgcaaagaactttgggcccaagggatttggctatggccaaggagcaggggctcttgttcatgcccagtaagatgtaaaccctgaactaaacatcacacactgagaatctcttcataatctaggcacagataatctttaacactaaactactgtgaaattctaccagcattaagtactgtatatcgccctgtacttggataggctggctaactcgtaggaagagagcactgtatggtatccttttgctttattcaccagcattttgggggaacatttcttttacattttaaataaaacttcagcttg

SEQ ID NO: 179 - DNA, 1341 bp, Homo sapiens
caggccaaggctggtgacagccttcatatatttaaagaggacaagagcccctcagactcagttgagctgaacggagtccacacaggcagacttgaccttgaccagatagtcttcaagatgccaaactggggcggaggcgcaaaatgtggagcctgtgaaaagaccgtctaccatgcagaagaaatccagtgcaatggaaggagtttccacaagacgtgtttccactgcatggcctgcaggaaggctcttgacagcacgacagtcgcggctcatgagtcggagatctactgcaaggtgtgctatgggcgcagatatggccccaaagggatcgggtatggacaaggcgctggctgtctcagcacagacacgggcgagcatctcggcctgcagttccaacagtccccaaagccggcacgctcagttaccaccagcaacccttccaaattcactgcgaagtttggagagtccgagaagtgccctcgatgtggcaagtcagtctatgctgctgagaaggttatgggaggtggcaagccttggcacaagacctgtttccgctgtgccatctgtgggaagagtctggagtccacaaatgtcactgacaaagatggggaactttattgcaaagtttgctatgccaaaaattttggccccacgggtattgggtttggaggccttacacaacaagtggaaaagaaagaatgaagaggtgcgccgtttctcagattttttgcgagcctaaaacacttgccaagtaatcctgcacagatcgatacctttccccaaatagcctctcctttgtagtcgtacattatgtgtttctcctcagaagtgatcaggtctttactgaatgttagaagaggcctttggaagaaaattatgtaaagtttaatctataacaaatgctttattatttataatgcttggaatgggagaggcaataaataaatgttttagtgctatcttgtatggctctagatcttttctttgagatagaaattttcaaaaacataaagctagttcaaaaaacgagttgcagagcatataataaatttggatgtcaactgagaaaggagtgagaaggaagaaacaatgcgcaaaggaaagcagtctttcagaatctgtcagccaagtgtctttctagttactgctaatggagaagaaaacagggggtctgggagaaaatagagaacatgatagcaaaatctaaaaggaaaatcaaaactaataaaattgctgaagagttgatccctttgtcctatcgtggggctttgtaatgttacacatctcgtgaaaactcagaaatgacaataaagcgtggcatttgcctctgtattataaatg

SEQ ID NO: 180 - DNA, 3797 bp, Homo sapiens
gtgtctgagcctgtggagcgattaaaccgtgcgcggagctgcttctttggcggcagcggcggcggcggtggccggtgcggacgcgcggagctcgccggagacgccgggtggccggagccgtggagcggcggcggagcgggcgccgcggggggtgtggcgcggagaatgattacggacctgaagccaaagaacaagatgcgctagtggacagattgctgaccaggggcttgagagctgggttctattttccctcctcaaactgactttgcagccacggagaggcaggggaaatggaaggtgatgcagtcgaagccattgtggaggagtccgaaacttttattaaaggaaaggagagaaagacttaccagagacgccgggaagggggccaggaagaagatgcctgccacttaccccagaaccagacggatgggggtgaggtggtccaggatgtcaacagcagtgtacagatggtgatgatggaacagctggaccccacccttcttcagatgaagactgaagtaatggagggcacagtggctccagaagcagaggctgctgtggacgatacccagattataactttacaggttgtaaatatggaggaacagcccataaacataggagaacttcagcttgttcaagtacctgttcctgtgactgtacctgttgctaccacttcagtagaagaacttcagggggcttatgaaaatgaagtgtctaaagagggccttgcggaaagtgaacccatgatatgccacaccctacctttgcctgaagggtttcaggtggttaaagtgggggccaatggagaggtggagacactagaacaaggggaacttccaccccaggaagatcctagttggcaaaaagacccagactatcagccaccagccaaaaaaacaaagaaaaccaaaaagagcaaactgcgttatacagaggagggcaaagatgtagatgtgtctgtctacgattttgaggaagaacagcaggagggtctgctatcagaggttaatgcagagaaagtggttggtaatatgaagcctccaaagccaacaaaaattaaaaagaaaggtgtaaagaagacattccagtgtgagctttgcagttacacgtgtccacggcgttcaaatttggatcgtcacatgaaaagccacactgatgagagaccacacaagtgccatctctgtggcagggcattcagaacagtcaccctcctgaggaatcaccttaacacacacacaggtactcgtcctcacaagtgcccagactgcgacatggcctttgtgaccagtggagaattggttcggcatcgtcgttacaaacacacccacgagaagccattcaagtgttccatgtgcgattacgccagtgtagaagtcagcaaattaaaacgtcacattcgctctcatactggagagcgtccgtttcagtgcagtttgtgcagttatgccagcagggacacatacaagctgaaaaggcacatgagaacccattcaggggaaaagccttatgaatgttatatttgtcatgctcggtttacccaaagtggtaccatgaagatgcacattttacagaagcacacagaaaatgtggccaaatttcactgtccccactgtgacacagtcatagcccgaaaaagtgatttgggtgtccacttgcgaaagcagcattcctatattgagcaaggcaagaaatgccgttactgtgatgctgtgtttcatgagcgctatgccctcatccagcatcagaagtcacacaagaatgagaagcgctttaagtgtgaccagtgtgattacgcttgtagacaggagaggcacatgatcatgcacaagcgcacccacaccggggagaagccttacgcctgcagccactgcgataagaccttccgccagaagcagcttctcgacatgcacttcaagcgctatcacgaccccaacttcgtccctgcggcttttgtctgttctaagtgtgggaaaacatttacacgtcggaataccatggcaagacatgctgataattgtgctggcccagatggcgtagagggggaaaatggaggagaaacgaagaagagtaaacgtggaagaaaaagaaagatgcgctctaagaaagaagattcctctgacagtgaaaatgctgaaccagatctggacgacaatgaggatgaggaggagcctgccgtagaaattgaacctgagccagagcctcagcctgtgaccccagccccaccacccgccaagaagcggagaggacgaccccctggcagaaccaaccagcccaaacagaaccagccaacagctatcattcaggttgaagaccagaatacaggtgcaattgagaacattatagttgaagtaaaaaaagagccagatgctgagcccgcagagggagaggaagaggaggcccagccagctgccacagatgcccccaacggagacctcacgcccgagatgatcctcagcatgatggaccggtgatggcggagccttgtgcgtcgccaggacttctctgggctgtgtttaaacggcccgcatcttaatttttctcccttctttctttttttggctttgggaaaagcatcattttaccaaacataccgagaacgaaaacttcaaggatgatgttagaaaaaaatgtgatttaactagaacttgctgtctgatgttagcaaatcatggaatgttctgagtccctgagggtttactgtgaagtgctgaggacagtgttgacaactaactcgttttcctagatggaaacggagacattgacccctccctccatgtggtaaaccactccagaatggccaccaggcttcccagagttctatggtcttcttcccaagagagtttttaattgtaaatgcatacttgggaaggacttagagttttaaactgttttttgcttttgcttttccctgactccctttgcttggagtcagctgcacaccagtagtatggcatgctacgatcaggttctgtcctgaaagctttgcctctttcttggcaaagtttctggtatggtcaagcttgtaaataactttttttacattttaatcttttccattaattaagaggttgaaaagaagtgcagtgtaagaaaacccagcattttaattacttgcaaattaagttaccacagactctgtagtgtgtaaatgttgacaaggaattggatcacaatcatgtagcagaatggcacccagaccactgcccaccagtgacggacatgcacgtggcagatcatgatttccagcccacggagccagcatttgaaccttgtataattaactttcagttatgatttcccatcgacattttctttgccctgtttgtagctgattgttgtgttttataaatcttctgttaaggcagaagggtgattatgagtggttcacagcagcccttataagctgggccagaaaatttcactaggtcagtaatttaaaccttggatcttcaaaaaataaaataatgtgaagcaaaaccaactaaaaagtgattcttgcacatgaactgtcacatgtttaaaaatgtgttttttagagagcctcagtcttactgatttcaaacacttttttcttctgtgtattgcttttaagagagccatcagttagctatcagactctaggttgatgcattttgtacttagctgtactgtgtgatatttttcattattttaggacgccaacatgagacctgtaataaaatatgtaatggggttgaaagctggggaggaggatctactgctgtacagctaataaatcataacggattaacaagtgctccaaagaaaaaaaaaaa

SEQ ID NO: 181 - DNA, 3493 bp, Homo sapiens
acgcggtgcacgaggcagagcccacaagccaaagacggagtgggccgagcattccggccacgccttccgcggccaagtcattatggcagccactgagatctctgtcctttctgagcaattcaccaagatcaaagaactcgagttgatgccggaaaaaggcctgaaggaggaggaaaaagacggagtgtgcagagagaaagaccatcggagccctagtgagttggaggccgagcgtacctctggggccttccaggacagcgtcctggaggaagaagtggagctggtgctggccccctcggaggagagcgagaagtacatcctgaccctgcagacggtgcacttcacttctgaagctgtggagttgcaggatatgagcttgctgagcatacagcagcaagaaggggtgcaggtggtggtgcaacagcctggccctgggttgctgtggcttgaggaagggccccggcagagcctgcagcagtgtgtggccattagtatccagcaagagctgtactccccgcaagagatggaggtgttgcagttccacgctctagaggagaatgtgatggtggccagtgaagacagtaagttagcggtgagcctggctgaaactactggactgatcaagctcgaggaagagcaggagaagaaccagttattggctgaaagaacaaaggagcagctcttttttgtggaaacaatgtcaggagatgaaagaagtgacgaaattgttctcacagtttcaaattcaaatgtggaagaacaagaggatcaacctacagctggtcaagcagatgctgaaaaggccaaatctacaaaaaatcaaagaaagacaaagggagcaaaaggaaccttccactgtgatgtctgcatgttcacctcttctagaatgtcaagttttaatcgtcatatgaaaactcacaccagtgagaagcctcacctgtgtcacctctgcctgaaaaccttccgtacggtcactctgctgcggaaccatgttaacacccacacaggaaccaggccctacaagtgtaacgactgcaacatggcatttgtcaccagtggagaactcgtccgacacaggcgctataaacatactcatgagaaaccctttaaatgttccatgtgcaagtatgccagtgtggaggcaagtaaattgaagcgccatgtccgatcccacactggggagcgcccctttcagtgttgccagtgcagctatgccagcagagatacctacaagctgaaacgccacatgagaacgcactcaggtgagaagccttacgaatgccacatctgccacacccgcttcacccagagcgggaccatgaaaatacatattctgcagaaacacggcgaaaatgtccccaaataccagtgtccccattgtgccaccatcattgcacggaaaagcgacctacgtgtgcatatgcgcaacttgcatgcttacagcgctgcagagctgaaatgccgctactgttctgctgtcttccatgaacgctatgccctcattcagcaccagaaaactcataagaatgagaagaggttcaagtgcaaacactgcagttatgcctgcaagcaggaacgtcatatgaccgctcacattcgtacccacactggagagaaaccattcacctgcctttcttgcaataaatgtttccgacagaagcaacttctaaacgctcacttcaggaaataccacgatgcaaatttcatcccgactgtttacaaatgctccaagtgtggcaaaggcttttcccgctggattaacctgcacagacattcggagaagtgtggatcaggggaagcaaagtcggctgcttcaggaaagggaagaagaacaagaaagaggaagcagaccatcctgaaggaagccacaaagggtcagaaggaagctgcgaagggatggaaggaagccgcgaacggagacgaagctgctgctgaggaggcttccaccacgaagggagaacagttcccaggagagatgtttcctgtcgcctgcagagaaaccacagccagagtcaaagaggaagtggatgaaggcgtgacctgtgaaatgctcctcaacacgatggataagtgagagggattcgggttgcgtgttcactgcccccaattcctaaagcaagttagaagtttttagcatttaaggtgtgaaatgctcctcaacacgatggataagtgagagagagtcaggttgcatgttcactgcccctaattcctaaagcaagttagaaatttttagcattttctttgaaacaattaagttcatgacaatggatgacacaagtttgaggtagtgtctagaattgttctcctgtttgtagctggatatttcaaagaaacattgcaggtattttataaaagttttaaaccttgaatgagagggtaacacctcaaacctatggattcattcacttgatattggcaaggtggcccacaatgagtgagtagtgatttttggatatttcaaaatagtctagaccagctagtgcttccacagtcaaagctggacatttttatgttgcattatatacacccatgatatttctaataatatatggttttaaacattaaagacaaatgtttttatacaaatgaattttctacaaaatttaaagctaccataatgcttttaattagttctaaattcaaccaaaaaatgttttactcttataaaaaggaaaactgagtaggaaatgaaatactagattagactagaaaataaggaataaatcgattttactttggtataggagcaaggttcacctttagatttttgtattctcttttaattatgctccttggcaggtatgaaattgccctggttacattccattattgcttattagtatttcactccataacccttttttctgctaaaactactctttttatatttgtaaaataattggcagagtgagaagaaacataaaatcagataaggcaaatgtgtacctgtaaggaatttgtactttttcataatgcccagtgattagtgagtatttcccttttgccagttgacaagatttttccaccctcgagcagcgtgagagatgcctctttaacacttgaaattcatttctatctggatacagaggcagatttttcttcattgcttagttgagcagtttgttttgctgccaacctgtctccacccctgtatttcaagatcattgataagccctaaattcaaattcttaagatatggaccttttattgaaaatatcacaagttcagaatccctatacaatgtgaatatgtggaaataatttcccagcaggaagagcattatattctctttgtaccagcaaattaatttaactcaactcacatgagatttaaattctgtgggctgtagtatgccatcattgtgactgaatttgtgcaatggtttcttaatttttttactgttatttaaagatgttttacataattcaataaaatgaaatgacttaaaattgcaaaaaaaaaaaaaaaaaaaaaaaaaaaaaaaaaaaaa

SEQ ID NO: 182 - DNA, 3720 bp, Homo sapiens
aggatacagcggcttctgcgcgacttataagagctccttgtgcggcgccattttaagcctctcggtctgtggcagcagcgttggcccggccccgggagcggagagcgaggggaggcggagacggaggaaggtctgaggagcagcttcagtccccgccgagccgccaccgcaggtcgaggacggtcggactcccgcggcgggaggagcctgttcccctgagggtatttgaagtataccatacaactgttttgaaaatccagcgtggacaatggctactcaagctgatttgatggagttggacatggccatggaaccagacagaaaagcggctgttagtcactggcagcaacagtcttacctggactctggaatccattctggtgccactaccacagctccttctctgagtggtaaaggcaatcctgaggaagaggatgtggatacctcccaagtcctgtatgagtgggaacagggattttctcagtccttcactcaagaacaagtagctgatattgatggacagtatgcaatgactcgagctcagagggtacgagctgctatgttccctgagacattagatgagggcatgcagatcccatctacacagtttgatgctgctcatcccactaatgtccagcgtttggctgaaccatcacagatgctgaaacatgcagttgtaaacttgattaactatcaagatgatgcagaacttgccacacgtgcaatccctgaactgacaaaactgctaaatgacgaggaccaggtggtggttaataaggctgcagttatggtccatcagctttctaaaaaggaagcttccagacacgctatcatgcgttctcctcagatggtgtctgctattgtacgtaccatgcagaatacaaatgatgtagaaacagctcgttgtaccgctgggaccttgcataacctttcccatcatcgtgagggcttactggccatctttaagtctggaggcattcctgccctggtgaaaatgcttggttcaccagtggattctgtgttgttttatgccattacaactctccacaaccttttattacatcaagaaggagctaaaatggcagtgcgtttagctggtgggctgcagaaaatggttgccttgctcaacaaaacaaatgttaaattcttggctattacgacagactgccttcaaattttagcttatggcaaccaagaaagcaagctcatcatactggctagtggtggaccccaagctttagtaaatataatgaggacctatacttacgaaaaactactgtggaccacaagcagagtgctgaaggtgctatctgtctgctctagtaataagccggctattgtagaagctggtggaatgcaagctttaggacttcacctgacagatccaagtcaacgtcttgttcagaactgtctttggactctcaggaatctttcagatgctgcaactaaacaggaagggatggaaggtctccttgggactcttgttcagcttctgggttcagatgatataaatgtggtcacctgtgcagctggaattctttctaacctcacttgcaataattataagaacaagatgatggtctgccaagtgggtggtatagaggctcttgtgcgtactgtccttcgggctggtgacagggaagacatcactgagcctgccatctgtgctcttcgtcatctgaccagccgacaccaagaagcagagatggcccagaatgcagttcgccttcactatggactaccagttgtggttaagctcttacacccaccatcccactggcctctgataaaggctactgttggattgattcgaaatcttgccctttgtcccgcaaatcatgcacctttgcgtgagcagggtgccattccacgactagttcagttgcttgttcgtgcacatcaggatacccagcgccgtacgtccatgggtgggacacagcagcaatttgtggagggggtccgcatggaagaaatagttgaaggttgtaccggagcccttcacatcctagctcgggatgttcacaaccgaattgttatcagaggactaaataccattccattgtttgtgcagctgctttattctcccattgaaaacatccaaagagtagctgcaggggtcctctgtgaacttgctcaggacaaggaagctgcagaagctattgaagctgagggagccacagctcctctgacagagttacttcactctaggaatgaaggtgtggcgacatatgcagctgctgttttgttccgaatgtctgaggacaagccacaagattacaagaaacggctttcagttgagctgaccagctctctcttcagaacagagccaatggcttggaatgagactgctgatcttggacttgatattggtgcccagggagaaccccttggatatcgccaggatgatcctagctatcgttcttttcactctggtggatatggccaggatgccttgggtatggaccccatgatggaacatgagatgggtggccaccaccctggtgctgactatccagttgatgggctgccagatctggggcatgcccaggacctcatggatgggctgcctccaggtgacagcaatcagctggcctggtttgatactgacctgtaaatcatcctttaggtaagaagttttaaaaagccagtttgggtaaaatacttttactctgcctacagaacttcagaaagacttggttggtagggtgggagtggtttaggctatttgtaaatctgccacaaaaacaggtatatactttgaaaggagatgtcttggaacattggaatgttctcagatttctggttgttatgtgatcatgtgtggaagttattaactttaatgttttttgccacagcttttgcaacttaatactcaaatgagtaacatttgctgttttaaacattaatagcagcctttctctctttatacagctgtattgtctgaacttgcattgtgattggcctgtagagttgctgagagggctcgaggggtgggctggtatctcagaaagtgcctgacacactaaccaagctgagtttcctatgggaacaattgaagtaaactttttgttctggtcctttttggtcgaggagtaacaatacaaatggattttgggagtgactcaagaagtgaagaatgcacaagaatggatcacaagatggaatttatcaaaccctagccttgcttgttaaatttttttttttttttttttaagaatatctgtaatggtactgactttgcttgctttgaagtagctctttttttttttttttttttttttttgcagtaactgttttttaagtctctcgtagtgttaagttatagtgaatactgctacagcaatttctaatttttaagaattgagtaatggtgtagaacactaattcataatcactctaattaattgtaatctgaataaagtgtaacaattgtgtagcctttttgtataaaatagacaaatagaaaatggtccaattagtttcctttttaatatgcttaaaataagcaggtggatctatttcatgtttttgatcaaaaactatttgggatatgtatgggtagggtaaatcagtaagaggtgttatttggaaccttgttttggacagtttaccagttgccttttatcccaaagttgttgtaacctgctgtgatacgatgcttcaagagaaaatgcggttataaaaaatggttcagaattaaacttttaattcattcgattg

SEQ ID NO: 183 - DNA, 2942 bp, Homo sapiens
cgtctcaatatgtctcaagatggcggccaatgtgggatcgatgtttcaatattggaagcgctttgatttacagcagctgcagagagaactcgatgccaccgcaacggtattggcgaaccggcaggatgaaagtgagcagtccagaaagcggcttatcgaacagagccgggagttcaagaagaacactccagaggatttgcgcaagcaggtagcgccgctgctgaagagtttccaaggagagattgatgcactgagtaaaagaagcaaggaagctgaagcagctttcttgaatgtctacaaaagattgattgacgtcccagatcccgtaccagctttggatctcggacagcaactccagctcaaagtgcagcgcctgcacgatattgaaacagagaaccagaaacttagggaaactctggaagaatacaacaaggaatttgctgaagtgaaaaatcaagaggttacgataaaagcacttaaagagaaaatccgagaatatgaacagacactgaagaaccaagccgaaaccatagctcttgagaaggaacagaagttacagaatgactttgcagaaaaggagagaaagctgcaggagacacagatgtccaccacctcaaagctggaggaagctgagcataaggttcagagcctacaaacagccctggaaaaaactcgaacagaattatttgacctgaaaaccaaatacgatgaagaaactactgcaaaggccgacgagattgaaatgatcatgacggaccttgaaagggcaaaccagagggcagaggtggctcagagagaggcggagaccttaagggaacagctctcatcggccaatcactccctccagctggcctcacagatccagaaggcaccagacgtggagcaggccatagaggtgctgacccgctccagcctagaagttgagttggccgccaaggagcgggagatcgcacagctggtggaggacgtgcagagactccaggccagcctcaccaagctgcgggagaattcggccagccagatctcacagcttgagcagcagctgagcgccaaaaacagcacactcaaacaactggaagaaaaactcaaaggccaggctgactatgaagaggtgaagaaagagctgaacattctgaagtccatggagtttgcaccgtccgagggcgctgggacacaggatgcggccaagcccctggaggtgctgttgctggagaagaaccgctcgctgcagtccgagaacgccgcgctgcgcatctccaacagcgacctgagcggacgctgtgcagagctgcaagtccgtatcactgaggctgtggccacagccactgagcagagagagctgatcgcccgcctggagcaggacctgagcatcattcagtccatccagcggcccgatgccgagggtgccgctgagcaccgcctggagaagatcccagagcccatcaaagaggccactgccctattctacggacctgcagcaccagccagcggtgccctcccagagggccaggtggattcactgctttccatcatctccagccagagggagcgcttccgtgcccggaaccaggagcttgaggccgagaaccgcctggcccagcacaccctccaggccctgcagagtgagctggacagcctgcgcgccgacaacatcaagctctttgagaagatcaagttcctgcagagctaccctggccggggcagcggcagtgatgacacggagctgcggtactcgtcccagtacgaggagcgcctggaccccttctcctccttcagcaagcgggagcggcagaggaagtacctgagcttgagtccctgggacaaggccaccctcagcatggggcgtctggttctctccaacaagatggcgcgcaccatcggcttcttctacacactgttcctgcactgcctggtcttcctggtgctctacaagctggcatggagcgagagcatggagagggactgtgccaccttctgcgccaagaagttcgctgaccacctgcacaagttccacgagaatgacaacggggctgcggctggtgacttgtggcagtgataccccggggcctcccccgtgacagtgacggctgcgcctccaccccgactgctcagtgcatctaatcacttagactcccctgaagaatcccccatggaaactgcccttatccgctgtccagcagctgccagaggccccaggtcacctcgggtccccttgaaagaatgtctcggtcacatcaggcccgctaggtccagagagcgagcccccaatgcccggccaggctaagccgcagagaccctctcagcccccacctcaggttagggctctgcccgcagcctgacctctagccctggtggcagaggtccctcagctgcgaggctaattgggtgaccaccgattccagctgcggttaatccagcttgggcctgtctgcactgcgatcctcttgggctctcctaggatccccccatgccccgtaagaggtggaagacgcttccttccaggacagcaggctttgagtccagcacccccagcctgcctttgccaccagccccaccctgcagagtatatgaggcttgacagagtctgccccctcccccactgcaccccaagagagagagccccagccagcggaacagtttctattaccccctccctgcccccagacccatgtgatttctgctttcttctttagcaagatattctggtttctagataaggaagagtctctaatgagcccccgagccccagtctcttcagactcatggattggtctgaggggtctgaacgtctcctagccaatcagaactggctgtggaccaccctagcacggccacctctcagggccactggcaggccttcctgagttagatttgtagttgcatatttagctttgcacatttgaaataaaccacggttgcagccaaaaaaaaaaaaaaaaaaa

SEQ ID NO: 184 - DNA, 6841 bp, Homo sapiens
gccggagggcgcccgaggggccccgggccgcggcgctcagggcccgggcggccggcggcggccccggggctggggggagtccagcccggatattgagtgcagccattgagaaaagccaaactcttgtgtgtgcgcgtctcgatagcccccaagatggccgccaatgtgggatcgatgtttcaatattggaagcgatttgatctacggcgactccagaaggagcttaattccgtcgcttctgagctgtctgcacggcaggaggagagtgaacattctcataaacatttaattgaactccgccgggaatttaagaaaaatgtacctgaggaaatcagagagatggtggctcctgtattaaaaagcttccaagccgaggtggtggcccttagtaagagaagtcaggaggcggaggctgcttttctgagtgtttacaagcaattaattgaagcaccagaccccgtgcctgtgtttgaggcggcacgcagcctagacgacagactgcagccccccagctttgaccccagtgggcagccccggcgagacctccacacttcgtggaagaggaaccccgagctcctcagccccaaagagcagagagaggggacgtcgcctgccgggcccacgctgaccgagggaagccgcctcccaggcattcccgggaaagccctcctgacagaaaccttgctgcagagaaatgaggcggaaaaacaaaagggccttcaagaagtacagatcactttggcggccagactgggggaggcagaggagaaaatcaaagtcctacattcagcgctaaaggctacgcaggcagagctgctagagctgcggcggaagtacgacgaggaggcagcatccaaggcagatgaagtcggcctgatcatgaccaacctggagaaagctaatcagcgagctgaggctgcccagcgggaggtggaaagtctccgggaacagctggcctctgtcaacagctccatccgcctggcttgctgctctccccaggggcccagtggggataaggtgaacttcactctgtgctcgggccctcggctggaggccgcgctggcctccaaggacagggagatcctgcggctgctgaaggacgtgcagcacctccagagctcactgcaggagctggaggaggcatccgccaaccagatcgccgacctggagcggcagctcacggccaagtccgaggccatagaaaagctggaagagaagctccaggcccagtctgactatgaggaaattaaaacggagctgagcatcctgaaagccatgaagctggcctccagcacctgcagcctcccccagggcatggccaagcctgaagactcactgcttattgcaaaggaggccttcttccccacgcagaaattccttctggagaagcccagcctcctggccagccctgaggaagacccatcagaggacgattccatcaaggattcactgggcacggagcagtcctacccctcccctcagcagctcccacctccaccagggccagaagaccccctgtctcccagccccgggcagcccctgctgggccccagcttggggcctgacggcactcggactttctcgctgtcccccttccccagcctggcatcaggggagagactgatgatgcccccagccgccttcaagggagaggcgggcggcctgctggtgttccccccagccttctatggcgccaagccccccacagcccctgccaccccggcccctggccctgagccactgggcggtcctgagcccgcggatggtggtgggggcggagcggcggggcccggggcagaggaggagcagctggacacggcagagatcgccttccaggtgaaggagcagctgctgaaacacaacatcgggcagcgggtgtttgggcattacgtgctggggctgtcgcagggctcggtcagcgagatcctagcccggcccaagccctggcgcaagctcacggtgaagggcaaggagcccttcatcaagatgaagcagttcctgtcggatgagcagaatgtactggcgctcaggaccatccaagtgcggcagcgaggcagcatcaccccgagaatccgcacgcctgagacaggctcagacgacgccatcaagagcattctagagcaggccaagaaggagatcgagtcgcagaagggcggcgagcccaagacctcggtggccccgctgagcatcgccaacggcacgacccccgccagcacctcggaggacgccatcaagagcatcctggagcaggcacgccgtgagatgcaggcgcaacagcaggcgctgctggagatggaggtggcgcccaggggccgctcggtgcccccctcgcccccggagcggccatcactggccaccgcgagccagaacggggccccggccttggtgaagcaggaggagggcagcgggggccccgcgcaggcgccgctcccggtcctgtcccccgccgccttcgtgcagagcatcatccgcaaggtcaagtccgagatcggcgacgccggctacttcgaccaccactgggcctccgaccgcggcctgctcagccgcccctacgcctccgtgtcgccctcgctgtcctcctcctcctcctctggctactctggccagcccaacggccgcgcctggccccgcggggacgaggcccctgtgccccccgaggacgaggcggcggcaggggcggaggacgaaccccccaggacgggcgagctcaaggctgagggcgcgacggccgaggcgggcgcgcggctgccctactacccggcctacgtgccgcgcaccctgaagcccaccgtgccgccgctgacccccgagcagtacgagctgtacatgtaccgtgaggtagacacgctggagctcacccgccaggtcaaggagaagctggccaagaacggcatctgccagaggatcttcggggagaaggtgctgggcctgtcacagggcagcgtgagcgacatgctgtcccggccgaagccatggagcaagctgacgcagaaggggcgggagcccttcatccgcatgcagctgtggctctctgaccagctcggccaggcagtgggccagcagcctggtgcctcccaggccagtcccacagaaccaaggtcctcaccatccccaccccccagccccacagagcctgagaagagctcccaggagccgttgagcctgtccctggagagcagcaaggagaaccagcagccagagggccgctccagctcctcgttgagcgggaagatgtactcaggcagccaggccccagggggcatccaggagatcgtggccatgtcccccgagctggacacgtactccatcaccaagagggtgaaggaggtcctcacagacaacaatctagggcagcggctgtttggggaaagcatcctgggtctgacacagggctccgtgtctgacctgctgtcccggcccaaaccctggcacaagctgagcctgaaggggcgggagccttttgtccgcatgcagctgtggctcaatgacccccataacgtggagaagctgagggatatgaagaagctggagaagaaagcctacctgaaacgtcgctatggcctcatcagcaccggctcagacagtgagtccccggccacccgctcagagtgccccagcccctgcctgcagccccaggacctgagcctcctgcagatcaagaagccccgggtggtgctggcacccgaggagaaggaggcactgcggaaggcctatcagctggaaccctacccctcgcagcagaccatcgagctcctctccttccagctcaacctcaagaccaacaccgtcatcaactggttccacaactacaggtcccggatgcgccgggagatgttggtggaggggacccaggatgagccagaccttgatccaagcgggggtcctggaatcctaccgccaggccactcccacccagaccccaccccgcagagccctgactctgagactgaggaccagaagccaaccgtgaaggaactggagcttcaggagggccctgaggagaacagcacacccctgaccacccaggacaaggcccaagtgaggatcaagcaggaacagatggaggaggatgctgaggaagaggcaggcagccagccccaggactcaggggagctggacaaaggccaaggtccccccaaagaggagcatcccgaccctccgggtaatgatggactcccaaaagtggctcccgggcccctccttccaggtggatccaccccagactgtccctcacttcatccccaacaggagagtgaggccggggagcgacttcacccggaccctttaagttttaagtcagcctcagagtcctcacgctgcagcctggaggtgtcactgaactcgccctcggccgcctcctcaccaggcctcatgatgtctgtgtcacctgtcccctcctcctcagctcccatctccccatccccacctggcgccccccctgccaaagtgccgagtgccagccccactgctgacatggctggagccttgcaccccagtgccaaggtgaaccccaacttgcagcggcggcatgagaagatggccaatctgaacaacatcatttaccgactagagcgggctgccaatcgggaggaggccctggagtgggagttctgaaggcagggtgagggggcaagggacataccctggtaactaccttccttctcgcacttactctcctcaacaggatggggtaagggagggaggaactcaaccatcaaaatgtggacagcaatgttatgccgtttacgttttttgttgtaatcctagttctatgaagctgtgtgagcaggtgggtcaaatgccattgcctccacttttctgcacccccctgctcctcttcaccctgacccctctgcaggaggcagaagcaaaatggcaccacatattcacctgaaaactccaaactcttttagaaaaataaataaatatttatagacctcttttagatattttaataaaggatcctttggaatttatcccagctgatgctgttttgatattacagagagttataaaatcaggatgctgtcacaactgttgcgaagtatacactgaagttgtgtcgtttttgccactagatgagattaaaagaagacaattattcaaagccatcacaaaacactataagactgaccaaaatttagataacctttgaaccacgatttttttccacatctgtctgtgagacacagcgcaatgctactgcccttccagaaactgtgctaaaaagagaaagtccaaaagactctaaacaaaaacctcgacgccgttgaggatgtgtttcattctggtggtctgttttgcaagcttgataacagaatgtccgtgccattgtaaatgttgtagagatgtgggccgtggcccaaccgtcctatatgagatgtagcatggtacagaacaaactgcttacacaggtctcactagttagaaacctgtgggccatggaggtcagacatccatcttgtccatctataggcaagaagtgtttccagatcctttggaaaggtgggcatggggcaggtgcttggagagtggcgtttgagccagagcgaccccatttcccgtgtgaaccataggcacaacccaggaagtttccccacttgtaggagtgtgggtattccagagcaagactgtggccaccatcttcccctcttggtgttttccgaaagtgacagtgttggtcatcccatgaccactgaagcttagtaaccagcgccaaaaagtagattcatcaaactagagaccccagctccccttctcgccatcttctttctcaagttgaccgtggtgctgtttctggaaggcatctgcaactccaagtccatgcagaactctggaaggccaagttcatcgcagcatgttcaccatatcccagcctccaaatctatcctcctaccttccaacgcatgacctgttggggagcagagacttaacccccaactcagaggaacccttcctccagcgtctttggcatggtttctagggtgagagttcccaatttggatagaacggccaccatattggttactgaatctctctcccttgtttttattacgtttcctttttcaaactgtccatgggaaggctgaattgagtgactccccagaatgaagatgagaaggtgaatataatcaatgccaatgtaatgccagcgggtgagatggccgatggaggtttcaaagatgtagctagcattttgaaaccatatgggcaaaacccggcaaccagaaggggacagataaggaccgttccagaaatcccaactctcacacccagcccaggctgcagtctccacaccaaacagtcaacaaaacacaaaccctgaaggaaaaccttttccatacacccaggctatgcattgaagagttttccactgtatacatttttatccagatgaaggtatttttatattttgacaataggaaacagtgaccattttcagagtaatcaaatctggaacaaatgaaacatcttttagccaccaccaccctgttgcaattaagacaaccgtgggggaacacaccactttttactgttgaaaccaacacaacgttgaaatccaggcttatacgcagactccgattcctagagaactaaatttggctttagtgtgacgggatttgattaagcacttagtatagtcttttgaacacggaaatcctgttgtacttaaagctagcggacccgtgaacaactttgtcaggttcacgtcctataacggttaaaaaacacacacacacatacacaaaccgtttctatgagagattgatgaactttgtttaaaattttaaaaaaaggaacacgttctgtaaacgagtcgctaaatacagaattgtataat

SEQ ID NO: 185 - DNA, 4413 bp, Homo sapiens
ggcgcggagccgggcggtgggaatggagcgagcagattgaggccgccactgcagcgccgccagcatgaacttggccgcgagctgaagcggccggcggcgggcgggcgcgggggcaccggccgctagccagggggtgatctgcaacagggctgggttccttggcggccgcctgagtccaggctgcccgcgccggcggccgcccgcccctcggacactgcccccgccgccgccggagctctgcagcacgccctgtgtctaggtcgtttgggaaacgccttggagagtcaagaataaatttgcaggtcaaacaatggatgactggaaaagtcggcttgtaatcaagagcatgcttccccatttcgccatggtgggaaatcgtcaggagcccagaaagctccaggaatcgggaactgttaagaggagacaagaagaagaccacttccagtttccagacatggctgatgggggctaccctaataaaattaagaggccttgccttgaagatgtcacccttgcaatgggcccaggtgctcatcctagtactgcttgtgcagaactgcaggtccctccattgacaataaatcctagccctgcggctatgggagtggctggccagtcattactgctggagaataaccctatgaatggcaacatcatgggctcaccatttgtagtaccacagactacagaagtgggactgaaagggcccactgttccttactatgagaaaatcaacagcgtgccggctgtagaccaggagcttcaagagctgctagaggagctcaccaaaattcaagacccttctccaaatgagctagatcttgagaagatactggggacgaagccagaagagccactggttttagatcatccccaggcaaccctaagcacaactcccaagccttcggttcagatgtcacacttggagagcctggcttccagcaaggagtttgcttctagttgcagccaagttactggcatgtcacttcagatcccatcctcctccacagggatcagctattcgattccttccaccagtaagcagatagtgtcaccgagttcttcaatggcacagtccaagagccaggtccaggccatgctccctgtcgctctgccccccttaccagtgcctcagtggcatcacgcccaccagctgaaggcgttggcagccagcaagcaggggtctgctacaaagcagcaagggcccacccccagttggtctggtctgcctcctccaggactctctccaccttaccgcccagtgccatcaccacacccaccaccgctgccactgccaccaccaccacccccattcagcccccagagcctcatggtgtcctgcatgtcgtccaataccttgtcgggtagcactctccgaggctctcccaatgccttactgtcaagcatgacgtccagcagcaatgctgccctggggcccgccatgccctatgctcctgagaagctccccagccctgctctcactcaacagccgcagttcggccctcagagctccattcttgccaacctcatgtcctctaccatcaaaacccctcaaggacacctgatgtctgctctgcctgccagcaaccctgggccgtccccaccctatcgcccagagaagctctctagcccaggcttgccacagcagtccttcaccccacagtgttccctgatccgaagcctcactcccaccagtaatcttctaagccagcaacagcagcagcagcagcagcagcagcaagcaaatgtgatctttaagcccataagcagcaactcatccaaaaccctgagcatgatcatgcagcaggggatggcaagctccagcccaggagccacggagccatttacttttggcaacaccaagcccttgtcccattttgtttctgagccgggtccccagaagatgccctccatgcctaccacctctaggcagccttccctgctccactacctgcagcagccgacaccaacgcaggcctcctcagccactgcctcctccacggccactgccaccttgcagctgcagcagcagcagcagcaacagcagcagcagcctgaccattcttcattccttctgcagcagatgatgcagcaaccccagcgttttcagcgatcagtggcctcagattccatgcctgctctgcccagacagcaagaggaacagagatcaggtcttatggcaatgacccctgaacggcagaatgcatatatctcccaacagatgagtccatttgaagccgtccaagaacaagtcacctccaagtgtagccggatcaaggcaagccccccatctagcaagcacttgatgccacccagaactgggcttcttcagaacaatctgagtccaggaatgatcccactcaccaggcaccagagctgcgagggcatgggagtgatctcaccaactctggggaagcggcaaggaattttcacctccagcccccagtgtcccatcctctcacactcaggccagactcccctgggcagacttgactctgtctgccagcatatgcagagccccaaggccaccccaccagaagtgcccctgcctgggttctgtcccagctccctgggcacccagtccttgagtccccaccagctcagacggcctagtgtgccaagaatgcccactgcgttcaacaatgctgcatgggtcacagcggcagcagctgtgaccacagcagtttcggggaaaacacccctcagccaagtggataatagcgttcagcagcactcaccttctggccaggcctgccttcagaggccatctgattgggaggcacaagtgcccgctgcgatgggaacacaagtgcccctggccaacaaccccagcttcagcctgctgggcagccagagcctcaggcagagcccggtacagggcccggtgcctgtagcaaacaccaccaagttcctccagcagggtatggccagctttagtcccctgagccccatacagggcatcgagccaccaagctatgtggctgctgctgccaccgctgctgctgcttctgccgttgctgccagccagttcccaggtccgttcgacagaacggatattccccctgagctgccacctgccgactttttgcgccagccccaacccccactaaatgatctgatttcgtcacctgactgcaatgaggtagatttcattgaagctctcttgaaaggctcctgtgtgagcccagatgaagactgggtgtgcaacttgaggctgatcgacgacattttggaacagcatgctgctgctcaaaatgccacagcccagaattctgggcaagtcacccaggatgctggggcactttaaatctgagcaggatgcccatagaaacccccatggtgacatcactctaggaagtggtgtcgatccatacccgcagttgtctcccgttacaatttgagtggtgttgtcagcccatgcttatccctctctctacctgtgacaaaatggaaagctggtgatttttcaagctacgtgtacatatttgaaaattttgtaaatggttttcctaaacattaatgacagaagtatttatacttcattttgtgactttgtaaataaagcgacggcttttgtttcagtagagttgtgtttactatgcattgttttgtgtttattatacaatgttacaaatatgcagaccgtgttgtttgctccagtgataccttgttaagctaggtggctgagtcgcttatggttttaatgcaatgagcaatgtggatatgaccaagagttgttgtgcaagttgacaaatgccaaatagaaaaccacttggccatttatttctatgttcactaaaaatcctattgccttgtgtgattcttaatctcttttgcgaacctttcagtctccgctagctctttcctaatgagctttacagcagaagctgttttatcgttaagtgccccacagagacactttaccaggaggctgggagagttctccagatttgggagaggcgcagagacagtgtgtgagccgagccctgtctcagcaatccacctggaggagctagagtatcctcctccctttaccattcagaccgagagaaaaagcccagcttgtgtgcaccctcgtggggttaaggcgagctgttcctggtttaaagcctttcagtatttgttttgatgtaaggctctgtggtttgggggggaacatctgtaaacattattagttgatttggggtttgtctttgatggtttctatctgcaattatcgtcatgtatatttaagtgtctgttatagaaaacccacacccactgtcctgtaaacttttctcagtgtccagactttctgtaatcacattttaattgccacctcgtatttcacctctacatttgaaatctggcgtctgtttcaagccagtgtgttttttcttcgttctgtaataaacagccaggagaaaagtgcca

SEQ ID NO: 186 - DNA, 4640 bp, Homo sapiens
atctttgatcaatgtacttgccagggagagcccaagtccttcaaacctcctccttttcaccttcatccttaactttgtgctagagcgagacccacacaacaacagccgaccctccccgccccacccccacccccaaaccagccctcgatcccagcccccggagaggactcgcatttcgacttgcgggacacttttgtgcgttcctctccagagcgcctctcgtgctcgcccctcttgcgctcgctctttattaccttcacctccttttctcccccttctctccctttctccttctcgttctctcccggagttgttgttgcccccctcgctccttctccccccttttttccccttcccctcccgggggtgtgtggcaacttttcctctcgcttctcctccgtctgtttccccttatatgtgaccatggcagtgccggcggctttgatccctccgacccagctggtcccccctcaacccccaatctccacgtctgcttcctcctctggcaccaccacctccacctcttcggcgacttcgtctccggctccttccatcggacccccggcgtcctctgggccaactctgttccgcccggagcccatcgcttcggcggcggcggcggcggccacagtcacctctaccggcggcggcggcggcggcggcggcggcggcagcggaggcggcggcggcagcagcggcaacggaggcggcggtggcggcggcggcggtggcagcaactgcaaccccaacctggcggccgcgagcaacggcagcggcggcggcggcggcggcatcagcgctggcggcggcgtcgcttccagcacccccatcaacgccagcaccggcagcagcagcagcagcagtagcagcagcagcagcagcagcagtagtagcagcagcagcagtagcagcagcagctgcggccccctccccgggaaacccgtgtactcaaccccgtccccagtggaaaacacccctcagaataatgagtgcaaaatggtggatctgaggggggccaaagtggcttccttcacggtggagggctgcgagctgatctgcctgccccaggctttcgacctgttcctgaagcacttggtggggggcttgcatacggtctacaccaagctgaagcggctggagatcacgccggtggtgtgcaatgtggaacaagttcgcatcctgaggggactgggcgccatccagccaggagtgaaccgctgcaaactcatctccaggaaggacttcgagaccctctacaatgactgcaccaacgcaagttctagacctggaaggcctcctaagaggactcaaagtgtcacctccccagagaactctcacatcatgccgcattctgtccctggtctcatgtctcctgggataattccaccaacagatgagaccccgctttctacaccaaccgcaagagacagccttgacaaactctctctaactgggcatggacaaccactgcctccaggttttccatctccttttctgtttcctgatggactgtcttccatcgagactcttctgactaacatacaggggctgttgaaagttgccatagataatgccagagctcaagagaaacaggtccaactggaaaaaactgagctgaagatggattttttaagggaaagagaactaagggaaacacttgagaagcagttggctatggaacaaaagaatagagccatagttcaaaagaggctaaagaaggagaagaaggcaaagagaaaattgcaggaagcacttgagtttgagacgaaacggcgtgaacaagcagaacagacgctaaaacaggcagcttcaacagatagtctcagggtcttaaatgactctctgaccccagagatagaggctgaccgcagtggcggcagaacagatgctgaaaggacaatacaagatggaagactgtatttgaaaactactgtcatgtactgaatctttcctgttgaagaaatccatgttatagaaaagaactttgcagtcagacattcgtcatgggaaagttcagaaaaaaataaagtccttttaagggaacttcctgaattttgtgtattaatgttctttaaaagtttaagtattctacaaaaaaaaaaaaagttttctccattgattttcacctgtggttcataccagagacctgagaatgtttgtaaatgtacaagtatcaaagttcttacagttaattactgcaacttgctgctggacaattgtatacagagttaaaggcaggtctgaataagacctagctttgtttttttctaatggaatgaaccattttcctcttctgaaaattctgtatctgagcacatcaagagactcttgtagcagtggttacccagacttacagaattatgtcctccagaaaccagcaagaacacttggaatgaacgaatgaacttgtagggggcatagaggattcttgaaaaaaaaaaatgcaagagtgattttctgttacattcaatttcaaactctctaattgtgggttttctcctgaagaattttttttcacatactttccaaaagaccaacaaatggatgttgacaacaacccaatgaaataacattttgcatatctgaaaagaagcattgaatataagccaaaagctttcactgaaggtttttttttcttaaaaataaaaaaaaatatataagtgtaacatgttttcattccaaactggtagtggtatatagaattaaagataataatgttgcttcttattcaaactgttggtcatatgtacagtatataaacataaaacacacaaggaaggtattatgtatgcagtagtatactagagtttaggaaaatgaaaattttagaaaatatgttttgtcaccctgttggtcagaaagatgtctttctggttttaacgcatgcaggcatgtaaatatttgtctggagtcacagtattaatgaatgagatcttaagcatctggtgacatcagaactctgtgtcagccacttttatttgtatattgaaccctagctagtgccccaagctgcactattgggaatggattgtggctgaacagcaaatcaaaacaccagaaatatttttatatgttaacgtcatattatgttaatgttgctgaaaacaaaacctaacaaaccttgatgtaccagtccaataccatgtagcgctgagtgataaagttaaaatgtgctgtgcttcccacccttgtcagagggaagggtggctatgtgttattttcactgtctttttgaaagttacagtatgtgttttcactttcgtgcagataactggaagtaaagcggcaaacagtgcttattacatgctaaagttaccttctctttgttttttgcatatctggaattacacctttaaagactgatatgaatcagtacggtcactatacattttatgatttttctgtcatcttaaaattgtatgatcgtaacattatttattaccacaaaacagcaaaatcttcaatgtctaagaaaactagcttaaaatgtttaaatatagttctgattgggtattaattacttgattaagaaaaaattaacattatagatactctggcattacgcttctataccttttaggtcttccttgcaatactggaacataattcttttgtgtagctcactattagccagctaagttcatctttttaataccataaaaaggttatatgtacagttcctattttagcttgcttacaaagggagcattatttttatttaaagtattgctagtaaatgatttgtagaaacttggttttctaagcatagttcttccataaccaccttttgttgtttgagcacaagggattcttttcctagttctatgtgtttgtttccctatatgcagtctttaaaggattacaacacttaaaattgaatggacttgtgtcaagctttttgcatcatacattttttgaaagatttttaaaaaagcctacaacttacatatgtagtagaatcagccattgctctgctcctggcatagagtcacctgtttgttatgtggattaaatagttttaaaatacatatttgaagacctttgagaatgctttagtgtttgatttgaaataaaaggaaattttagcaaggattaaagaaaaaagctatcagctgtatgttaagagagactcttactaacatgttgtaaatattacaattcatgaaatgttattgtaagtctgtaacttaattttttccctgttttagttatacaggttggtttggaaatttgtgttttggcataaacaagtaaaatgtgcccattttatggtttccatgcttttgtaatcctaaaaatattaatgtctagttgttctatattataaccacatttgcgctctatgcaagcccttggaacagaacatactcatcttcatgtaggacctatgaaaattgtctatttttatctatatatttaaagttttctaaaaatgataaaaggttattacgaattttgttgtacaaaatctgtacaaaaatctgtttttacatcataatgcaagaattggaaatttttctatggtagcctagttatttgagcctggtttcaatgtgagaaccacgtttactgttattgtatttaattttcttttccttttcaacaatctcctaataaaactgtctgaaatctcaaaaaaa

SEQ ID NO: 187 - DNA, 3727 bp, Homo sapiens
gcttctctgtggtcttgacaagcgctgcctgggctccgccggctcactaataactgagtgaccttttctttggctgtattatgtctggctgggaagggattgcattttgcagctgagagccggagcttccttcagctcggctcctcgcacgctgctggggtaagttgtcttgaaccaggacggagagagacagcctcggactgcagttgcctaaaaggaggacacctgtggctcagatgcggtcaacaccattgcttggcgtatccttgaggacctcattattttaaacttaaaaaaaaatagacattccctcccccgtcttttttttttttttcaaacaatgcttctttttgacctttcccaaggagaagcgctacaaagcagccactgtgcttactgaacggcctccccctgtatcgcttaattgagaaggtatacaaatgctctcagtccagccagacaccaagccgaaaggttgtgctggctgcaaccgaaagatcaaggaccggtatcttctaaaggcactggacaaatactggcatgaagactgcctgaagtgtgcctgctgtgactgtcgcttgggagaggtgggctccaccctgtacactaaagctaatcttatcctttgtcgcagagactatctgaggctctttggtgtaacgggaaactgcgctgcctgtagtaagctcatccctgcctttgagatggtgatgcgtgccaaggacaatgtttaccacctggactgctttgcatgtcagctttgtaatcagagattttgtgttggagacaaatttttcctaaagaataacatgatcctttgccagacggactacgaggaaggtttaatgaaagaaggttatgcaccccaggttcgctgatctatcaacatcaccccattaagaatacaaagcactacattcttttatcttttttgctccacatgtacataagaattgacacaggaacctactgaatagcgtagatataggaaggcaggatggttatatggaataaaaggcggactgcatctgtatgtagtgaaattgccccagttcagagttgaatgtttattattaaagaaaaaagtaatgtacatatggctggatttttttgcttgctattcgtttttgtgtcacttggcatgagatgtttattttggactattgtatataatgtattgtaatatttgaagcacaaatgtaatacagttttattgtgttaccatttgtgttccatttgcttctttgtattgttgcatttagtacaatcagtgtttaaacttactgtatatttatgctttctgtatttaccagctattttaaatgagctgtaactttctagtaaagaattgaaaagcaaatctcactaatgatacacagatagataaagcaagtctatcaacattaaaaatactaaaaaataaagacacacacagagcattttagtgacatccactacttattgccgctatgagttagagtctatcagtgttcttgttataaccccctattttcagggggttaaaaatcagctttaaaaaaatacataaaaatttcatcttaaagcactttcattttataccaacgtgaaaagtgccatttttagaataactttaaagcttaacaggtttccttttaatatcctttttttgtgtgctctttacttacacaatggctttgttttgctttttcagccacaccccttatgtgaactagtgcctttgggtatcacgtaaaattttttccaaagggttactttaaaaatctgttaccacaattatgagatgatttttaagtgataaattaaacttcttcttgtataaattctgcccagatctctccacaagagctgagggtttcataactttatggcttaataaatgtatgacactgaaaagatttgagtgtgaatctactgaaatcactataatgcacattgaagctatgatggtatttgagtagtgaggttacttttgatcggagcaacataatgctcatagaatcttctagaagaagagaaacaaagggattgataaaatgctgagaactagtgattatatatttttctgtatttacctgacatttattttaatgttcaaaaagtaaacactttaagtttgatgtgttttactctctcattgttttaagtaattgccaactcagaatacatcattcttaggctgaaatttgtctttccattttttaaggtgaaatagtactaccttacgtgatagcatacaaagaagaaagctctagaaagagaaattatggagaatgattatttaaattacaattaaggaaatgagaatatgatcccctcttccgagttgcccacaaacttgcttctttgcttttgctccctgtaatagaactacttttcaacaaatctaattttgcacggcaccgttaaccatattttcactacagcaaacttagtgctatgggttttctttttctttgtttttttcttgatcacttgtataggaaacaatattttccagtgttatttgcatatatattttgtccttccaatatatgcattacagatgaaaattaaatgttatacctgaattcttgggttggggccaaaatattaagctgaaaataatgctggtgtggatttgttttaaaacaaagctttattatgaacatgcatgtgaatctggatattgcctcttatttttaagaaaatggttctgtgaaaagtgaatgatatgtatttttccaaatgcttcatggttaggagtcttcaagttccatgttccccagatttgagatatactaaagaaagaaattcaaaagtagctatttggggcccacaaaaataactattattttagccttagagccttacacttgtttcatgaagagaaaggacttgcataaccaaaataaacaaagcaagacaaattaaaaatatgtgggggagagatcagtgaaaagtggttttcttaatgcagccctgctggtccccattaacaattgcttgaaattcacatggatgtaaaattataattgtcaggatcttattcagatgatcttttaaggtttaactggttttgcttttgtttatctatatgtcaaaatacttgtaaattgggaacaaacttctctcagcttcttgaagttgttcaactatccttgccactggaagaccaaacaaggttttcactgctttttcttttacataatatgctgagaattatttcttatgctttttactacaaacaaaattactcacctggattaaagattaaggccttaatctgtttagattatctttaatctccatgaaatcgtgaaataagacaagaatagtgtttcagctgtaggccattttacagctaattgcccataaattgtagcatttattgacctgaagtactaagctaattgtcttgactactcaaagcccctgaattgttgtcaactttcccctttgtgttgtgtagccctaacgtcatttagcttgttgtctgatgcctccagtaggacacctccgatggagctttgatttctgagcagcgaaagctcccttcctaagatgcatctcgcataggctgcctatgatgaaggaccgtgcacctccactccaacagagtgctgagtttaaaagttgacctgtgtttgtaatttcactttcatcttgcttaataaatatctgctggattctttcattcacttttttacatttggatttatgtttttaataaaaggggtgttacact

SEQ ID NO: 188 - DNA, 2816 bp, Homo sapiens
cacgcactacgggttggcgccagagtcaaaaggcgtcggccctctggcaagatggctgctgcggaggcgttggagcgcggaaatctggaaccgggatggcgacgtctacactgagtcggaggcgaaggagcttactccacgggaacagcctctagataatctgagttgttgaaaatacgaagcctgttactcgtgaacagtggctgacaacagtgttgttgtgagcctggctgtctgcttggacccagaggtttcgtctgccagggtttttggttgtatttaggatttcagggaaaagtgtccaagctttcagtgttggagcaggtatggacgacaaaggcgacccgagcaatgaggaggcacctaaggccatcaaacccaccagcaaagagttcaggaaaacatggggttttcgaaggaccactatcgccaagcgagagggcgcaggggacgcggaggctgacccactggagccgccacccccacagcagcagctgggcctgtccctgcggcgcagtgggaggcagcccaagcgcactgagcgcgtggagcagttcctgaccattgcgcggcgccgcggcaggaggagcatgcctgtctccctggaggattctggtgagcccacgtcctgccccgccacagacgccgagacagcctccgagggcagcgtggaaagcgcttctgagaccagaagcggcccccagtctgcttccacagctgtgaaggaacgaccagcctcttctgaaaaggtgaaaggaggggatgaccacgatgacacctccgatagtgacagcgatggcctgaccttgaaagagcttcagaatcgccttcgcaggaagcgggaacaggagcccactgagaggcccctgaaagggatccagagtcgcctgcggaagaagcgccgggaggagggtcccgccgagactgtgggctccgaggccagtgacactgtggagggcgtcctgcccagtaagcaggagcccgagaacgatcagggggttgtgtcccaggctgggaaagatgacagagagagtaagttggagggaaaggcggctcaggacatcaaagatgaggagcctggagacttgggccgaccgaagcctgaatgtgagggttacgaccccaacgccctgtattgcatttgccgccagcctcacaacaacaggtttatgatttgctgtgaccgctgtgaagaatggtttcatggcgattgtgtgggcatttctgaggctcgagggaggcttttggaaaggaatggggaagactatatctgcccaaactgcaccattctgcaagtgcaggatgagactcattcagaaacggcagatcagcaggaagctaaatggagacctggagatgctgatggcaccgattgtacaagtataggaacaatagagcagaagtctagcgaagaccaagggataaagggtagaattgagaaagctgcaaatccaagtggcaagaagaaactcaagatcttccagcctgtgatagaggcgcctggtgcctcaaaatgtattggccccgggtgctgtcacgtggcgcagcccgactcggtgtactgcagtaatgactgtatcctcaaacacgccgcagcgacaatgaagtttctaagctcaggtaaagaacagaagccaaagcctaaagaaaagatgaagatgaagccagagaagcccagtcttccgaaatgcggtgctcaggcaggtattaaaatctcttctgtgcacaagagaccagctccagaaaaaaaagagaccacagtgaagaaggcagtggtggtccctgcgcggagtgaagcactcgggaaggaagcagcttgtgagagcagcacgccgtcgtgggcgagcgatcacaattacaatgcagtaaagccagaaaagactgctgctccctcgccgtcactgttgtataaatgtatgtatcacctaggggttggcctcctggacccctcccgttctttctggatagccatcccctgggcctgtccaggactgggagttgcagctttgtgttaagctgatcacagacaccggctgcaccatcagcgggaagcagagcccatgtccaggatgcctcctgctgccctgtgtccatccctagtctgtcaggacttcctgtcactgttttccaaagctgtaaacctcactggtgaacgttcaccttaatgattgattctttaatctctgttttcactctcaggctctggtaagtattcgtattctcttcatcccagtctgattgcatagccacactgcccggcacgccacatccacccctgtctgcacatgagttgttctgacaacagcgctgtatacgcttcagtttttccacattgtccacggccagcacatgaaagcatcacttcttttttatgttgtgggaatctttgcaagttagtgttgcatctgattttcaggtgtacatttatttttgactgggcagataggggatttttttttttccatgtccgattcacacgctacacacccacatgaacacattcgaacttcgaaggccacacactcctgcttcataggccccacggtaagtgagttcacacctagaacactgtcctgaccgcaggacgcgtgccttggacttggtattctacatgtgactggctttcttgccctcgtctcttgaatgtttagactcttaagatcatatcctgccccaaatttcaaattaatgaaatgaagatatttcaaacagatctttgaaacctcagattctgtggtgcaattttaatgttttcttgtttctcagttttctgctataaaactattttcaattcagtcaaaaaaaaaaaaaaaaaa

SEQ ID NO: 189 - DNA, 1658 bp, Homo sapiens
cgcgcacacctctcggtgcagattgcaaagcgccttccgttgcgagagctgcagattttgcaagagccaggctcgcccaccttgtagaaggagcgccttgagtcccctctcaccctcggttgcaaagagccgaccgcttgatctggacaccccctcgcccagattgcatgatctcccgggaccctcttgagttgcacgtttctgcaccgaggacctcaaatccccgtcgctcctaggatttgcagcgttctggatactggagggttgcaggctacactcgcccgcccctgggcagacactcgtccaaaccactggagtgtgctggtgactggcaggccagcccttcgcctctccatgaacccgtgagcctgggggcaggtgccaggcgatggcgcggcctgtgagcgacaggaccccggcccctctgctgctgggcggcccggccgggacaccccctggcgggggagcgctgcttgggttgcggagccttctgcaggggaccagcaagcccaaagagccggccagctgtctcctgaaggaaaaggagcgcaaggcggccctgcctgcagccacaacccctgggccaggcctggagactgcgggcccggcggatgccccggctggggcagtggtgggcggagggtccccgcgggggcgcccggggccggtgcccgccccgggtctgttggcgccactgctgtgggagcgcacgctgccgttcggcgatgtggagtacgtagacctggacgccttcctgctggagcacgggctcccgcccagcccgccgccccccggtggcccgtcgccggagccgtcgcccgcgcggacgcccgcaccctccccagggccgggttcgtgcggctcggcttccccccgctcctctcctgggcacgcccccgcccgggctgccctcgggaccgccagcggccaccgcgcaggcctgacctctcgggacacacccagccctgtggacccagacaccgtggaggtgttgatgacctttgaacccgacccagctgatcttgccctatcaagcattcctggccacgagacctttgaccctcgaagacatcgcttctcagaagaggaacttaagccccagccaatcatgaagaaggcaagaaaaatccaggtgccggaggagcagaaggatgagaaatactggagccggcggtacaagaacaacgaggcagccaagcggtcccgtgacgcccggcggctcaaggagaaccagatatcggtgcgggcggccttcctggagaaggagaacgccctgctgcggcaggaagttgtggccgtgcgccaggagctgtcccactaccgcgccgtgctgtcccgataccaggcccagcacggggccctgtgaggctgccccacatccccacctggcggagctctcctccgccttgctgagacttacgccctgttcccttcctgccctgtggcccacgggccggccagctgggtgccccagggacgtgataatgcagataaatacatttatatttttaagaaaaagcgagcctcccccctcccttgcgggggcggggagggttctctgtgtgtgtccccggcacgtcagggaccctatcctcccaccgcctccgttaacacgatcctgaataaatcttgagaaccccagaaaaaaaaaaaaaaaa

SEQ ID NO: 190 - DNA, 927 bp, Homo sapiens
gaggtcagagacttaagtctaaggcactgagcgtatcatgttaaagatgagcgggtggcagcgacagagccaaaatcagagctggaacctgaggagagagtgttcaagaaggaagtgtatcttcatacatcaccacacctgaaagcagatgtgcttttccagactgatccaactgcagagatggcagctgagtcattgcctttctccttcgggacactgtccagctgggagctggaagcctggtatgaggacctgcaagaggtcctgtcttcagatgaaaatgggggtacctatgtttcacctcctggaaatgaagaggaagaatcaaaaatcttcaccactcttgaccctgcttctctggcttggctgactgaggaggagccagaaccagcagaggtcacaagcacctcccagagccctcactctccagattccagtcagagctccctggctcaggaggaagaggaggaagaccaagggagaaccaggaaacggaaacagagtggtcattccccagcccgggctggaaagcagcgcatgaaggagaaagaacaggagaatgaaaggaaagtggcacagctagctgaagagaatgaacggctcaagcaggaaatcgagcgcctgaccagggaagtagaggcgactcgccgagctctgattgaccgaatggtgaatctgcaccaagcatgaacaattgggagcatcagtcccccacttgggccacactacccacctttcccagaagtggctactgactaccctctcactagtgccaatgatgtgaccctcaatcccacatacgcagggggaaggcttggagtagacaaaaggaaaggtctcagcttgtatatagagattgtacatttatttattactgtccctatctattaaagtgactttctatgagccaaaaaaaaaaaaaaaaaa

SEQ ID NO: 191 - DNA, 2737 bp, Homo sapiens
tgacgaaggggcccgaccgcgccgcgtttcgggagcggacgtccgagccacggccgaggcccgattagtccgtccggcaccgctcgggcactttcggaagggaagaggtggagaaccgacgttcgggagcattcggcctcggggacattcggctcgtctcggctcggcctcgggctgactcggcttccgccggcggcgggaacgggcgaaacccgcggcactaagctctctctgagaggcagaattgcgccggccgccggcgagaatctgcctagagccgtccagccctgtcggccggggacgacagccgcctcagcctgtcaggacagtgaggagagcaggggccgagtctctcggaagccctcgtgaggactcggacctattcggactgattcggcttcccacttcggggaacttcgaccctcctcggttcaggactcggtctcggctcggcggcttcgtgcaggttcggctcctactcgggcagcctctgttcgcctcggctccgctccgcgggcggactcggctcggctctgctcggcggctggctgccttttcggtccctattcgggcggcggcttcgggcggcctcggcccagctcgggcgtcctcttcgggccccgcttcgggctccgcgaccggcgcttcgggcggtcccggacggcgccttcgggaaggctcggcggagtccggatggaggactcggactcggcggcaaagcagctgggcctggctgaggcggcggcggtggcggccgcggccgctgtggcggcggcggccgcggccgcggcaggaggcgaggcggaggagccggtgctgagcagggacgaggactcggaggaggacgcagactcggaggcggagcgggagacgccgcgggtcacggcagtggcggtgatggcggcggagcccgggcacatggacatgggcgccgaggccctgcccggccccgacgaggccgccgctgccgcagccttcgcagaggtgaccacagtgacagtggccaacgtgggggctgctgcagacaatgtcttcaccacgtctgtggcgaacgcggcatccatctcaggacatgttctgtctggtaggacggcccttcagatcggggacagcctgaacaccgaaaaagcgacactgattgtcgtccacacagatgggagcatcgtggagaccaccgggctgaaaggcccggcagctcccctcaccccaggtcctcagtctcctccaacccctctggctcccggccaagaaaaaggtggaactaaatacaactgggacccttctgtgtacgacagtgagctgcccgtacggtgccggaacatcagcggcactctgtacaagaacaggctcggctcaggcggccggggacggtgcatcaagcagggggagaactggtacagtcccaccgagtttgaggccatggcaggaagagccagcagtaaggactggaaaagaagcattcgctacgcgggccgacccttgcagtgcctcatccaggatgggatcttaaaccctcacgctgcctcttgcacctgtgctgcctgctgcgacgacatgaccttaagtggcccagtcaggctttttgtgccttacaaaaggcgcaagaaggagaatgaactgcccacaactcccgtgaagaaggactcccccaagaacatcacattgcttccagccaccgcggctaccaccttcaccgtgaccccctcgggacagatcacgacctcgggggcactgacctttgaccgagcgtccacggtagaggccactgctgtcatatcagagagtccggcccagggcgacgtcttcgcaggggccacagtccaagaggccagcgtgcagcccccatgcagggccagccaccctgagcctcactaccccggctatcaggacagctgccagatcgcaccgtttccagaagctgcgttgccaacgtcacatcccaaaatagtgttgacatccctgcctgcgctggcggtcccacccccgactcccaccaaagcggcacctcccgcgttggtcaatgggctggagctgtcagagccgcggagctggctgtacctagaagagatggtcaactccttgctcaacacagcgcagcagctgaagacgctgtttgagcaagccaagcatgccagcacctaccgagaagctgccacaaaccaggccaagatccacgctgacgcagagcggaaggagcagtcctgcgttaactgcggccgggaggctatgagcgagtgcaccggctgccacaaggtcaactactgctccaccttctgccaacgcaaggactggaaggatcaccagcacatatgcggccagtcagcagctgtcaccgtccaggcagacgaagtccacgtggctgaaagcgtgatggagaaggtgaccgtgtgaggctccatcggccgccctgggagctggggcccctcgcactcctgtgaggcttttgcaggtcgaaggcccccctgaggactctggggggacgttgagaagaggggtgtgggaaggtaaagaaacttgctggacaagtcattaacacactttaagcgaatggtgccctgggaagcgcactccccctgcccgggccccctgcccgctcgcggacagattttttatccctgggatcatgagcgtccggtcttgcccacagggcctgtgctgcgacgcacatacatacgtgttgtgtctgtcaataaagtgtaaataaggtctccctgccaaaaaaaaaaaaaaaaaaaaa

SEQ ID NO: 192 - DNA, 4183 bp, Homo sapiens
cgcagtgctgctggggcattgcctgtgacaaccaggtctacgtgtatgtgtgtgccagcgatgtccccatccgccgccgagaggaggcctatgagaatcagcgctggaatcccatgggcggcttctgtgagaagctcctgctgagtgaccgctgggggtggagtgacgtgagtgggctccagcaccggccgctggacagggtggcactgccctcgccgcactgggagtgggagtctgactggtacgtggatgagaattttggaggtgaacccactgagaaaggggggtggacgtacgccatcgactttcccgccacctacacgaaagacaagaagtggaattcttgtgtgcggcgccggaagtggatccggtacaggagatacaagtcccgggacatctgggccaagatcccctcgaaggatgaccccaaggagctgcccgaccccttcaacgacctctctgtagggggctgggagatcacggaggagcctgtgggccgcctgtcagtgtgggctgtgtctctgcagggcaaggtgtggtacagagaggacgtcagccactccaaccccgaagggtcctcctggtccctgctggacacccccggggaggtggttcagatcagctgtgggccccacgacctcctgtgggccacactctgggagggacaggccctggtccgggaaggaatcaacaggagcaatcccaaaggaagttcctggtccatcgtggagcctcctggatctgaaaacggggtcatgcacatctcggtgggagtcagcgtggtctgggctgtcaccaaggactggaaggtgtggttccgaagaggcgtcaactctcacaatccctgcggcaccagttggattgagatggttggtgagatgacgatggtgaacgtgggaatgaacgaccaggtgtggggcattggctgtgaggaccgagccgtgtacttccggcagggtgtcacccccagcgagctcagtgggaagacctggaaagccatcatcgcggcccgagagtgtgaccggtcacactctggcagctcgtctagtctcctcagtgccggctgcttcttcggtgatgaggtgaggggtagtggcgagtctgcccccagcgacaccgatgcctcctcggaagtcgagagaccagggcctggccagattctccctgcagaacctctagacgattccaagaatgccacagggaactcagcctcaggcctgggggctggcaggaccgcagaagataccgtggaagatgcctgcccagccgagggcagcagggaggccagacccaacacgcaccccggcccggcccccaccccggccgagctgccctggaccaatattgacctcaaggaggccaagaaagtgcccagccactcggccgctggcttccccgagaccaccagcctctcctctctggggctcctcccactgggcttggaggagccgtatggggtggatgaccacccgctgtgggcctgggtgtcgggaggcggctgcgtggtggaggcatgtgccatgcccagatggttcactgtccaggcgggcctgtcctcctcggtacacatgctgtccctgtccatcacgccggcccagaccgctgcctggaggaagcagatcttccagcagctcacggaaaggaccaagcgggagctggagaacttcagacactacgagcaggccgtggagcagtcggtgtgggtgaagaccggggcgctgcagtggtggtgcgactggaagccccacaagtgggtggacgtgcgcttggccctggagcagttcacggggcacgacggcgtccgggacagcatcctcttcatctactatgtggtccacgaggagaagaagtacatccacatattcctgaatgaggtggtggcgctggtcccagtgctgaacgagaccaagcactcctttgccctgtacacccctgagcggacacggcagaggtggccggtgcgtctggctgctgccaccgagcaggacatgaatgactggctcgccctgctcagcctgtcttgctgcgagagccggaaggtgcagggccgcccgtccccgcaggccatctggtccatcacctgcaagggggacatcttcgtgagcgagcccagcccagacctggaggcccacgagcaccccctgccctgcgaccagatgttttggcggcagatgggaggccacctgcggatggtggaggccaacagccggggcgtggtgtggggcatcggctatgaccacacggcctgggtatacacaggcggctatggaggcggctgcttccaaggcctggccagcagcaccagtaacatctacacgcagtcagacgtgaagtgtgttcacatctatgagaaccagcgctggaaccccgtcacaggctacaccagcaggggtctgcccacggaccggtacatgtggagcgatgcctcggggctgcaggagtgcacgaaggctggcacgaagcccccgtccctgcagtgggcctgggtttccgactggttcgtggatttcagcgttccggggggcacggaccaggaggggtggcagtatgccagcgacttccctgcctcataccatgggtccaaaacgatgaaggattttgtgaggaggaggtgctgggccagaaaatgcaagctggtgaccagtgggccctggctggaggtgccccccatcgccctcagggacgtgtccatcatcccggagagcccgggtgccgaggggagtgggcacagcatcgccctctgggccgtcagcgacaagggggatgtgctgtgccgcctgggcgtgtcggagctcaaccctgcgggctcctcctggctgcacgttggcaccgaccagcccttcgcctccatctccatcggggcctgctaccaggtgtgggccgtggcaagggacggctccgccttctaccggggatccgtgtacccctcgcagccagccggtgactgctggtaccacatcccgtccccaccgagacagaggctgaagcaggtgtccgcggggcagacgtcggtgtatgccctggatgagaatggaaacctgtggtatcgccaagggatcacgcccagctacccgcagggctccagctgggagcacgtgtccaacaacgtgtgccgagtgtccgtggggcccctggaccaggtctgggtgatcgccaacaaagtgcagggcagccacagcctgagccgggggacagtgtgtcatcgcaccggcgtgcagcctcacgagcccaagggccacggctgggactacggcatcgggggaggctgggaccatatctctgtccgggccaatgccaccagggccccccggagctcgtcccaggagcaggagccgagtgccccaccagaggcccatggccccgtctgctgctgaggcccccccacacacctacatgcagggacggtgcccagtttgggggatcaaggctgagccattcttgtgctggagtgtgcaccgtgggagcaatgtggcccaggtggactcaggagggaacctggccccaaggctgcggccacttcagaggcactggctgagacggccctgaaatgtgaagctccgcggacactcccacacgtgtccccgtctgcgaggagtcccggggtgtggggcatggggtggggctgcacctcccagaggcccctcccacccttcccttcccctctcccttctgcctttccaggactagaaccgggaacctggagccctccgggaacgccggccctggggcagcagagccaggatggagccctcctgagctggcatctcagacagcacccgggcccgccacccctcaccaagagagatggccatggggctcagggcctctttaccatgtgcagtgaccatttctcagagcaggacttgcaaagaggctttaatttcaaaagtgaaggaaggaggccaggcgccgtggctcacgcctgtaatcccagcactttgggaggctgaggtgggcagatcacctaggtcaagagtttcaaaccagacgggccaacatggtgaaaccccatctctactaaaaatacaaaaaaaaaaattagctgggcatggtggtgggtgcctgtaatcccagctactcgggaggctgaggcaggagaatcgtttgaacccgggaggcggaggctgcagtgagccgagatcatgccactgcactccagcctgggcgacagagactccatctc

SEQ ID NO: 193 - DNA, 2565 bp, Homo sapiens
gtagcgcttgtgtcgacatcggcgcgcgccgagcccggaagaggcgcgggctaggaaaggagttggttcgcgcaggtgcggcgcctgggtccccatggcgctgtggcgcggctccgcgtacgcgggcttcctggcgctggccgtgggctgcgtcttcctgctggagccagagctgccaggctcggcgctgcgctctctctggagctcgctgtgtctggggcccgcgcctgcgcccccgggacccgtctcccccgagggccggttggcggcagcctgggacgcgcttatcgtgcggccagtccggcgctggcgccgcgtggcagtgggagtcaatgcatgtgttgatgtggtgctctcaggggtgaagctcttgcaggcacttggccttagtcctgggaatgggaaagatcacagcattctgcattcaaggaatgatctggaagaagccttcattcacttcatggggaagggagcagctgctgagcgcttcttcagtgataaggaaacttttcacgacattgcccaggttgcgtcagagttcccaggagcccagcactatgtaggaggaaatgcagctttaattggacagaaatttgcagccaactcagatttaaaggttcttctttgcggtccagttggtccaaagctacatgagcttcttgatgacaatgtctttgttccaccagagtcattgcaggaagtggatgagttccacctcattttagagtatcaagcaggggaggagtggggccagttaaaagctccccatgccaaccgattcatcttctctcacgacctctccaacggggccatgaatatgctggaggtgtttgtgtctagcctggaggagtttcagccagacctggtggtcctctctggattgcacatgatggagggacaaagcaaggagctccagaggaagagactcttggaggttgtaacctccatttctgacatccccactggtattccagttcacctagagctggccagtatgactaacagggagctcatgagcagcattgtccatcaggtctttcccgcggtgacttcccttgggctgaatgaacaggagctgttatttctcacccagtcagcctctggacctcactcttctctctcttcctggaacggtgttcctgatgtgggcatggtcagtgacatcctcttctggatcttgaaagaacatgggaggagtaaaagcagagcctcggatctcaccaggatccatttccacacgctggtctaccacatcctggcaactgtggatggacactgggccaaccagctggcagccgtggctgcaggagctcgtgtggctgggacacaggcctgcgccacagaaaccatagacaccagccgagtgtctctgagggcaccccaagagttcatgacttcccattcggaggcaggctccaggattgtattaaacccaaacaagccagtagtagaatggcacagagagggaatatccttccacttcacaccagtattggtgtgtaaagaccccattcgaactgtaggccttggagatgccatttcagccgaaggactcttctattcggaagtacaccctcactattaggaagattcttaggggtaatttttctgaggaaggagaactagccaacttaagaattacaggaagaaagtggtttggaagacagccaaagaaataaaagcagattaaactgtatcaggtacattccagcctgttggcaactccataaaaacatttcagattttaatccgaatttagctaatgagactggatttttgttttttatgttgtgtgtcacagagctaaaaactcagttcccaaatccccagtttatgcagcgccatcaggtattttaagctaaacttcttcacccctgagagcatgtcagctggagaaaagcagttcttccttgcccacttgagaagtgcacgcccactcacccaacatcctggtctctaggaaagcctcatgtgaggttcctctttctttcagctcagtgcccatgggcaaggatcatgatttccattccgtgttacaatgacaatatttaatgagcataaccttctcagtctcctgctctcaaatttaggacagagccgctaaggacaaaacaatccctcccgtgctttatgatggcagcaggggctggggagcctctgagggactctttcattctgcagttgtctggaagcctgggtggcgtcatgagctgaaggatcatgctttcctgtcctggctccataggttataggctggctggtgaaaggttcacgtggcccaggctgaacttcattgcctagctttggatgtgctttctgccataaagactgatttttgttcgttctgagccttcaaggaatttgttttttacaactggaatatgctcctgtgtgtgttaacagatcatggatgttttatgttttcactgatcatttaaagagtttgacctcagagctccaggatcatcagtaaatttgtcatgttatatatttatttttttataaatcaagacttctgtgtgctcttaaatatattaaaaacaatttacatttcaggaaaaaaaa

SEQ ID NO: 194 - DNA, 3122 bp, Homo sapiens
gagtaactagagcaacagttgttctccctcgctggagtggtgaataggagccgggaggaggggactgttagggtcgggctgcctcagtctccacagtaattaagaggaaattgagttggatacagcggacatgaggcctggaatgggtaccccaaacccatgcatcttaagtgtctgggtccccacgcccccttctgcctgccaggagtactctgtgcagccatcctgtaactgcttcagtccagagaaggatagcatccatccctccctccagctcgcctctctgctgaggctttctcctctccactcagcatttgcaacagcttctctcctggcacttgtctgggaatatcaagttaaaaattacaacacccaattttgataactttagttgagagaaacaacctctagtgaagactgataagtaacttattgcccgtagtcccatgttcctttgtctccaccaagaggaattaccagcccagcagttctgccctcactagagtcccgtccaggagcttgagaggagaggatttttagggctggactgcctcagtctgcacagtaataagttgagttagacacagtggacatgaggacctggactcagatatctgaagaatccttattatttttttgttggcttgttttgagacagagtcaccctgttgcccaggctggagtgcattggcgcaatcttggctcactgcaacctctgcctcccaggttcaagtgattcttcttcctcagcctcccaggtagctaggattacagacatgcgccaccacgctcagctatttttcgtatttttagtggagatggggtttcaccatgttggtcaggctggtcttgaacaccagcctcagcctccccaagtgctgggattacaggcatgagccacagtgcccggccaaaatccttaatgtttttgttttttggtttttttttttgagacagtcttgctctgtcacccaggctggagtgcagtggcacaatcttggctcactgcaagctccgcctccggggttcatgccattctcccgcctcagcctcccgagtagctgggactacaggcgcctgccaccacgcccggctgattttttgtattttttagtagaggcagggtttcaccgtgttaggatggtctcgatctcctgacctcgtgatccgcccgcctcggcctcccaaagtgctgggattacaggcgtgagccaccgcgcccgggctatccttaatgttgatattagtggttagcacatgttttggaggaggacttcacactttttaaactatgctccctcgtattttctataagcagtcttaaattctttctggaataaagcaagattgatcagtatttctcaaggaggattatttggcaggcagtagctactgctcagagaacttggtattgttacatgcatcctggaagtatctgtgcctatttctagacggcctcagacgacttttttctgagtcctggacccttgaatctgcagccaagcaagctcttgggtccctcccaagtctcatgtttagtaaagccctgtgagaataattttattggtggaggagtcaagatgatacttccctcacctgcatcagaggaaaccacatcagaaacaatccacctagaaaaacactgcatacaggaaagctgacaacttgccctgagaaatcacagctttggtgcaagaggtgaagccgaactggtaaaagatcaaagtgaattcagagatcaaactgtactagggaaaggagcagaggctgagatcttgctgccagcgtgacctctcacagagtggcccagcagaggctgtgcagagatggccagagccaggacccagccctgtggagcccctgggcacatgtggtcccgagtgaagccgtgcctgttgctctgaacaggtgggatcaatctgtaggtttttccacttttcacagagtgtggctctctttaggtctgcactccctctctgcgcagggcggacctccctgggctctgcagcatgatctcctgtcccaagacagtcgtgctcttggacagttagcttctgtcattaggaagtgcccacatgagctcttgtttattggaaaccgtgttctatgcctcctttggggtttctgcaactcagtttggcaggtagcttagtggtccacttggtctcaaattccagctccaccatgtgcagttgtgtgttctttggcaagttcctcccctcctccgaatctgtcagtgggggaagagtgcatgtctcacagagttgaggtgagaaataagttaatgaatatgaaattctttgcccagcccctggcacgtggaagggctcagcaatcctgtatccgttgtagtggtcatcactctgtggctcttcactgcttttgttttgttttgggagggggtggagaacaatttgttctgtgtttgtgtggggcaaggcctgtcttcagggctctctccaaccacgtacgctctggctggagcttctgaaaggacacagttcttgcatagaagttgctttctccagcttgcccaccaggcagtctggcttcagacatctatgttgcccttttaagtcaatttggctgtttaagtggaatgtttgtgtcagtctgataattgttaattcatttgatcctcataccaacccttacttgcctccttttacagatggaaaaatcaaacttggacagtaatttccacaaggaaaagccccacagctggaaagcggtgggagcaggaggccacactgggtacaggagtacccatctccccacaggagccccacactgtctcacccttaggaagcccaaatgctcactccttgagtttctaatgcattctttctgatgtacaggaagaggggaaggaaggaagagcttttccatttggtgctccaatgtctcctgctggacccatctgcctagtggaaggcagcaaaatttcaagaaacaggtgaggttgagcagcttggtgcaaccccatggggcctggagttggagctcaacagcaatggatttcagagaccaccctgaaactcccagtaaaaaagacttgggagacatgttaataaactcaagcatttgatcgacccaaaaaaaaaaaaaaaaaaaaaaaaaaa

SEQ ID NO: 195 - DNA, 3326 bp, Homo sapiens
gaggggcggcccgcggccatggagacgggcacggcgcccctggtggccccgccgcgccgtcatggcgcccccgcggccccctcgccgccgccccggggttcccgggccgggcccgtcgtggtggtggctccgggacctccagtgactacggccacttcggcccccgtcaccctggtggcccccggggaggcgcggcccgcctgggtcccggggtcggccgagacctctgctccggccccggccccagccccggccccagccccggctgtcacgggcagcacggtggtggtgctgaccctggaggcctcgcccgaagccccaaagccgcagctcccctccggcccggaatccccagagcccgcggcagtggctggagttgagacatcgagggctctggccgcaggggcagactcgccgaagacagaggaggctcgaccctcacccgccccaggaccagggacccccaccgggacccctaccaggaccccttccagaacggctcctggtgccctgaccgccaaacccccgcttgcccccaagccgggaaccacagtggcctcaggagtgactgcacggagtgcatcaggacaagtgacaggtgggcatggagctgccgcagcaacatcagcatcagcaggacaggctcctgaggacccctcaggccctggcacaggcccctctgggacttgtgaggctccggtagctgtcgtgaccgtgaccccagctccggagcctgctgaaaactctcaagacctgggctccacgtccagcctgggacctggcatctctgggcctcgagggcaggccccggacacgctgagttacttggactccgtgagcctcatgtctgggaccttggagtccttggcggatgatgtgagctccatgggctcagattcagagataaacgggctggccctgcgcaagacggacaagtatggcttccttgggggcagccagtactcgggcagcctagagagctccattcccgtggacgtggctcggcagcgggagctcaaatggctggacatgttcagtaactgggataagtggctgtcacggcgattccagaaggtgaagctgcgctgccggaaggggatcccctcctctctcagagccaaagcctggcagtacctgtctaatagcaaggaacttctggagcagaacccaggaaagtttgaggagctggaacgggctcctggggaccccaagtggctggatgtgattgagaaggacctgcaccgccagttccctttccacgagatgtttgctgctcgaggggggcatgggcaacaggacctgtaccgaatcctgaaggcctacaccatctaccggcctgacgagggttactgccaggcccaggcccccgtggctgcggtcctgctcatgcacatgcctgcggagcaagccttttggtgcctggtgcagatctgcgacaagtacctcccaggttactacagtgcagggctggaggccattcagctggacggggagatcttttttgcactcctgcgccgggcctccccgctggcgcatcgccacctgcggcggcagcgcattgaccctgtgctctacatgacggagtggttcatgtgcatcttcgcccgcaccctgccctgggcgtcggtgctgcgtgtctgggacatgtttttctgtgaaggcgttaagatcatcttccgggtggccctggtcctgctgcgccacacgctgggctcagtggagaagctgcgctcctgccaaggcatgtatgagaccatggagcagctgcgtaacctgccccagcagtgcatgcaggaagacttcctggtgcatgaggtgaccaatctgccggtgacagaagcactgattgagcgggagaatgcagcccagctcaagaagtggcgggaaacgcggggggagctgcagtatcggccctcacggcgactgcatgggtcccgggccatccacgaggagcgccggcggcaacagccacccctgggcccctcctccagcctcctcagcctccctggcctcaagagccgaggctcccgggcagctggaggggccccgtccccgccgccccccgtccgcagagccagtgctgggcctgccccagggcctgtggtcactgctgagggactgcatccatcccttccctcacccactggcaatagcacccccttgggttccagcaaggagacccggaagcaggagaaggagcggcagaaacaggagaaggagcggcagaaacaggagaaggagcgggagaaggagcggcagaagcaggagaaagagcgagagaagcaggaaaaggagcgagagaagcaggagaaggagcggcagaagcaggagaagaaggctcaaggccggaagctttcgctgcgtcgaaaggcagatgggcccccaggcccccatgatggtggggacaggccctcagccgaggcccggcaggacgcttacttctgacctctgccctggggctggactgcatggcccccctctttccctcagccaagaacaggcctggcccaaggtgccaccccctagcaccttgtcaggctgtcccttgctggggaaagtggcttggttccccatctcctcgccagctgctgatccctacacgggcaggacagatgggcagctgcaaatgagtctggagcctctcatctcccatgaggctcagctggggtctctgtcgctcctgccccagttccctctgggtcccctcctaggtgctgtcctgaatggcccgttgtcatcccaggggtgactcctggtgatgggagtcagcagtttcagattcttacactccatagctccccttaccatgaggtggagctggcttccttttccctgtcttcagccctccctgtctcccccacttcctggccagggctctcattctggacctgtgttgtaattgtgtacagaggatggcgttggcctggggtgggggtgctcgctttgtcttctgtcctttggttctccttccataatgctcctgtacccagtttatttaaggggacatgcactggaataggaaatgtcccccatctcccttcctgcaccctgctgtgctccctccaaacccaccttgctctgtgttctcaggcccccctgcttttgtctcaccaggacccatacctttcaccttgttcccttccacccctccagttagtccctatctgggtaagggtcttcccttgagctccagggggtggaacccaatgtttacattctcttctgtctctgcccccaccccatgcagcgctttgaggaattggaaaagaacctgctgttgtacctgggaaaaaaaaaaaaaaaaaaaaaaaaaaaaaaaaaaaaaa

SEQ ID NO: 196 - DNA, 3151 bp, Homo sapiens
ggccctagcggcttggcggagctggagccctccctggcagtgcgtcggcgctgggctatggccccctcctctccgggggatcgtcgccttggtcccccgaccctaggagtcgggcagggcagaaccaggctaaagaaacgtccagcgtagcttcaaggatgcaccgcgtgatccctatcggatctccccgacgcgtcaggcctgcctagacggtgctgggagcgcgtctccttgaacgttgtcccgcctgggattgcgaggcttctcagaactttgcttctccagcagaataatcctgcggaagactgagcagttcttgtgagtgtaaaaccatggcccatgcattggtgacgttcagggatgtggctatagacttctctcagaaggaatgggagtgcctggacactacccagaggaaattgtacagagatgtgatgttggagaattataataacttggtctcactgggatattctggctcaaagccagatgtgattaccttactggagcaagggaaagagccctgcgtggtggcgagggatgtgacaggaagacagtgccccggtttgttatccaggcataagaccaagaaattatcttcagaaaaggacattcatgaaatcagtttatccaaagagagtataatagaaaaaagtaaaactcttcgtctgaaaggatccatttttagaaatgagtggcagaacaaaagtgagtttgagggtcaacagggacttaaagaaagatctatcagtcaaaagaaaatcgtctctaaaaaaatgtcaactgatagaaaacgtccctcttttactctgaatcagagaattcacaatagtgagaaaagctgtgactcacacttggttcaacatgggaaaatagattctgatgtgaaacatgattgtaaagaatgtgggagtacttttaataatgtctatcagcttactctccatcagaaaattcatactggtgaaaaatcctgtaaatgtgagaaatgtgggaaagtttttagtcatagctatcaacttactctgcatcagagatttcatactggtgagaaaccctatgaatgtcaagaatgtgggaagacctttactctttacccacaacttaatcgacatcagaaaattcacactggtaaaaaaccctatatgtgtaagaaatgtgataagggtttttttagtagattagaacttactcaacataaaagaattcatactggtaagaaatcttatgaatgtaaagaatgtggaaaagtttttcaacttattttctactttaaagaacatgagagaattcatacaggtaagaaaccctatgaatgtaaggagtgtgggaaagcttttagtgtatgcggacaacttacccgtcatcagaaaattcatactggtgtaaaaccctacgaatgtaaggaatgtggaaagacctttagacttagtttttaccttactgaacacagaagaactcatgcaggtaagaaaccttatgaatgtaaggagtgtgggaaatcatttaatgtgcgtggacagcttaatcggcataaaacaatccatactggtataaaaccttttgcatgtaaggtgtgtgagaaggcttttagttatagtggtgacctcagagtacattctagaattcatactggagagaaaccatatgaatgtaaggaatgcgggaaagcctttatgcttcgttcagtccttactgaacatcagagacttcatactggtgtgaagccctacgaatgtaaggaatgtgggaagacctttcgagttcgttctcaaattagtctacataagaaaattcatactgatgtgaagccctacaaatgtgtacgatgtgggaagacctttagatttggtttctaccttactgaacaccagagaattcacactggtgaaaagccctataaatgtaaagaatgtggaaaggcctttattcgtagagggaatcttaaagaacatctgaaaattcattctggtttaaaaccctatgactgtaaagaatgtgggaagtcctttagtcggcgtgggcagttcactgaacatcagaaaattcatacgggtgtaaaaccatacaaatgtaaagaatgtgggaaggcctttagtcgtagtgtagaccttagaatacatcaaagaattcatactggtgagaaaccctatgagtgtaaacaatgtgggaaggcctttagacttaattcacaccttactgaacatcagagaattcacactggtgagaaaccctatgagtgtaaggtatgtagaaaggcctttagacaatattcacatctttatcaacatcagaaaactcataatgtaatttaatataagaaaaggtttccatgtcatgctctatttatagaatatcaaaatatttatggccagaagttctgtcaatgtgttgatgtttttttacacatattaacttaataaatgtatgagtcttaaatacctcttagttctcattaaatttaggaaaattcacactagaaaataaagctgttaatgtaacagttgtggaaaagtgttctagcaacagcatatacttatcatcattgcctttccactactctactatctgtgtgatattagacaaaatatttgcttcttggtacctcagctgtaaaatgaaacacacctaaaagtgtggttgtttccaacatgtataatacagcaacaactatctggcccaaactgctttggattaatattggatattactgtttttattatcatcaacattattattagtggatttcttaataggaagatgcaatggagatgacaaatttggaaaaaccactcatcacttacatttcatgaagtacttctttgataaaatctgttatgggctgaatgtttgtgttcccgtaacaattcctatgttgaaacacgaatcccaaggtgatggtatttgaaggtagggcctttaggaggaaattaggtcatgagggtggagccttcatgagtggaattactgcctttataagaagaagccaaagagccagctagctctttcaaccacatgaggttacagcaagaagtcagcagtctacagtgcaaaagagggccttcaccagaacccaagcatgctggcaccttgaccttggactttcagcctccaaaactgtgagaaataaacctcagttgtttataagcca

SEQ ID NO: 197 - DNA, 2308 bp, Homo sapiens
aagaggatgcgaccagaggcagctgtcccgagcagcgcacggtgatcgcctcccccggaggaggaggcgcctagacggttgcctcctttcttgtttccccaccaccacccccgtaattacattggctgctggaggggaccgggagagacagaggaggcgcctggcttcccccgcacgcccgccacctctgctctttcccgtctcgggccaggatgactggagtctttgacagtctagtggctgatatgcactcgacccagatcgccgcctccagcacgtaccaccagcaccagcagcccccgagcggcggcggcgccggcccgggtggcaacagcagcagcagcagcagcctccacaagccccaggagtcgcccacccttccggtgtccaccgccaccgacagcagctactacaccaaccagcagcacccggcgggcggcggcggcggcgggggctcgccctacgcgcacatgggttcctaccagtaccaagccagcggcctcaacaacgtcccttactccgccaagagcagctatgacctgggctacaccgccgcctacacctcctacgctccctatggaaccagttcgtccccagccaacaacgagcctgagaaggaggaccttgagcctgaaattcggatagtgaacgggaagccaaagaaagtccggaaaccccgcaccatctactccagtttccagctggcggctcttcagcggcgtttccaaaagactcaatacttggccttgccggagcgagccgagctggcggcctctctgggcctcacccagactcaggtcaaaatctggttccagaaccgccggtccaagttcaagaagatgtggaaaagtggtgagatcccctcggagcagcaccctggggccagcgcttctccaccttgtgcttcgccgccagtctcagcgccggcctcctgggactttggtgtgccgcagcggatggcgggcggcggtggtccgggcagtggcggcagcggcgccggcagctcgggctccagcccgagcagcgcggcctcggcttttctgggcaactacccctggtaccaccagacctcgggatccgcctcacacctgcaggccacggcgccgctgctgcaccccactcagaccccgcagccgcatcaccaccaccaccatcacggcggcgggggcgccccggtgagcgcggggacgattttctaaccccagggagaactcgccagagactgagagcagagaccacttatcctcattgcttaccccgagccggggttccctcctcccggcccgctgccgccacccacctctcctgcaggctgcgacctgcagtggcccgtctcaggccctgctcactcccggggccaccaaacgggcccctctctcgggggaaccggacagcagcttggcaaaggcctccctaaaaggccgcatttctgacctgagccccgggtctcggctgtttcgagccccgcctcggacttgccttccctcccctccgggtgagcctgtctggcgccttcctcgccccgggctgagagctgggtcccgggagatggaagcctcccaggcgcgcgaggcttcccgggcgctctgaggcttctttctcctcgcccgctcccctgggctcagctcggacgctgcagttattgacctcccggtcccgcctgcccgccctcccccacgtggccccttgacccgggcggccccgccgcttctttccttcctgcagttcccagccctcggagcccccatcccttatcttacccccaccgcgctcccccaggagcgctccctcagctctctcctcatccatcaccagtggagtttttttatttgttatttttttaaaagtttaggtgcctttgcggatgacctcattttgacgttgaaaaaatgattttttaatatgtgaacactgcaaaaatgtgtttaaattatcttttttaaaacctattcaggattattagcctggacttggacacagagtttgtaaataaaggtgtctgtgcagattttcccactgatttatttgtataaaaatactcatcttttcagacttttttgtaaacccccagttgtgaaaactgcagtttagcagtgacctcagcaacccctcctttttattttttcctttaaaaacatttcagttaaattaagctactgatttggatttgttttatcgtatcctaaagtctttgttgttgaaatgaaaggtattttggggttatttattatgaaaacaacatgctcttaatgttgattttacaatatgaagagattatttaaataaattattgttttcattggaaaaa

SEQ ID NO: 198 - DNA, 2613 bp, Homo sapiens
agcatttgattgtggcttgggacgcgaggagaggcgcgcagcgaccgcctgacggcaggcaatggtgtaagcgcctctcggcctccccctccccccagacgcggccgggtcctcccttcgccttctggacacacacccctgcctcgtctcttccgcctctctcgcactccggtccgttcctgtcctctgcggaggccagccctggggaggtgcagcgcccgccaggatgagtggctccttcgatcgcaagctcagcagcatcctcaccgacatctccagctcccttagctgccatgcgggctccaaggactcgcctaccctgcccgagtcttctgtcactgacctgggctactacagcgctccccagcacgattactactcgggccagccctatggccagacggtgaacccctacacctaccaccaccaattcaatctcaatgggcttgcaggcacgggcgcttactcgcccaagtcggaatatacctacggagcctcctaccggcaatacggggcgtatcgggagcagccgctgccagcccaggacccagtgtcggtgaaggaggagccggaagcagaggtgcgcatggtgaatgggaagcccaagaaggtccgaaagccgcgtacgatctactccagctaccagctggccgccctgcagcgccgcttccagaaggcccagtacctggcgctgcccgagcgcgccgagctggccgcgcagctgggcctcacgcagacacaggtgaaaatctggttccagaaccgccgttccaagttcaagaaactctacaagaacggggaggtgccgctggagcacagtcccaataacagtgattccatggcctgcaactcaccaccatcacccgccctctgggacacctcttcccactccactccggcccctgcccgcagtcagctgcccccgccgctcccatacagtgcctcccccagctacctggacgaccccaccaactcctggtatcacgcacagaacctgagtggaccccacttacagcagcagccgcctcagccagccaccctgcaccatgcctctcccgggcccccgcccaaccctggggctgtgtactgagcacccatctggcctgcacccttgacaaaggaccccaggaccaggcagaaggcgcctccgtcctagccactcaggaatcatcgaggagcacagggaaaaggaactccctttccccctcccttgccccttcctccagggacccaagcgcttccagatgacatttgcatggaccaaggatgccccctgaacctccctccctctgcctagacactggggtacccctccagatgtggggacattccaccccagtggggacagccattcccctacctgctccaggagcctggattggctttaaatggctcatcatcttccagcttcttaaacttagtgcctgttcccagactggagaccttgggatgggggagagtgtggagggtttgcgggtcctgcctgtgctggggcacctggcaccgtggatcttaaaacttgccaggcctagttcctcctgagcctctggtggtctccccctgctcgagcggcccctcggccaataagacagtggacatcatgacgaggactccgggtggggacctgaactggtcaccgccctgcacttctagccctcatttaagatttgagggtgaaaccaaagaaaaccccctaagtgagggaatcttttaatatttgtggctttagaggaaagaactaaaggagccatctctctcccctctcctccgttccgagaggaggggtgggtctcagacgtttttcctatggacttatttcttccatgtccaggactttgcacaactttggttttaaaagctgttgaaaaataggaaaacaaagggcattgttcacagatagggccaagtctccccttgcaagggtgcctctgttctgtccctgcccccacctcaccttctctactcctccagtaagttggcagttttggtgccaaaccccaaatctccaaagagacataccaggcaagacaaacccccaaacacctcctttccggtggccttggaaacagattgctccgagctggagaatgtcgggtgaggtgtatgggagaggaggggagagttagaacttgtgcctttgggagtaaggggtaactgcctggagggctggtggcactgcccctccctgacccagacatcccaccaaagctaactttcccccacccctgatgcagtaaaacattgaaaaaaaaaaaaaaggagaggtagaagactgtagctatatatataaatatatagtaagttttttttttttaagagcaacagagagaagcagcctcctccctgctgcggtttcctatttatgtggccatgttcctcctggacggatctccctgtgtgtttcaagctgagagatgtgggctccggctggatttgggttttgtgggaggtgcaggggccaagagagacgtggtaggtctccaagagtcccacccgggggggaagaagcaaagccatctcccaccccctcctagccttctcatttctgctttcttactggactcatctttatatataatgttaataaaaaagacgaaaataaaaaaaaaaaaa

SEQ ID NO: 199 - DNA, 1405 bp, Homo sapiens
ctaaagccgcaggcgccgcggtaccctggctgtggccctcggcgctttcttcctagggtcacaggacccatacgagtgggagctccctgggagcagaactgcgtcttgtatcacctggcgcggtgaacgtgggggttgaaacgctccacgcggaaggtagagggcaggggccaagggggcgatcctggtggctgcgctttttgctatttgctgccgacggcatgcagacgagatgcaaataagcttatgaaactgtccgtcctaccccctcgctccctcctcgccccctacaccgtgttgtgctgcccaccagactcggagaagccgcggctgtccccggaaccctccgagcggcgccctcaggcccccgccaaaaagctccgcaagccgaggaccatctactccagcctgcagctgcagcacctaaaccagcgtttccagcacacgcagtacctggcgctgcccgagagggcccagctggcagcgcagctcggcctcacccagacccaggtaaagatctggtttcagaacaaacgctccaagtataagaagctcctgaagcagaattctggggggcaggaaggggacttccctgggaggaccttctctgtgtctccctgctccccacccctcccctccctctgggatctacccaaggcagggaccctgcccaccagtggctatggcaacagctttggagcctggtatcagcatcactcctcagatgtcctggcttcgcctcagatgatgtgaatctggggaagggcgggtcaggcccacagccttcctgcaaagcccaggacccaggcagtccacctgcaccccttctgggctgggaggaaaccagctccagatgggttttctctggaggacaagcagttagaggagaaaaaggaatggagcagagcctgtacccctaaccctaacagctaaatcaaggacctcagccttatataatcattgtccccaccactaccatggactggacaccttcactccagctggacaaagactctggagagagagccattggctggagttgagactgtccccagaacccttggtcttgccactcccccactccttcttccctctctccctttctcctctccctgctttcttgaaaaggactgaatcgccactacagcctgggtgcaaaatcagcaagaaacattgagtatttttttttctttgtatgcctttggccttgcacaacccatttgtgagcaaaagcagaagtggaccaccatcagctcccacccacccagcgatttttccttggaggtcagcccgttacccccataactgatttacctacttaccatactgggaggtagaagagatgcagagaaatgtggaatttgtggacctatgggtaatttatgctttcctcctaaaaaaaaaa

SEQ ID NO: 200 - DNA, 1424 bp, Homo sapiens
agcagtcagccggccggagacagagacttcacgactcccagtctcctcctcgccgcggccgccgcctcctccttctctcctcctcctcttcctcctcctccctcgctcccacagccatgtctgcttagaccagagcagccccacagccaactagggcagctgccgccgccacaacagcaaggacagccgctgccgccgcccgtgagcgatgacaggagtgtttgacagaagggtccccagcatccgatccggcgacttccaagctccgttccagacgtccgcagctatgcaccatccgtctcaggaatcgccaactttgcccgagtcttcagctaccgattctgactactacagccctacggggggagccccgcacggctactgctctcctacctcggcttcctatggcaaagctctcaacccctaccagtatcagtatcacggcgtgaacggctccgccgggagctacccagccaaagcttatgccgactatagctacgctagctcctaccaccagtacggcggcgcctacaaccgcgtcccaagcgccaccaaccagccagagaaagaagtgaccgagcccgaggtgagaatggtgaatggcaaaccaaagaaagttcgtaaacccaggactatttattccagctttcagctggccgcattacagagaaggtttcagaagactcagtacctcgccttgccggaacgcgccgagctggccgcctcgctgggattgacacaaacacaggtgaaaatctggtttcagaacaaaagatccaagatcaagaagatcatgaaaaacggggagatgcccccggagcacagtcccagctccagcgacccaatggcgtgtaactcgccgcagtctccagcggtgtgggagccccagggctcgtcccgctcgctcagccaccaccctcatgcccaccctccgacctccaaccagtccccagcgtccagctacctggagaactctgcatcctggtacacaagtgcagccagctcaatcaattcccacctgccgccgccgggctccttacagcacccgctggcgctggcctccgggacactctattagatgggctgctctctcttactctcttttttgggactactgtgttttgctgttctagaaaatcataaagaaaggaattcatatggggaagttcggaaaactgaaaaagattcatgtgtaaagcttttttttgcatgtaagttattgcatttcaaaagaccccccctttttttacagaggactttttttgcgcaactgtggacactttcaatggtgccttgaaatctatgacctcaacttttcaaaagacttttttcaatgttattttagccatgtaaataagtgtagatagaggaattaaactgtatattctggataaataaaattatttcgaccatgaaaagcggaa

SEQ ID NO: 201 - DNA, 1892 bp, Homo sapiens
atgatgaccatgactacgatggctgacggcttggaaggccaggactcgtccaaatccgccttcatggagttcgggcagcagcagcagcagcagcagcaacagcagcagcagcagcagcagcaacagcaacagccgccgccgccgccgccgccgccgccgcagccgcactcgcagcagagctccccggccatggcaggcgcgcactaccctctgcactgcctgcactcggcggcggcggcggcagcggccggctcgcaccaccaccaccaccaccagcaccaccaccacggctcgccctacgcgtcgggcggagggaactcctacaaccaccgctcgctcgccgcctacccctacatgagccactcgcagcacagcccttacctccagtcctaccacaacagcagcgcagccgcccagacgcgaggggacgacacagatcaacaaaaaactacagtgattgaaaacggggaaatcaggttcaatggaaaagggaaaaagattcggaagcctcggaccatttattccagcctgcagctccaggctttaaaccatcgctttcagcagacacagtatctggcccttccagagagagccgaactggcagcttccttaggactgacacaaacacaggtgaagatatggtttcagaacaaacgctctaagtttaagaaactgctgaagcagggcagtaatcctcatgagagcgaccccctccagggctcggcggccctgtcgccacgctcgccagcgctgcctccagtctgggacgtttctgcctcggccaagggtgtcagtatgccccccaacagctacatgcctggctattctcactggtactcctctccacaccaggacacgatgcagagaccacagatgatgtgagttgcccaagggaacaccctagggaaacgtctgaacaaggaaaagaggatccgggacctgcttgtatctgcgaaaaggagccaaaggagcaggcttaggagagctcataagtgtggcaagaagccgactaggctcattctctctccctctctctctctctccctctcctttctttttacttcttcctttcctccattccttctttctttccttttcctttctacctttcttttctttttgcctttcaccttttttctcatttaccttctctcttgagcaacgtcagtaattgatcttgcatctcagagagagagaaagagcatgtgtgagagagaaactggtttctatgccagcactcctgaaaccccttactgtaaggatattttctcttaccccttgggatccaggctctgagtctcttctctttgggagtatccatcaaaatgactttttttaaaaacagattttcccccaaccagaagaatctgcacaaacttggcagcgtttttacttgtttaatgagtttaagacattacatggtgaaagagaagcattttggactcctgcatttttatttaccattcccagactgacgagaaaaagaaaattcctcacataacagcccttctctaaagaaaaaggaaaaagtggctgtaagattagaacattgctacaaagggaatgctgcatgttttatcaaaatgcaatgaccaggaatgatggttgattaaaaaaaaacaaaacaaaaaccactctttccccaccccacccccccaaaccctgaactggaatcaggaaagacggaggaaacaatcaaaatcaccattctattgctttgacacctttactaggtgaattggtggcattcacaaagctaatagggacgtttatatcaagaaacatttctgtatatattgttgaattttagttgtacatatactttgtatgtttttgtcttctttcatatatggagtaaaagccacaaaacgctgaaaaaaaaaaaaaaaaaa

SEQ ID NO: 202 - DNA, 2229 bp, Homo sapiens
cctcgccactccagctgcgcctccggctgcagcgcacacgtctcctgcgcctcctcctccggagcgtcgctgtccgtcgggttcatccctcgcagcagtctccaggcgagagagggggccagagtgctcgcacttctcctaggggcaccatgcccaacgacgaggcattcagcaagccctctacaccgtcggaagcccctcacgcccccggggtaccgccgcagggcagagccgggggctttggcaaagcgtctggggcgctagtgggggcggccagcggctcgagcgccgggggcagcagcagaggaggcggctccggctccggggcgtcggacctgggtgccgggagcaagaagtccccgcggctgcccaagtgcgcacgctgcaggaaccacggctacgcctcgccgctcaagggccacaagcgcttctgcatgtggcgcgactgccagtgcaagaagtgcaacctgatcgccgagaggcagcgcgtgatggccgcgcaggtggccctgagaaggcagcaggcccaggaggaggaattgggtatcagccaccccatcccactgcccagtgcggccgagctgcttgtcaaaagagagaacaatggcagtaacccgtgcctcatgactgagtgcagtggcacctctcagccaccgccggccagtgtccccaccactgcagcttcagagggacgtatggtcatccaggatattcctgctgtcaccagcagagggcatgtggagaacacacctgacctggtttcagactccacctactacagcagcttctaccagccgtctctgtttccttattacaacaatctatacaactgcccgcagtactccatggccttggctgctgattctgcttctggggaggtgggaaatcccctcgggggatcccctgtgaagaacagccttcggggcctccccggaccttatgtgcctggtcagacaggaaaccagtggcagatgaagaacatggagaaccgccatgcaatgagctcccagtacaggatgcattcttactacccgcctccctcttacctgggccagagcgtgccccagttcttcacttttgaggatgctccctcttacccggaagccagggcgagcgtattctcgccgcccagcagtcaagattctggcttggtttccctctcgagcagctctcctattagtaacaagagcacaaaggcagtgcttgaatgtgagcctgcgtcggagcccagcagcttcacagtcactcccgtcatcgaggaggacgagtgagcagtgcctgctgccgatggcggttcacttggagtaacaggcttattccactttccatggggtttgttaatattttgcattgactcatactatcttaactgttgagaacgtatttggtttatattccttagagtttagtccagaggctgtaacacatttgtaatactttagggtccgtgactaccatctgcatggtttaagtgctttactcacggagtttaaataatagtgttcatttttttaatgacactggtttcatgtagttttcaagaaataaaagaattcattcaagtgaagccatttgtgtgcctctaaatgagtcatctaattagatgttacttttagttttaaaatgaaatcttaggtgccttaggggttttttttttttttaagtattttttaaaaacctgcaaagatataaatttagccaagttacctgacgggtgagaagaaaagagcaggcaaaattagtgatttttttagaagtctgctaaatggatatattgtgtgtgttgctgttggaaatagccccaccccatcctcccaatccaaaacgtaactgaaatataatcagaaacattaaagcctgtaaaaaaaaattgctgcgtttttggtaaagggtgtaatttgtaaacagtgcaatttaaagtgaccttagtgatgcagagttcctgagtggtgtttgtagaatgagtttatcatacattctttctactactggaaaaaaatggatgcagtctggactgttgtaaccttaggttgtaatctgatttggaaataagtacatctttaaaagttgctacagatttgagttcatgattttgttaaaaattgctatggagtactttgttatataacagaagccatcctgaaatgaaactagtctaaaaaaattcattgttctacttagttgcagctgtacctgaaataaaaatgttattgatgactgaaaaaaaaa

SEQ ID NO: 203 - DNA, 2944 bp, Homo sapiens
agactgaagccagtggcgctgcgctgaatgcaactgcgcgcgcccgccgggtgagccagcgatctgagccaggcgggggcggcccgacctttcccgcccagcctgggtcagaggaagccgaaagcggcctcagcaaggtgaggcgcccgaggctgcagaagaccgagcagaactttgcagagttcgggatgtgctgggctaggtcgctgaggacttgactggcttcctccctccttccctccacctaccttctccctccccctccaccatccagtgggttcgttccgggcctccagctatcagctcccgatctcgtgtttgagggtagcgaccccgatttctgtttgcatgcacagccagcagccctagcgccagatcctaaagctggatatcttttaactgggctaccagcccgggcctcaaagttttgagtgagggccgccaggctcaggccccagcgaagccccgagcgccatggccgacccgcaggctggctccgcggccggggactgggagatcgatgtcgagagcctggagctggaagaggacgtctgcggggcgccgcggtccacgccccccgggcccagcccgccgccggcggacggggactgcgaggacgacgaagatgacgacggggtggacgaagacgcggaagaagagggcgacggcgaggaggcaggcgcgtcccccgggatgcccggccagccggagcagcgggggggaccgcagccgaggccgccgctcgcgcctcaggcctcacccgccggcaccggtccccgagagcgctgcactcccgcgggcggcggcgcggagccgcgcaagctgagccgcacgcccaagtgcgcgcgctgccgcaaccacggcgtggtgtcctgcctgaagggccacaagcgcttctgtcgctggcgcgactgccagtgcgccaactgcctgctggtggtggagcggcagcgcgtcatggccgcccaggtggcgctccggaggcagcaggccaccgaggacaagaaggggctttccgggaaacagaataatttcgagcgcaaagctgtgtaccagaggcaagtcagagcccccagtttgctggccaaaagcattttagaagttctccttggattattctacagctattatgtgtacataatgaaccatctttagaaaataaaagtgacatcagctctaggtatagatatattttttaataatgaaaaaagatgacatggataataataaaacattgattgatacaagataaatagtcttgtctcttaatgcgtagggggcctgggaagaatattaaaattttaatcaataaagtatgtctgttgaagcaagcaagcaaacaaatccataacaaccacaacaagcaacaagaacaagaacaacaacaagaagaagttgcagtatggatatctttcaccctcccaggaaactctttcaaacctaatctgtacttttgcatctgtataaaaatatcagtgagatggaactgtaaataattgttctgctgatctgtagtgttgctgttaccttctgggtttccacatttttattccgtagatgttaatctctttcatgtgcaatctttgcttcttgtaggctatcgccccattccagcggagacttatgtaggagggaccttccctctacctcccccagttagtgacaggatgaggaaaagaagagcctttgctgataaagagttggagaacattatgctggagagagaatataaagaaagggagatgttggaaacttctcaagctgctgctctgtttctgcccaaccgcatggtgcctggacctgactacaattcctacaaaagtgcctacagccccagcccagtggaaccaccaagcaaggacttctgtaattttttgcccacctgccttgatttaaccatgcagtattcagggtctgggaatatggaactaatttcttctaatgtcagcgtggccacaacttatagacagtatcccttgtcctcaagatttttagtttggcccaagtgtggccccattagcgacaccctcctctaccagcaatgcctgctaaatgccaccacctcagttcaagccctgaagcctggggccagctgggacttgaagggagcacgagtccaggatggactcagtgcagagcaggacatgatgccatcgaaattggaaggttccctggtgctgcctcacactcctgagatccagaccacgagaagtgaccttcagggtcatcaggctgtcccagagaggtccgcgttctccccaccccgacggaatttctctcccattgttgacacggactccctggcagctcaagggcatgtcttaacgaagatcagcaaagaaaacaccaggcaccctctgccacttagacataatccattccactcattattccagcaaacacttactgacaaatcgggtcctgagttgaaaacaccatttgtcaaagaggcctttgaagagacccctaagaaacacagagagtgtttagttaaggacaaccagaagtacacatttacaatagatagatgtgcaaaagacctttttgtagccaaacaagttggaacaaaactctcggtgaatgaaccactgtcattttctgttgagtctattcttaagaggccttcatctgccatcactcgtgtctctcagtgaaaggctgcttaaacagaaagctggattttctgcagtcttagagcattatagccatttgctactttttttaaaagttaagatgtttgtgtaaagaaatttctaatgtaaagatgatgattttgaaaaattttatatattcctaatatgcatgtactttttcttatcacatatatttaaacttacagatggaaattgcccaatgtgcaaattgttaagtaccacactttacacagcatttcaaaaagcaataaaattgacactgtcttctcaaagacccaataaaaaaaaaa

SEQ ID NO: 204 - DNA, 2184 bp, Homo sapiens
ccgcagccaggctgccaactcattcgggagcccggggcatgaacggctacggctccccctacctgtacatgggcggcccggtgtcgcagccgccacgggcgcccctgcagcgcacgcccaagtgcgcgcgctgccgcaaccatggcgtcctgtcctggctcaagggccacaagcgttactgccgcttcaaggactgcacctgcgagaagtgcatcctcatcatcgagcggcagcgggtcatggctgcgcaggtggcgctgcgccggcagcaggccaacgagagcttggagagcctcatccccgactcgctgcgcgctctgccagggcccccgccgccgggggacgccgtcgccgccccgcagccgccgccagcctctcagccgtcgcagccgcagccgccgcgccctgctgccgagttggccgcggccgccgcgctgcgttggactgccgagccgcagcccggggctctgcaggcgcagctcgccaagccagatttgactgaagaacgacttggagacggcaagtcggcagacaatacagaggtcttcagtgacaaagacactgaccagaggagttccccagatgtggcaaagagtaagggctgcttcacccctgagagccctgagatagtgtccgtggaggaagggggatacgctgtccagaaaaacggaggcaaccccgagagccgccctgacagccccaagtgtcacgcggagcagaatcacctcctgattgagggcccctcggggactgtttctctgcccttcagcttgaaagccaacagaccgccgcttgaagtgttaaaaaagatattccccaaccagaagccaacggtgcttgagctcatcctcaagggctgtggcggggacctggtgagcgccgtggaagtccttctgtccagccgatcctcagtcacgggagcagagcgaacttccgcagaacctgagagtctagcgttgccctccaatgggcacatctttgaacacaccttgagctcctaccccatctcgtcttccaaatggtctgtgggatcagcctttcgagtcccagacacgttgaggttttctgccgactctagcaacgttgtccccagtcccttggctgggcctctgcagccccctttcccccagccaccccggtacccgctgatgctgaggaatactttggcgagaagccagtcgagcccctttttgcccaatgatgtcaccctgtggaacaccatgacgctgcagcagcagtatcagctgaggtcccagtatgtcagtcctttccccagtaactctaccagcgtcttcagaagctcgcccgtccttcctgcccgcgccacggaagaccctcggatttccatccctgatgatgggtgtccatttgtgtcaaagcagtccatttacaccgaggacgactatgacgagaggtctgactcctcagactctagaacactcaacacatcatcttaaagtggtgctggatgggtggtggccaggtgacattttctgtgcgttttgaccctgaggcatctgaggagaggccacatcttgtgtatgccctttccttctgtttgacaaagtgactgtgcttgattctatacattagcaataaaaacataacttatttaacttcttgcacttcactggaaaatgccaaatagctctgttctgtggctttagtgctgaatgtttattgtaaaagagagtctaatgttaagaatagtcttgggaaggctgggtccgtggaagatttatttggggatgtaaagctgaaggtcagccttgcacctaaacccaacctggaatgttaaatgaaataatatacttgaatgcaattttgtaaaagtggattcctcaggatatgtgaaacctaaaggaagtggttctgttgcaaatggactataaacagggacattatattcttacactaaaaatccttgcattttaaagagagatgcacttaagaatagagtgaactgctcatatgcttatttaagcttggacagttttcagagacaaaccccattaagaattactcttttcacatggctgaatcgaaacatgtgtaatgtcaatgtaaaaccaatcacagctgtgaactgcatgaaatgtattgtgaaacgaacacaagattaagctttgtcaggttaatgtagcatgttaaggactctagaaaaaaataaactaaggagacgag

SEQ ID NO: 205 - DNA, 792 bp, Homo sapiens
gcgcccgctgtcgtaaccatggtgtggtgtcagcgctcaagggccacaagcgcttctgccgctggcgggactgcgcgtgtgccaagtgcaccctgatcgccgagcgccagcgcgtcatggccgcccaggtggcgctgcgcaggcagcaggcgcaggaggagagcgaagcccgggggctacagaggctcctgtgctcggggctctcctggccccccggtggtcgggcatccgggggcggcggcagagccgagaatccacagtccacgggcggccctgcggcgggggctgcgctgggactgggtgccttgagacaggccagtggttccgcgacccccgctttcgaagttttccagcaagattatcctgaggaaaaacaagaacaaaaagagagtaaatgtgagtcatgccagaatggacaagaagaactgatctccaaatcccatcagctttacctaggatcatcttctaggtctaatggtgtcattgggaaacaaagtatcgggtcatctatttcagaatactccaacaagcctgatagtatcctgtctcctcatcctggagagcaatcaggaggtgaagagagtcccaggtccttatcatcctctgatctggaatcaggaaatgaaagtgaatgggtcaaagacttgactgcgaccaaggcaagccttccgacagtgtcctcaagaccaagagatcctcttgatatccttactaagattttcccaaattacaggcgcagccggctagaaggcattctacggttctgcaaaggggatgtggtccaagccattg

SEQ ID NO: 206 - DNA, 1692 bp, Homo sapiens
tgttgctgcgggcagccgagaagtacccgcggacccccaagtgcgcgcgctgtcgcaaccatggcgtggtgtcggccctcaagggccacaaacgctactgtcgctggaaggactgcctgtgcgccaagtgcacgctcatcgcggagcgccagcgtgtcatggcggcgcaggtggcgctgcgcaggcagcaggcgcaggaggagaacgaggcgcgcgagctgcagctgctctacggcactgccgaggggctggcgctggccgccgccaacggcatcatccccccgaggcccgcctacgaggtcttcggttcagtgtgcgccgccgacggcgggggacctggagcgggagcgcccgcggggaccggaggcggagcagctggcgcagggggctcagaggccaagttgcagaagtttgacctgtttcctaagacgctgctgcaggcaggccgcccgggcagcccgctgccgccgccggtgaagcccttatcacccgacggcgcagactcggggcccgggacgtcgtccccagaggtgcggcccggctcaggctcggagaacggcgatggcgagtccttttctggttcgcccctagctcgggcctccaaagaggcaggtggcagctgcccaggcagcgctggccctggcggcggcggcgaggaggacagcccgggctccgctagccctctgggctctgaatccggttcagaggctgacaaagaagagggtgaggccgcgccggcgccagggctgggcggaggctcgggtccacggcagcggacgccgctggatatcttgacacgcgtgttcccaggccaccggcgaggcgtcctggagctggtgttgcagggctgcggcggcgacgtggtgcaggccatcgagcaggtgctgaaccaccaccgtgggggcctggcggccggcctgggccctgcggcgcccccagataaggccgccgtgggtgctgcagcagctgcagacgacgcgtggcccagccgcgtcgacgccgccgccgccgccgccgccgctgccggggggcctgggctgcctgcgccgctgcaggcggggcccgccgcacctccgcaccacagacccttgctggccggcgccatggcgcctggggcgctgggctcgctgagcagccgctcggccttctcgccgctgcagcccaacgccagtcacttcggtgccgacgcgggcgcctacccgctgggcgcgccgctcggcctcagccccctgcgcctggcctactccgcggcggcggcgcacagccgcggtctggccttcatggcgccctactccactgccggcttggtgcccacgctcggcttccgcccacccatggactacgcctttagtgatctcatgcgtgaccgctcggccgccgctgctgcggcggtgcacaaggagccgacctacggcggcggcctgtacgggcctatggtcaacggcgctccggagaagcagtagggcgaggggcctggcagccggccggtccccaaacaggaaccccagccctcttcccgcgggccatcgacccctcttcgcccagcgctctctctgcgccctggctgggggtcttctcactctaaggtggtttttgggttttgtttaggagggtgggtggggaaggctgagcaaagggggagcagctacagacaggtgcaggtgttctcggagggggtgcgcggcctgggtc

SEQ ID NO: 207 - DNA, 1907 bp, Homo sapiens
acttgctctgcagctcccagaggtggtggttgtgttacgaaggctgaccctgccaatggccgacaaaatggtgcgcacccccaagtgctcgagatgcaggaaccatggcttcctggtgcccgtcaagggacacgcgggcaaatgccgctggaagcagtgcctctgcgagaagtgctacctgatctccgagcgccagaagatcatggccgcgcagaaggtgctcaagacgcaggccgccgaggaggagcaggaggcggccctgtgtgcgcaggggcccaagcaggcctccggggctgcggccgccgcccccgcccccgtccccgtcccggccgcgagcctccgcccgctgtccccggggactccctccggagacgccgacccgggacccgagggccgcgcggccgcttgcttcttcgagcagcccccgcggggccggaaccccggcccgagagccctccagccggttctgggcggccgcagccacgtggagccgagcgagcgagccgccgtggcgatgcccagccttgcgggacccccttttggggcggaggccgcaggcagtggctaccctggccccctagacctgcgcaggccgatgcggaccgtgcccggcccactgttcaccgactttgtgcgccctctgaacatcaacccggaccgtgcactgggccctgagtaccctggtggctccagcatgcacccctactgcccgttcccgctgggctacctggacgcccctcctggcgtccccctgcagcagggcttccggcatgtgtcccgcagccagtaccaaggcggaggcttggtgtcagaaccaggaggagacttccagccaagctactacctgccgccgccgccgccgccactgccgccccttccaccgcttccaccgcagccccagttcctcccgccaggctacctctctgcgctccacttcctccccccgccaccgccaccaccacctccatcatctttctcactgaccgtcctgtttgatactgacaaggagaacactgatgaccaggatgcagaggtactgtcgggtgagcccagccagccatcgtctcaggagcagtccgactaggccccaggcccgccctcctggccagcagagtggggcactggggggcaacagcaacagttttcctgtcttcattcagtgatatgtagggaggaaggaggttgatagcatagatggcaactgattcccagtttaagataggaggaaggagagcaatttctaagtttcaatcctgcgctgtacagttgaagaagagtgtggaggaagctattaccaggggagggccagggctctgaggagtgggcgctgggagaagctcccatttaggaatgaatttaactgtccttgggttacactaccatttattggaacaagccccagaggcagtatttgatttcctcaggccccactctaggacaggaggcaccatctatttcagccttctgctgcctttgcctggtcctccaggttgctgggggcaccacagacatcaagattccagttcatccaggtggctggagccagcagccaggaccagggtcgttgacagcaggttctgcagcatcctgccttgctgctctgtcccccacatcttcctggccacagccccttgcccctcctctaaggggttttactagcaagcatcctggctgctggggctacttcattccccctccataaagtttcagccattatgggcactggttttaaaaaatttattagtttgactatttgatggttttatagtgattgccaactttaaaaagtaggctgttcataagcactgatgcagtccctagggaatagaatggtgcttctgatcacctgtgacatgaacagtttcttctgtgaggacagttggctattgaaataaaatgagcaatgg

SEQ ID NO: 208 - DNA, 1575 bp, Homo sapiens
cctcctcctgctcctcctcctcctcctcctcctcctcctccttctcctcctcctcccggtctgagggcggcggtctccgactcaagaccctggggctccgggtcttcttagcagccgccgcagcagccgcggcgacgtcactgtcctctcggcctggcacacagcgctccggccgccgaatgcccgtggacgcgcatctcttcccagagttcctgcttcctgggccagccaaagccgcagagaacgcctcagggtcttgcctgctgtgagtgccttgaagagggagcagcgggcacgatcaaagagacacctggctcaaggaccaataaggagtatggctgcccctcccaaagctcccatccgtgtcaggaatttgaccatcagagcaggagccctcactgggaaggagaacaacatgctgcagcccgagacccacatcttcacagcccccgaggaggggagctcccaaggggctctgctgcttggccaggccccagaacctttgtctctgccctgtactccagtgaccttggagcagcaactggtttctccttctggggatccccacagggcccctgccctgcccagcatatgctcaactctgatcctccagccctgtgccacccttgaccctcttctactgcagccacaggtcctgggaaagtagtggggtccagaaccctgggaggggcggagtttagtggatgggaagagcagaaggccttggtgggggtgggggaggaggttgagggaacagggggctgaaggggcacttgtcgtattgggaagaggtgtagtttcccagtgcctattctctcatgcactttcctttccaggtccccaaagtctctgaccaggctttggtttctgcccactcagagtggcagcggaagctggaggccgctgaggctctgctgactctgagaaactctgcccaggcccctcctgactccatctccctgcaccagccttgcaacccaccagctcctgctggagataaaggattccagcctcccagcccctctctccgccccaggccagccagctccatctcgctgcctattggacatctgggatgcatctccctcttgagctaggaacccagaggaggaggcctcaatagagcactgcctatttggtatccagtttctgaatgtgcaaaatggttaacgtccaaaacgcttaacgtctttttttaaagccttcaggtgttttataagctttttattatatggggcaactccttggctgagggtggatattcttgtacctctgtcccttactcttttggatgctggggcctttttctgtctcataaagacaggattgtgcaatctaagttgatcagtctctcagtggggttctgtgtgagttcatatgccagagtttttattcgtcttgtgattgctgacatacctgtgcactcatgtgtatacccctgcatgtggaaacatgaagatgttttcactttgtgtctaggtttatgtacgtgaacaaataataaaccgttgttgttataaggcaaaaaaaaaaaaaaaaaaaaaaaaaaaaaaaaaaaaaaaaaaaaaaaaaaaa

SEQ ID NO: 209 - DNA, 2857 bp, Homo sapiens
gagagaggcgatgcttgaagttcattggtctttgtgagacaggatccatggaacccagtgacatgcctgctggctaccactgccccttagactctgccccctgggatgagaccagagacccccagagcacagagctgatccccaggagagccatcagccgctctccaacctgcgcccgctgccgcaaccatggtgtcaccgcccatctcaagggccacaagcgcctctgcctcttccaggcttgcgagtgtcacaaatgtgtccacatcctggagcgccgcagggtcatggctgcccaggtggccttgcgtaggcagcaggaggcgcagctaaagaagcacctgatgaggagaggggaagcctctcccaaagctcccaaccacttcagaaagggaaccactcagccacaggtcccctctggaaaggagaacatagcaccccagcctcagaccccccatggggcagtcctgctggcaccgacaccccccgggaagccttgtacccaactccagcctgtgccctctgcccctgcagaactcctgtgggcctctgctgctcagccatcccccggaagcctcgcccttgtcctggactccggtgcctcctggcccttgggtccctggacactggctgcctccaggcttctccatgccaccaccagtggtgtgccgcctgctgtaccaagaacctgctgtctctctgcctcccttccctggctttgaccctggcacctccctccagctgcccactcatgggcccttcaccacctgcccaggatctcacccagtgctgacagctcctctttctggagagccccaagggccccctagccagccccgcacacactcaactctgatactccagccctgtggcaccccagaccctcttcagctacagccacaggtcctgggaaagaagtgggatctagggccctgggaggaggttgagcctggggaaggaaaaagcaggaaactgaaggaagcaggggctgaggaacacttagagggtgggcagaagcgggggttcccagtctgcttgtctccctttcccttgcaggcctctggagcctcgtgcctggcccggacatctggcccctcagagtggcagctgcagcaagaggcagctgaagccctcgtggggctgaaagattcatcccaggctcctcgtgtgaccccttctgtgccccccaaccctgcctggatctccctgcttcacccctgtggcccaccaggtgggccatgaaaggggaggatggatagggatggctgggaaatggagatcactgaagtacacagggactaaccaaggagatgagggggtcgacaggttgaacgtcttcaggcccaggaccccaagctcctcagcctggcccctgggattgcagttgagagttattcagtgaatcctttttatcagtttggcactcgacagcaaatttcttgatatcaaggaaagtggggcactgagaaaggcagggacttgcccaagggcatatagtgagacagtggcagggaacccaatgctctgtctctggacccaggctgcctgctgaagtctgaagtggggtctggcctgggaggaggtctgataagtgccttcaaggagcttacgttctagttagggaaattggatgccttcacaaggctcagtgacaaacctgaagaagattggaggaaccttgaagagtgagaaacacctagggggacagacagggaaagctgcgaattctcttgtccaaatagtggattgggcagactggcctggaggaaatgctagagcagagggaaaggaggctggagaggcttctgatggtggagatctggcatgccaggcttaggtgtctagaacagcaactgtatgtgaaggggagccagggaacgtttctgaactaagcaaggacaaattcagagaccctgagctttagaaagacaagtgggtggctttgatggacggtttggaggaggcaagactggaggtgggaaaattagcaaggaggtctgtgaaataatccaggagaacaatgatgaggcctggattggattcggtaaaaagagggggttgctagaaggaaaaacaggtgtgacctgatcctgccccttccttcttgcctgtagctcctgctggaggaagaggattccagcctgttggcccctgtcttcgacccagcccagccccctctgttgctctgcatattggccgtctggggtccatctccctcctgagctagaaacccagagatggaggctgtcttgctatggcagggaggtgacagcctgctggcactgtatatttagtgtcttacttaaggatttatgcatggaatttaatgtagtacaagcttcgggcttttttgtttgtttgtttgtttgtttgtttaagctttcaggtgcttcattagctttcagttcctttggtagtgtgggcatttccttggctgacagtggatattcttgtacccttcttgggtcctgggatctcttgaaatccccaataaagagagagttgtgctatttaagctgaccagtatctataaacgtgtttgcatgagtttacatcccaggattccatgattctgtaaatgcctatgcattcatgtctgtctccatgcatgtgaaaacaggagagtgttttcattttgtgtctaggtttgtgtgagtaagcaagaaataaacctttgttgttgtaagccactgagatttggagagtgttaccacagcctaacctagtctatcctgactgacagaaaggacttgttcatttcgcttctcaaagtgaaaaatctgttatccaatagctaccatagatgaaaacaaacttggatttttttctttgtccaaataaaaaaaatgatgtaaag

SEQ ID NO: 210 - DNA, 4052 bp, Homo sapiens
aagtaagtgcgatggaaccttcaggttccaaccgccgccagggccgctccgcccagtggagcctgtccggcccccttgctgcccgctagctcccgccggctggcgcaagctgtcggcgccggggcactgcgggcggggtcggagcctggccttcctgacgttgcagctgccgtccccgcacgttccggccagggcctccctcttagggccgggcggtgcccgtggctcaggctgcagagtagaaagcacaaaaaccagcctgattgtatctggaaaaaaccattatgttacagttgataggctcaccccaaaatatgcttttggggactgatttagcacctgcatattctgcgtgaatctctttaattggttgcagttgagctaatggtggagccaaaatgctattgccctgtcttcatcaacatttaatcaagtgttgcggagataggaacatgggagagaaacaatctgggtaacatgaaagtgatgctggttgctaagggaaggcaacttgattctgtgggaagggctgtagctgatccatccgttgtctagatttgagtatgagcacagtggaagaggattctgacacagtaacagtagaaactgtgaactctgtgactttgactcaggacacagaagggaatctcattcttcactgccctcagaatgaagcggatgaaatagactcagaagatagtattgaacctccacataaaaggctttgtttgtcctctgaggatgatcagagtattgatgattctactccttgcatatcagttgttgcacttccactttcagaaaatgatcagagctttgaagtgaccatgactgcaaccacagaagtagcagatgatgaggttactgaggggactgtgacacagatacagattttgcagaatgagcaactagatgaaatatctcccttgggtaacgaggaagtttcagcagttagccaagcatggtttacaactaaagaagataaggattctctgactaataaaggacataaatggaagcaggggatgtggtccaaggaagaaattgatattttgatgaacaatattgaacgctatcttaaggcacgcggaataaaagatgctacagaaatcatctttgagatgtcaaaagacgaaagaaaagatttctacaggactatagcatggggtctgaaccggcctttgtttgcagtttatagaagagtgcttcgcatgtatgatgacagaaaccatgtgggaaaatatacacctgaagaaattgagaagctcaaggagctccggataaagcatggcaatgactgggcaacaataggggcggcgctaggaagaagtgcatcttctgtcaaagatcggtgccgactgatgaaggatacttgcaacacagggaagtggacagaagaagaagaaaagagacttgcagaagtggttcatgagttgacaagcactgagccaggtgacatagtcacacagggtgtgtcttgggcagctgtggctgaacgagtcggtacccgctcagaaaagcaatgtcgttctaaatggctcaactacctgaattggaaacagagtgggggtactgaatggaccaaggaagatgaaatcaatctcatcctcaggatagcagaacttgatgtagctgatgaaaatgacattaactgggatctgttagctgagggatggagtagtgtccgttcaccacaatggctacgaagtaaatggtggaccatcaaaaggcaaattgcaaaccataaggatgtttcgttccctgtcttaataaaaggtcttaaacagttacatgagaaccaaaaaaacaacccaacgcttttggagaataaatcaggatctggagttccaaacagtaataccaattccagtgtgcagcatgttcagataagagttgcccgcttggaagataatacagccatctcttctagccccatggcagcattgcagattccagtccagatcacccatgtttcttcagcagactctcctgctaccgttgactcagaaacaataacactaaacagtggaacactacagacatttgagattcttccctctttccatctacagcccactggcactccaggcacctacctacttcaaacaagctcaagccaaggccttcccctaactctgactgctagtcccacagtaaccctgacagctgctgctcctgcttctcctgaacagattattgttcatgctttatccccagaacatttgttgaacacaagtgataatgttacagtgcagtgtcacacaccaagagtcatcattcagactgttgccacagaggacatcacttcttccatatcccaagcagaactgacagtcgatagtgatattcagtcatctgattttcctgagcctccagacgccctagaagcagacactttcccagatgaaattcatcaccctaagatgactgtggagccatcatttaatgatgctcatgtatccaaattcagtgaccaaaatagcacagaactgatgaatagtgttatggtcagaacagaagaagaaatctctgacaccgaccttaaacaagaggaatcaccctctgatttagccagtgcttatgttactgagggtttagagtctcccactatagaagaacaagttgatcaaacaattgatgatgaaacaatacttatcgttccttcaccacatggctttatccaggcatctgatgttatagatactgaatctgtcttgcctttgacaacactaacagatcccatactccaacatcatcaggaagaatcaaatatcattggatcatccttgggcagtcctgtttcagaagattcaaaggatgtcgaagatttggtaaactgtcattagaataattcttagaaataggcagttcaagcaaagaaggcacactgttaattacaacctcttcaaagaaataggagcaacccccaagaggcttaatttaccaatttaaatagccacagtccttaagccacacacattgttgctgctatgactttttacctcctttaaacacatcatctgaggttgagttttatgacagtatgtagttgagtggaggctgggagttttaagcataaatccctgtttagtgttacatgggaataaggaatttcattcacttcagccactaagaaaagtttagaatcacgaaagcttaactgctgtggtttaaagtacagtttctctaaagatcagacatggcactgtctcctctcaagcctggttgtagttcagatgagtcttttcaacatggtcttcaacatggtctagagcttaccagtgatcttctgatcttcaagaagactaagtttgagacttgaccagcatacaagtatagagacctaggaggtggtcttgtggtggtacatttggttaacccattgctggcagtgggagctgatttaggcagggtaaacaggaaagcattaaaagttaaaattcactacaggttttttgttacttttaaagggaatatggataagcatagtaacaaaacccaccagaatctaagcagttttcaccccctcagaaaccactgtcattagtttacaaagttagcactttgaagtaaaactaaatgaggaaggaagtaatgttacctatccttgataccatgaccatttattagatgttttgctatataaattaccgagagaatagtttgtcatccacttagtgtgttagctggtggggtacaatataacctctcatctcaggctattttaaaaaaacaatatttgcttctataacaaaaggaaacaaatctaagaatcattcctgtactacagaagggttaaggcaaaggtagccttttgggctttttaatgaatatgacccctatagaaaagtcaagaaaaaaaaacccttgtataaattattttatttattattgtaattagatcttcacaaagttgtcttttcactgtgttttgtcaacgtgaaattaaattgtagttataagcaaaagttggttgcctagggaacaattgtatattcagtttaacagaaataaaagaatatttgtcttaagatgcaaaaaaaaaaaaaaaa

SEQ ID NO: 211 - DNA, 3222 bp, Homo sapiens
gagcggcttcctgcaaaccttccctggcatctggagggaccaccgttgccgcgtcttcggcttccacgatctgcgttcgggctacgcggccacggcggcagccactgcgactcccactgtgcctggctctgtccatattagttcccaggcggccgtcgccgttccagcagcggcagcggcagcggcagcggcggacatgttgtgaggcggcggcgcgggtgtctgaaggatggtttggccgaggcggcggcaacggctgctggcggcggcggcagcggcagcggggcctcgggctctatagagccgagcccgctgggtacccgcccggtaccgcggcgaggccagtgcccctggatcttgcctctgctccgacgccgttggggaccagttaggcgacagcgcccgcccctctgaggagacacgaaggtggttccccagccgctcaaatttccggaccaccgcgctttcccctcctcagcctgggctgtgctctctctagaatcctcgggcccccactttcttcccaaactcatcctaaatctctcacacacgcgagtgttcccagccctcaagccagctgctcctccgttcattttctgcaccctcttcgcaaagcaccccccgggatcactctccgagggcgactttttgagaaatctcggtggagtagtggaccagagctggggagtttttaaaagccggggcgcgagaaacaggaaggtactatggcttcctcgtctggcaacgatgatgatctcactatccccagagctgctatcaataaaatgatcaaagagactcttcctaatgtccgggtggccaacgatgctcgagagctggtggtgaactgctgcactgaattcattcaccttatatcttctgaagccaatgagatttgtaacaaatcggaaaagaagaccatctcaccagagcatgtcatacaagcactagaaagtttgggatttggctcttacatcagtgaagtaaaagaagtcttgcaagagtgtaaaacagtagcattaaaaagaagaaaggccagttctcgtttggaaaaccttggcattcctgaagaagagttattgagacagcaacaagaattatttgcaaaagctagacagcaacaagcagaattggcccaacaggaatggcttcaaatgcagcaagctgcccaacaagcccagcttgctgctgcctcagccagtgcatctaatcaggcgggatcttctcaggatgaagaagatgatgatgatatctgaaattcaccagctgagtttctatttcttctataaatgtttttccctgcacaacaaaaacagtgaaagaaatgcttatctgtaattttgtatgcatcttggtggacttgtcattggtattctagggatgtctgctattaagtttcatctattgtgtgctatacatgtaaaaactgtctctttgaactattgaaaatttaaggttcagtataatatcaattttgaatttttaatggtgtttatgaaattttagatagcagcgagtccttcgtttgatcaataaacagtgttacagataacttcaagtttataaaaatacagtgaaatttctacaaagctctaaatctgcatttgcatttcctctgcccttttaactaaactaaaacttgtgaattttaaattattaaggggggggtgctgtgtgaatcagtagacattggattgggttggtgaaagagttcagttctgtagtatctgaatttgtcttttaaaatgagtacatatataggcaataaatatatatgctcagatcaatatacttgtttagaaaaacttcaagacattcaaaaactaggaaggagtatgtttaatagtatttgtataaatttggtggttatgtttttttattttgtttctgttttgtgtagaggtaaaaactatagttttattacagcataattcattttgagctccactatgacatttcaaagactgcccagtttggaagtctgtcatgatttttactctttcactccaattcagtaattgttgatagtattacttacctagtccatccatactcatattattcaaatatataggtggtacttttgaaacaattacattggttctcttggtttaactgaggtttatgaatattcaaacctttgctgggggaaagaaatgaaagttaatgagcatgcttgctatgagagagggatttttaatttaacttgtagttatagtttacttattgtttttagaattacttttacattttcccaactagatggcctagagtccaacattaccttttgagatgacattattgtctccataattgagtgatagctttaaaaaaaagattagttttgcttaagaagttatgttacaactgatcagccctatatgaattaactgatcagccctatatgaaacataagttgtgttataacttatcagccgtatatggaacataaatagtttctacctgcttgttagagaagctttaatttggttctaataaatacagtatggtagtgtttataggaatccaggatgttgaagaaatggcataatgtctatattttggaaacagaaaggaaaagtcacttaagatagtattaagtaattaaattcctatgtcagttgccaaatcttttaaacttatgtattcaccaagcccaaaaatagattgtggctcccaggattccaattttaattggagagctaagtaagtaaagttttataactgttaggtttcttaatgatcatattttgcagttttagtaaaagggaaatattgttatacatttattaaatatacttcccccatgaagtgaaaaggttaattttgctgaatgttttaagttgaagttacttcatggatgtcatacccatgaagtgcatttggatgagatagaagaaattgttttttaaaaagtttaagtaccaaaggtagtctagtctagaacgataagttaatacgtgttggcttttctaatttgtactgtaacatccttatactttctattttaagtatatctgtttcttaagtaaacaacttagatattttccacacctttttttttttttctgatgcagagttcaggttaatattttactgcatctgataatgtattatacgtttgaagcctagtgacttttcattttgacattcttgtgatttcatatgctgtattcttcaagcaataaaattgtgatgtgttttataaaaaaaaaaaaaaaa

SEQ ID NO: 212 - DNA, 1022 bp, Homo sapiens
gggcgggagcggcggtccagactggggagggacgcgcaccggccaggaggcttcaagaggagggcactagggccctgcgagcggcgtcttaaccggcggcgctaggactccgcgggaaacggcgggggcggagcgggcggcaccaggacccaggggaaccgcgacgggcgggcggcgagcaggcccgggagccgggaggctgcgggcggcggcgctggacccgacgcggcgagagaggccccgagatgccgagcaagaagaagaagtacaacgcgcggttcccgccggcgcggatcaagaagatcatgcagacggacgaagagattgggaaggtggcggcggcggtgcctgtcatcatctcccgggcgctcgagctcttcctagagtcgctgttgaagaaggcctgccaggtgacccagtcgcggaacgcgaagaccatgaccacatcccacctgaagcagtgcatcgagctggagcagcagtttgacttcttgaaggacctggtggcatctgttcccgacatgcagggggacggggaagacaaccacatggatggggacaagggcgcccgcaggggccggaagccaggcagcggcggccggaagaacggtgggatgggaacgaaaagcaaggacaagaagctgtccgggacagactcggagcaggaggatgaatctgaggacacagatactgatggggaagaggagacatcacaacccccaccccaggccagccacccctctgcccactttcagagccccccgacacccttcctgcccttcgcctctactctgcctttgcccccagcgcccccgggcccctcagcacctgatgaagaggacgaagaagattacgactcctagcgccttctgccccccagaccatagccccttttagttggttttagttgctctggggggaggagagaaggtagagctgttcttaaatttattaaaaaaaaaaataaaagggaatctcagtgtctgttccaggctctgcgcaggaaaaaaaaaaaaaaaaaa

SEQ ID NO: 213 - DNA, 2823 bp, Homo sapiens
acgcggacgcggctggcggctcggtttctgcaaatgcgtgaatgagccggatgccagcctctgtcccctggagcccagcgtgaggaagaggcatgccccatcagccttcagcttgagcccggcggcccccgcccccgccccctgccaccctgcactgccccggctcccccgcggcccccacgctgcagtgcggccgggccccctccccgcaggggccgcccccgccgcccacccctagcgcccgtggtggtggtggtggtggtggtggtggtggcccgggccgcagggccatgaaactacaggccgtgatggagacgctgttgcagcggcagcagcgggcgcgccaggagctggaggcccggcagcagctgccccccgatccccctgctgcaccccccggccgggcccgggctgcccccgacgaggacagagagcccgagagtgcccggatgcagcgggctcagatggccgcactggcagccatgcgggctgcagctgcgggcctgggacacccagccagccccggcggctctgaggatgggcccccaggctcggaggaggaggacgcggcccgggaggggacaccgggctcacccgggcgaggcagagaagggccaggagaggagcactttgaggacatggcctccgacgaggacatgaagcccaaatgggaggaggaggagatggaggaagacctcggggaggatgaggaggaggaggaggaggattacgaggatgaggaggaggaggaggacgaggaggggctgggccccccaggccctgccagcttgggcaccacggcactgttcccccgaaaggcccagccaccccaggccttccgcggcgatggcgttcccagggtgctggggggccaggagcggccggggcctggccctgcccaccccggaggggccgcccacgtagccccgcagctgcagccgcctgaccacggcgactggacttacgaggagcagtttaagcagctctacgaactcgacggggaccccaagaggaaggaattcctggatgacttgttcagcttcatgcagaagcgagggacacctgtgaaccgcatccccatcatggccaaacaggtccttgacctgttcatgctgtacgtgctggtgacggagaagggcggcctcgtggaggtcatcaacaagaagctgtggcgtgagatcaccaagggcctcaacctgcccacgtccatcaccagtgcagccttcaccctgcggacccaatacatgaagtacctgtacccctacgagtgtgagaagcggggcctcagtaaccccaatgagctccaggcagccatagacagcaaccgacgggagggccggcgccagagctttggtggctccctctttgcctactcgccaggcggggcacacggcatgctctcctcacccaagctacccgtgtcctccctgggcctggccgcaagcaccaatggcagctccatcacccccgcccctaagatcaagaaagaggaggactcagccatccccatcacagtccctggccgcctgcctgtgtccctggcgggccaccctgtggtggcagcccaggcagcagctgtgcaagcagcagccgcccaagcagctgtggccgcacaggcagctgccctggaacagctgcgggagaagctggagtctgcagagcctccggagaagaagatggccctggtggccgatgagcagcaacggctgatgcaacgtgcactccagcagaacttcctggccatggcggcccagctgcccatgagcattcggatcaacagccaagcctccgaaagccgccaggactctgctgtgaacctgacgggcaccaacggcagcaacagcatcagcatgtcggtggagatcaacggcatcatgtacacaggagttctgtttgctcagccgccggcccccacgccaacctctgctcccaacaaaggaggcggcggcggcggcggcagcagcagcaacgcaggcggccggggaggaaacaccggaaccagcggcggccaggctgggccagcggggctgtccacaccctccacatctacctcaaataactcgttgccttaaccgcatcactccccacccgccacccaccctggagcccgccggcctgggcagggggtccaggtgggccacacaggggccaggatggcggaagatacgggtggggagggaagatatccagaaaggagccacagctgacgccaaaaagaaaagaaaaaagatatatatatatatatatatatatacacgtatatatataaagagaatttaataaaacaggggaaaaccaaggaacacttgaatttctcaggttttggacattcagagagatgaattgtgagaacagcaaagaaatccatcagaaaaacagaaagaggcagacgtttcccagggcgttcaggcagccctgatggaccgaaggctctggtgtctggtttggccccacagcagtgtgggccgatcctgtttacctcatacatccctgcactgtgtgttttcatttttgtctgctttagttctcttttattttctattcaccacacactcaccactcccagcttctcgtgtccagtgaaacccctgaaccaagatcactgaatttttgtttttttcttgttgctttgggaaatttttttttctctgtagggtttttaagaggtttcgggggttttgttgtgtaaatattctattttattcttggggggatcaaaccttaggaaaaggatatctatatatctatatagctatatatttgtgttccttcagggaaactggtcttgaaaaagcaagaaaaaaaagcaaaaaaaaaaaaaaa

SEQ ID NO: 214 - DNA, 4253 bp, Homo sapiens
ttccggtgcgggccccgccccggctgtggcccccggctgcggaggagtccgagacgcagctgccgcgccggggcctgagctgccgcctcctccgccgcccgaaaacccggagtgccccgcacaggtttagacccagtgtgcctggtgggctgtgcccaggttcagagtcatgccactctgtgggtgaagcttgaggcaaaaatggagccacttcagcagcagcagcagcagcagcagcaacaacagaagcagccacacctggctcctctgcagatggatgccagagagaagcagggccagcagatgagagaagcccagttcttgtatgcccaaaagctggtcacacagccgactctcctttccgccacagctgggagaccttctggcagcactcccttaggtcccttagccagagttccacccaccgcagcagtggcccaagtgtttgaacggggcaacatgaactcagagcctgaggaagaggacggaggtttggaagatgaggatggggatgatgaagttgcagaggtggctgagaaagaaacccaggctgcttcaaaatattttcatgtgcagaaagtagctcgccaagatcccagagtggcacccatgtccaatctacttccagcaccagggctcccaccacatggacaacaagctaaagaagaccataccaaagatgcttccaaggcctcaccttctgtctccacagcaggacagccgaactggaatctggatgagcagctcaagcagaatggtggtttggcctggagtgatgatgcagatggaggccggggaagagagatctctcgagattttgccaagctgtatgaactggacggtgatcctgaaaggaaagagttcctggatgacctcttcgtctttatgcagaagagggggacccccatcaaccgaatccccatcatggccaaacagatcctggacctgtacatgctgtataagctggtgaccgagaagggaggcctggtggagatcatcaacaagaagatctggagggagatcaccaaaggcctaaacctgcccacatccatcaccagcgccgccttcaccctcaggacgcagtacatgaagtatctgtatgcctatgagtgtgagaagaaagccttgagttccccagccgagctccaggcagcaattgatggcaaccgcagggagggccggcggcccagctacagctcctccctctttggctactcacctgctgcggctactgctgctgccgctgccggggcccctgcccttctctccccacccaagatccgctttcccatccttgggcttggctccagcagtggtaccaataccagtagccctcggatatccccagcaaccactctcaggaaaggtgatggagccccagtgacaacagtgcctgtgccaaatcgtctggctgtgcccgtgaccttggcaagccagcaggctggtactcggaccgccgcactggagcagctgcgggagcggctggagtcaggggagcctgctgagaagaaggcatcgaggctgtctgaggaggagcagcgcctggtgcagcaggccttccagcgcaactttttcagcatggcacggcagctccccatgaagatcaggatcaacggcagggaagacagagcagaggcctcggctgcagcactgaacctgaccacgagtagcattgggagcattaacatgtctgtggacatcgatggcaccacctatgcaggtgtgctgtttgcccagaagcctgtggtccacctcatcacggggtctgctccccagagcctcggcagcagcgccagcagcagcagcagctctcactgttcaccaagtcctacctcatcccggggcacccccagcgcagagccctccaccagctggtccctctgatgggcaggacccagcttcccacttgccactctcctgtcgagagtgaaggaagttgatgcacagaatttacctcatctcacagagcccacgtcgacgagcaccatttggccagacattgagagtttggacgtgtccgtctgtccaggctccattcaggtcctgctgtactctgggggcagggagaggctagaggggcaggacagacagcgttgtccaatcagggattgtcctggagaactgggtgggggtctgtgggtgtccagcttcctccagggttccccagccacctcccagctcagggcacagtgtatcgacaatctgtcagccgacgcagggctggaggccctccatttccctccccttttaatttatttccctgaccctgccttctgccatgaccccagggccactagtctcttcccctgtttttaagtcccatgtggggctgccaggagccaagagcatgccttcatgcccttctctgcagagcatgggatggggcccttccagcccactttgcctactgttaggttcctggggtacgggtccctcaaacacaagtcttgaatcagtcctcagggccccagatcccccttctaatagtctgaaggaagaggctgtgagggcagttcagggccagggcccacagggcatctgctgatgggaaggcagagcctcggggctgcccagccctggcacctgcttcacacggaccattctctgaccgcccccgccaaacctcatgctccccacttgcccttattggcctgctttcccaaaaacagcccactcatcctttccccagccctcttcagccctccccagtcctccccagccttcttcagccttcttcagctcagccctcttctatttcttatggggccatcttggcctcaccatccccacacgtgccgatgtcaggttcattgaaatacctcagatttgtaattgttgatgtttgagtcttcaggaagtatttgcatctctgaaatcttttttatatgtgttttgctgacttttgttttttttttattttaaaatttttatcgtagcaccaaagaaatgaaaacagatcacccccaaagccaagcaagtgattgggtaacccggcccctctggcccttccctcaagcccagtgaggaggtgggtggaggcatgcaggggagacgactcagggatcgcgggggcggggaggtggagtggagaggcccgctctcacaccgggtcgggccctgaaactgtaccagttctgaagaccgttttctgccacacccccacccccagctgaccagggaggcagaggacacctccccatcactcagcattcccagctcagggcacaggcaggctggggtcctcgctggccttgccagaggttgagccgccccagggtatgaggagatgaataactccacagctcctcctggaccctgcgcgggagcaggcagctcctgtgctgtaaagaaaattgattcgcttgcggctcacctcagtcgaggaagccctggaatgttcagcagaacaccaccactgtgacatggggctgtggcagtgggagacaccgcgcgtggcgtgggtgtgtgtggcagcgtggctcgcattcagtcctgtgtaggagaggaaagggaatcaaaagcttgagcacaaacagatacctcagcccggtaagctgcagctctgctcaactgcgtcttctctcagccctccacacacactcacccccactcccacacacatacacacacacacacacataccccatctcccgagggctgacctcctctggcctcagcctgcagggtgtgggcagagaagggcatctgggacgtggtgccagtgaggagcccagttggctggcactgggcccatttgaaggtgtctcagacatttggccagtatgtctttctcaggggtttggtcacaaaggatggactcttcccacccagaggatgcagggaaagcacactgtgtctttccggtcattggatcctctccctttccccaggcagctcgcctggccacaccgttggagtgaaccctcactgccctcaaggacaacagcagggtgtcacccagagcccgatgaggggtgccagcaggtgcccccacgagtggggccttggcccaagcagagcttcccctgaaggtgccatcagccagggcagctctgtcccctcctgctctccatcttatatgtattctaaccaggaaaaatgtgatagcacatgggtagcctaggcagtgagtaaatacctcagatgtcctcctgcagcaagtgtctatatgttgtggttattttctatcttacatgttctcgaatgtttatatttcaataaacctctacctcttcacacaaaaaaaaaaaaaa

SEQ ID NO: 215 - DNA, 4360 bp, Homo sapiens
cgccccccagaggcgccggagcccggaatcccgctcggagccagccagccgtcccgagctaccagcaggtttcattgaaaacagatcctgcaaaagttccaggtgcccacactggaaacttggagatcctgcttcccagaccacagctgtggggaacttggggtggagcagagaagtttctgtattcagctgcccaggcagaggagaatggggtctccacagcctgaagaatgaagacacgacagaataaagactcgatgtcaatgaggagtggacggaagaaagaggcccctgggccccgggaagaactgagatcgaggggccgggcctcccctggaggggtcagcacgtccagcagtgatggcaaagctgagaagtccaggcagacagccaagaaggcccgagtagaggaagcctccaccccaaaggtcaacaagcagggtcggagtgaggagatctcagagagtgaaagtgaggagaccaatgcaccaaaaaagaccaaaactgagcaggaactccctcggccacagtctccctccgatctggatagcttggacgggcggagccttaatgatgatggcagcagcgaccctagggatatcgaccaggacaaccgaagcacgtcccccagtatctacagccctggaagtgtggagaatgactctgactcatcttctggcctgtcccagggcccagcccgcccctaccacccacctccactctttcctccttcccctcaaccgccagacagcacccctcgacagccagaggctagctttgaaccccatccttctgtgacacccactggatatcatgctcccatggagccccccacatctcgaatgttccaggctcctcctggggcccctccccctcacccacagctctatcctgggggcactggtggagttttgtctggacccccaatgggtcccaaggggggaggggctgcctcatcagtggggggccctaatgggggtaagcagcaccccccacccactactcccatttcagtatcaagctctggggctagtggtgctcccccaacaaagccgcctaccactccagtgggtggtgggaacctaccttctgctccaccaccagccaacttcccccatgtgacaccgaacctgcctcccccacctgccctgagacccctcaacaatgcatcagcctctccccctggcctgggggcccaaccactacctggtcatctgccctctccccacgccatgggacagggtatgggtggacttcctcctggcccagagaagggcccaactctggctccttcaccccactctctgcctcctgcttcctcttctgctccagcgccccccatgaggtttccttattcatcctctagtagtagctctgcagcagcctcctcttccagttcttcctcctcttcctctgcctcccccttcccagcttcccaggcattgcccagctacccccactctttccctcccccaacaagcctctctgtctccaatcagccccccaagtatactcagccttctctcccatcccaggctgtgtggagccagggtcccccaccacctcctccctatggccgcctcttagccaacagcaatgcccatccaggccccttccctccctctactggggcccagtccaccgcccacccaccagtctcaacacatcaccatcaccaccagcaacagcaacagcagcagcagcagcagcagcagcagcagcagcagcagcagcagcatcacggaaactctgggccccctcctcctggagcatttccccacccactggagggcggtagctcccaccacgcacacccttacgccatgtctccctccctggggtctctgaggccctacccaccagggccagcacacctgcccccacctcacagccaggtgtcctacagccaagcaggccccaatggccctccagtctcttcctcttccaactcttcctcttccacttctcaagggtcctacccatgttcacacccctccccttcccagggccctcaaggggcgccctaccctttcccaccggtgcctacggtcaccacctcttcggctaccctttccacggtcattgccaccgtggcttcctcgccagcaggctacaaaacggcctccccacctgggcccccaccgtacggaaagagagccccgtccccgggggcctacaagacagccaccccacccggatacaaacccgggtcgcctccctccttccgaacggggaccccaccgggctatcgaggaacctcgccacctgcaggcccagggaccttcaagccgggctcgcccaccgtgggacctgggcccctgccacctgcggggccctcaggcctgccatcgctgccaccaccacctgcggcccctgcctcagggccgcccctgagcgccacgcagatcaaacaggagccggctgaggagtatgagacccccgagagcccggtgcccccagcccgcagcccctcgccccctcccaaggtggtagatgtacccagccatgccagtcagtctgccaggttcaacaaacacctggatcgcggcttcaactcgtgcgcgcgcagcgacctgtacttcgtgccactggagggctccaagctggccaagaagcgggccgacctggtggagaaggtgcggcgcgaggccgagcagcgcgcgcgcgaagaaaaggagcgcgagcgcgagcgggaacgcgagaaagagcgcgagcgcgagaaggagcgcgagcttgaacgcagcgtgaagttggctcaggagggccgtgctccggtggaatgcccatctctgggcccagtgccccatcgccctccatttgaaccgggcagtgcggtggctacagtgcccccctacctgggtcctgacactccagccttgcgcactctcagtgaatatgcccggcctcatgtcatgtctcctggcaatcgcaaccatccattctacgtgcccctgggggcagtggacccggggctcctgggttacaatgtcccggccctgtacagcagtgatccagctgcccgggagagggaacgggaagcccgtgaacgagacctccgtgaccgcctcaagcctggctttgaggtgaagcctagtgagctggaacccctacatggggtccctgggccgggcttggatccctttccccgacatgggggcctggctctgcagcctggcccacctggcctgcaccctttcccctttcatccgagcctggggcccctggagcgagaacgtctagcgctggcagctgggccagccctgcggcctgacatgtcctatgctgagcggctggcagctgagaggcagcacgcagaaagggtggcggccctgggcaatgacccactggcccggctgcagatgctcaatgtgactccccatcaccaccagcactcccacatccactcgcacctgcacctgcaccagcaagatgctatccatgcagcctctgcctcggtgcaccctctcattgaccccctggcctcagggtctcaccttacccggatcccctacccagctggaactctccctaaccccctgcttcctcaccctctgcacgagaacgaagttcttcgtcaccagctctttgctgccccttaccgggacctgccggcctccctttctgccccgatgtcagcagctcatcagctgcaggccatgcacgcacagtcagctgagctgcagcgcttggcgctggaacagcagcagtggctgcatgcccatcacccgctgcacagtgtgccgctgcctgcccaggaggactactacagtcacctgaagaaggaaagcgacaagccactgtagaacctgcgatcaagagagcaccatggctcctacattggaccttggagcacccccaccctccccccaccgtgcccttggcctgccacccagagccaagagggtgctgctcagttgcagggcctccgcagctggacagagagtgggggagggagggacagacagaaggccaaggcccgatgtggtgtgcagaggtggggaggtggcgaggatggggacagaaagcgcacagaatcttggaccaggtctctcttccttgtcccccctgcttttctcctcccccatgcccaacccctgtggccgccgcccctcccctgccccgttggtgtgattatttcatctgttagatgtggctgttttgcgtagcatcgtgtgccacccctgcccctccccgatccctgtgtgcgcgccccctctgcaatgtatgccccttgccccttccccacactaataatttatatatataaatatctatatgacgctcttaaaaaaacatcccaaccaaaaccaaccaaacaaaaacatcctcacaactccccaggaaaaaaaaaaaaaaaaaa

SEQ ID NO: 216 - DNA, 1986 bp, Homo sapiens
agtctgggttggactggcggccgtggagtttgtgacatacgaggtgacacccctcgagtcacttcccttcaactccagctggagcgcctgcttggctttgggttcgttctgcagccttcgccccgctcctagcctcagggccggactccagcgcagagcccagcccagcgcagcctgccagcagccacccagccgcccagccgcccagccccgcacgaaacccggccagagcttcctagcagcccgagccatgaacaccgaaatgtatcagacccccatggaggtggcggtctaccagctgcacaatttctccatctccttcttctcttctctgcttggaggggatgtggtttccgttaagctggacaacagtgcctccggagccagcgtggtggccatagacaacaagatcgaacaggccatggatctggtgaagaatcatctgatgtatgctgtgagagaggaggtggagatcctgaaggagcagatccgagagctggtggagaagaactcccagctagagcgtgagaacaccctgttgaagaccctggcaagcccagagcagctggagaagttccagtcctgtctgagccctgaagagccagctcccgaatccccacaagtgcccgaggcccctggtggttctgcggtgtaagtggctctgtcctcagggtgggcagagccactaaacttgttttacctagttctttccagtttgtttttggctccccaagcatcatctcacgaggagaactttacacctagcacagctggtgccaagagatgtcctaaggacatggccacctgggtccactccagcgacagacccctgacaagagcaggtctctggaggctgagttgcatggggcctagtaacaccaagccagtgagcctctaatgctactgcgccctgggggctcccagggcctgggcaacttagctgcaactggcaaaggagaagggtagtttgaggtgtgacaccagtttgctccagaaagtttaaggggtctgtttctcatctccatggacatcttcaacagcttcacctgacaacgactgttcctatgaagaagccacttgtgttttaagcagaggcaacctctctcttctcctctgtttcgtgaaggcaggggacacagatgggagagattgagccaagtcagccttctgttggttaatatggtataatgcatggctttgtgcacagcccagtgtgggattacagctttgggatgaccgcttacaaagttctgtttggttagtattggcatagtttttctatatagccataaatgcgtatatatacccatagggctagatctgtatcttagtgtagcgatgtatacatatacacatccacctacatgttgaagggcctaaccagccttgggagtattgactggtcccttacctcttatggctaagtctttgactgtgttcatttaccaagttgacccagtttgtcttttaggttaagtaagactcgagagtaaaggcaaggaggggggccagcctctgaatgcggccacggatgccttgctgctgcaaccctttccccagctgtccactgaaacgtgaagtcctgttttgaatgccaaacccaccattcactggtgctgactacatagaatggggttgagagaagatcagtttgggcttcacagtgtcatttgaaaacgttttttgttttgttttgtaattattgtggaaaactttcaagtgaacagaaggatggtgtcctactgtggatgagggatgaacaaggggatggctttgatccaatggagcctgggaggtgtgcccagaaagcttgtctgtagcgggttttgtgagagtgaacactttccactttttgacaccttatcctgatgtatggttccaggatttggattttgattttccaaatgtagcttgaaatttcaataaactttgctctgtttttctaaaaataaaaaaaaaaaaaaaaaaaaaaaaaaaaaaaaaaaa

SEQ ID NO: 217 - DNA, 2614 bp, Homo sapiens
ctgagagtcggagccacagccagagccctgcccaggccgagccggagctgcagcccgagcgcggtggtgccctcagccccgtcctcttgtcctcctcagcctcggtgccttggaatttgtgtcgctgagtcagcaagcctttcagatttgcccggtttttgttgtttgtggtttgtatcaagatgggaactcaaacaagtcattcctcctaaggagctggtgtcttcatccagaagggacagtttgtgccagctctccagagagaaaagatctgccggaggcgctgggcaatgaccccgggactccaggccagaggggtctgaagctgtttgggaaagcagcgggactccttgggaagatggccatggccccaagcccttccctggtgcaggtgtacaccagccccgcggctgtggccgtgtgggaatggcaggacgggctgggcacctggcacccctacagtgccaccgtctgcagcttcatcgagcagcagtttgtccagcagaagggccaacgttttgggcttgggagcctggcccacagcatccccttgggccaggcagacccctcgctggccccttacattattgacctccccagctggacccagttccgccaggacaccggcaccatgcgagctgtgcggagacacctgttcccccagcactcagcccctggccgaggtgtcgtctgggagtggctgagcgacgatggctcctggactgcctatgaagccagcgtctgtgactatctggagcagcaggtggccaggggcaaccagctcgtggacttggcccccctggggtacaactacactgtcaactacaccacccacacgcagaccaacaagacttccagcttttgccgcagcgtgcggcgccaagcagggccgccttacccggtgaccaccatcatcgctccgccgggccacacaggcgtcgcctgctcttgccaccagtgcctcagtggcagcagaactggccccgtgtcaggccgctaccgccactccatgaccaacctccctgcataccccgtcccccagcaccccccacacaggaccgcttctgtgtttgggacccaccaggcctttgcaccgtacaacaaaccctcactctccggggcccggtctgcgcccaggctgaacaccaccaacgcctggggcgcagctcctccttccctggggagccagcccctctaccgctccagcctctcccacctgggaccgcagcacctgcccccaggatcctccacctccggtgcagtcagtgcctccctccccagcggtccctcaagcagcccagggagtgtccctgccactgtgcccatgcagatgccaaagcccagcagagtccagcaggcgctcgcaggcatgacgagtgttctgatgtcagccattggactccctgtgtgtcttagccgcgcaccccagcccaccagccctcccgcctcccgtctggcttccaaaagtcacggctcagttaagagattgaggaaaatgtccgtgaaagaagcgaccccgaagccagagccagagccagagcaggtcataaaaaactacacggaagagctgaaagtgcccccagatgaggactgcatcatctgcatggagaagctgtccgcagcgtctggatacagcgatgtgactgacagcaaggcaatcgggtccctggctgtgggccacctcaccaagtgcagccatgccttccacctgctgtgcctcctggccatgtactgcaacggcaataaggatggaagtctgcagtgtccctcctgcaaaaccatctatggagagaagacggggacccagccccagggaaagatggaggtattacggttccagatgtcgctccccggccacgaggactgcgggaccatcctcatagtttacagcattccccatggtatccagggccctgagcaccccaatcccggaaagccgttcactgccagagggtttccccgccagtgctaccttccagacaacgcccagggccgcaaggtcctagagctcctgaaggtggcctggaagaggcggctcatcttcacagtgggcacgtccagcaccacgggtgagacggacaccgtggtatggaacgagatccaccacaagacagagatggaccgcaacattacgggccacggctatcccgaccccaactacctgcagaacgtgctggctgagctggctgcccagggggtgaccgaggactgcctggagcagcagtgacctcgcaccccagcacgcccgcctctggtggccaccccgctgccccatggctggctgggtggccaggcaggaagtgcccagcccgagaggctgggaggtttgttgagggtgtggggtgtgccccacctgaagccggggctccccctgcctgcctctctctcctcctcccctctgggaattgggcagccctgggcagttgtactcatgggggcttaggatgcagctacctcagtgcgcagggcccgtctgtcctctgggggctgcttcgggcccgcggtgctcggggcctggtgtggggcgagtagagacttccccagcctggacgggcgtgggttctgggtcagcttcttttacctcaattttgtttgcaataaatgctctatagcc

SEQ ID NO: 218 - DNA, 1227 bp, Homo sapiens
caggcctcctggcagcacctgcgcagtgaacaggctggctgaggtgcacgggagcccgcccgcctctctctgcccgtgtcagtccgtgaaattccggccggggctccctgagatggccctcctgacagctttggacgacaccctccccgaggaagcccagggaccgggaaggcgaatgatactcctttcgaccccgagtcaaagtgatgccctgcgagcctgctttgagcggaacctgtacccgggcattgccaccaaagaagagctggcccagggcatcgacattccggagcccagggtccagatttggtttcagaatgagagatcatgccagttgaggcagcaccggcggcaatctcggccctggcccgggagacgtgacccgcaaaaaggcagacgaaagcggactgccatcaccggatcccaaaccgccctgctcctccgagcctttgagaaggatcgctttccaggcattgctgccagggaagagctggccagagagacgggcctcccggagtccaggattcagatctggtttcagaatcgaagagccaggcaccggggacagtctggcagggcgcccacgcaggcaagcatccggtgcaatgcagccccaattgggtgacaccctgctctctcgtgggtcgcctttgcccacactggcgcatggggaaaggggcttcctgcaccacacatgctctcccacagtgggctttcgtgagccatggattgagggccgtccctgtgctcctgcccagccaggccgcgcaggcagaagggatctcccaacctgccccagcacatggggattttgcctacaccgcccaggctcctccagaaggggcgctctcccacactcacactcctaggtggcatccacacaagggcaaaatccggaaggactgggacgcgcagcgcgacggccttccgggcacttgcgcggtgggacagcctgggccctctcaagcggggccacagggccaaggtgtgcttgcgccacccgcgtcccagggaagtccgtggtgggggtggagcaggggtacccaggtcgccggtgtggcgtggaacctcaagcaggggcaattccacctcaccagcccacgcccccagaggcctccacacggcaggggcagatgcaaggcatctcagcaccctcccaggcgctcctggagccagggtgctcgtctgcactccactccatcctgctgctggatgagctcctggcga

SEQ ID NO: 219 - DNA, 243 bp, Homo sapiens
atggccctcccgaaaccttcagacggcaccctccccgcggaagtccagggacggggacagcgaaggagactcgtttggaccccgagccaaagcaaggccctacaagcctgctttgagcggaacccgtacccgggcatcaccaccagagaacggctggcccaggccatcggcattccggagcccagggtccagattctgtttcagaatgagaggtcatgccagctgaggcagcactggcattaa

SEQ ID NO: 220 - DNA, 594 bp, Homo sapiens
atgccggctgaggtgcacgggagcccgcccgcctctctctgcccgtgtccgtccgtgaaattccggccggggctccctgcgatggccctcctgacagctttggacgacaccctccccgaggaagcccagggaccgggaaggcgaatgatactcctttcgaccccgagtcaaagcgatgccctgcgagcctgctttgagcggaacctgtacccgggcattgccaccaaagaacagctggcccagggcatcgacattccggagcccagggtccagatttggtttcagaatgagagatcatgccagttgaggcagcaccggcggcaatctcggccctggcccgggagacgcgacccgcaaaaaggcagacgaaagcggactgccatcaccggatcccaaaccgccctgctcctccgagcctttgagaaggatcgctttccaggcattcctgccagggaagagctggccagagagacgggcctcccggagtccaggattcagctctggtttcagaatcgaagagccaggcactggggacagtctggcagggcgcccacgcaggcaagcatccggtgcaatgcagccccaattgggtga

SEQ ID NO: 221 - DNA, 1617 bp, Homo sapiens
ccaccccccccccccaccaccaccaccaccaccaccccgccggccggccccaggcctcgacgccctgggtcccttccggggtggggcgggctgtcccaggggggctcaccgccattcatgaaggggtggagcctgcctgcctgtgggcctttacaagggcggctggctggctggctggctgtccgggcaggcctcctggctgcacctgccgcagtgcacagtccggctgaggtgcacgggagcccgccggcctctctctgcccgcgtccgtccgtgaaattccggccggggctcaccgcgatggccctcccgacaccctcggacagcaccctccccgcggaagcccggggacgaggacggcgacggagactcgtttggaccccgagccaaagcgaggccctgcgagcctgctttgagcggaacccgtacccgggcatcgccaccagagaacggctggcccaggccatcggcattccggagcccagggtccagatttggtttcagaatgagaggtcacgccagctgaggcagcaccggcgggaatctcggccctggcccgggagacgcggcccgccagaaggccggcgaaagcggaccgccgtcaccggatcccagaccgccctgctcctccgagcctttgagaaggatcgctttccaggcatcgccgcccgggaggagctggccagagagacgggcctcccggagtccaggattcagatctggtttcagaatcgaagggccaggcacccgggacagggtggcagggcgcccgcgcaggcaggcggcctgtgcagcgcggcccccggcgggggtcaccctgctccctcgtgggtcgccttcgcccacaccggcgcgtggggaacggggcttcccgcaccccacgtgccctgcgcgcctggggctctcccacagggggctttcgtgagccaggcagcgagggccgcccccgcgctgcagcccagccaggccgcgccggcagagggggtctcccaacctgccccggcgcgcggggatttcgcctacgccgccccggctcctccggacggggcgctctcccaccctcaggctcctcggtggcctccgcacccgggcaaaagccgggaggaccgggacccgcagcgcgacggcctgccgggcccctgcgcggtggcacagcctgggcccgctcaagcggggccgcagggccaaggggtgcttgcgccacccacgtcccaggggagtccgtggtggggctggggccggggtccccaggtcgccggggcggcgtgggaaccccaagccggggcagctccacctccccagcccgcgcccccggacgcctccgcctccgcgcggcaggggcagatgcaaggcatcccggcgccctcccaggcgctccaggagccggcgccctggtctgcactcccctgcggcctgctgctggatgagctcctggcgagcccggagtttctgcagcaggcgcaacctctcctagaaacggaggccccgggggagctggaggcctcggaagaggccgcctcgctggaagcacccctcagcgaggaagaataccgggctctgctggaggagctttaggacgcggggttgggacggggtcgggtggttcggggcagggcg

SEQ ID NO: 222 - DNA, 594 bp, Homo sapiens
atgccggctgaggtgcacgggagcccgcccgcctctctctgcccgtgtcagtccgtgaaattccggccggggctccctgagatggccctcctgacagctttggacgacaccctccccgaggaagcccagggaccgggaaggcgaatgatactcctttcgaccccgagtcaaagtgatgccctgcgagcctgctttgagcggaacctgtacccgggcattgccaccaaagaagagctggcccagggcatcgacattccggagcccagggtccagatttggtttcagaatgagagatcatgccagttgaggcagcaccggcggcaatctcggccctggcccgggagacgtgacccgcaaaaaggcagacgaaagcggactgccatcaccggatcccaaaccgccctgctcctccgagcctttgagaaggatcgctttccaggcattgctgccagggaagagctggccagagagacgggcctcccggagtccaggattcagatctggtttcagaatcgaagagccaggcaccggggacagtctggcagggcgcccacgcaggcaagcatccggtgcaatgcagccccaattgggtga

SEQ ID NO: 223 - DNA, 3227 bp, Homo sapiens
agtggaaatgcgtcatagagggcgggcggcgacggcggtggcggcgtcggaggcgcctccgggggacggtggcggctcccggcggtgaggccgcgcctgtccggggatcgtcgagggacggcgggagcttgggccagcggcggcggcggcctgggacgcaggcggagccccgcgcaggcccaaggtcccggaggctatggcagcggctaccatcgtgcacgacacgtctgaggccgtggagctctgccctgcttacggcttgtacctgaagcccatcaccaagatgaccatcagcgtggcactcccgcagctgaagcagccggggaagtccatctccaactgggaggtgatggagaggctgaagggcatggtgcagaaccaccagttctccacgctgcgtatttccaagagcaccatggacttcatccgcttcgagggggaggtggagaacaagagcctggtcaagtcttttctggcctgcctggacggcaagaccatcaagctcagcggcttctccgacatcctgaaggtgcgcgcggccgagttcaagatcgacttccccacccgccacgactgggactccttcttccgcgacgccaaggacatgaacgagaccctgccgggggagcggccggacaccatccacctggaggggctgccctgcaagtggttcgccctgaaggagtcgggctccgagaagcccagcgaggacgtcctggtcaaggtgtttgagaagttcggggagatccggaatgtggacatccccatgctggacccctaccgggaggagatgacgggccgcaacttccacaccttcagtttcggggggcacttgaacttcgaggcctatgtgcagtaccgcgagtacatgggcttcatccaggccatgagcgccctgcgcgggatgaaactcatgtacaagggcgaggacggcaaggccgtggcctgcaacatcaaggtttcttttgattcgaccaaacacctgagtgatgcctcaattaagaagcggcagctggagaggcagaagcttcaggaactggagcagcaaagagaagaacaaaagcgcagagagaaggaagcggaggagaggcagcgagcggaggaaaggaaacaaaaggagctggaagagctggagcgagagaggaaaagagaagagaagcttcgcaagagggagcagaagcagagggaccgtgagctgcgccggaatcagaagaagctggagaagctgcaggcggaggagcagaagcagctgcaggagaagatcaagctggaggagcgcaagctgctgctggcccagaggaacctgcagtccatccggctcatcgccgagctgctcagcagagccaaggctgtgaagctacgggaacaggagcagaaggaggagaagctgaggctccagcagcaggaggagcggcggcggctgcaggaggccgagctgcggcgcgtggaggaggagaaggagcgcgcgctgggcctgcagcggaaagagcgggagctgcgcgagcggctgctgagcatcctgctgagcaagaagccggacgacagccacacacacgacgagctgggcgtggcacacgccgacctgctgcagcccgtcctggacatcctgcagaccgtgtcgtccggctgtgtgagcgccaccacgctgcaccccctcgggggccagcccccggccggtgcccccaaggagagcccggcccacccagaggccgacggcgctcccaaaagcgtgaacgggagcgtggccgaggaggccccatgcaaggaggttcagagctcctgtcgtgtggtccccgaggatggctctccagagaagaggtgcccgggcggcgtcctctcctgcattcctgacaacaaccaacagcccaagggcatccctgcctgcgagcagaatgtctccagaaaggacacccggtcagaacaggacaagtgcaaccgggagcccagcaagggccggggccgggccaccggagacgggcttgctgaccggcacaagcgggagaggagccgggccaggcgggccagcagcagggaggacgggaggccacgcaaggagcggcggccccacaagaagcacgcctacaaggatgacagcccccgccggcgcagcacgagcccggaccacacccggtcccggaggtcccacagcaaagacaggcaccggagggagcggagccgggagcggaggggcagcgccagcaggaagcacagccgccaccgccgccgaagcgagcggtcgcgctcccggtccccgagcaggcaccgcagtacctggaacaggtaatgacgggcacggcctccccacggcctgtccgggaaagaccaggacctgctcgagcctcctggccgctccttggccgctctccgtccacccctgcaaagccaagacccttctgcagccacgaatgtccacggagcccgccggcaggaaggaagacaccatgctttagagatccatctttctccactcaccgcagcgtacttggcacttcagtttcaaacacgtagtcctttaaaacttgatccgatagctttaatgcggccggtcctctctcagtcaggaaaattgcacagaccgacagtcgtgaggatggcagagctgctgcattcccccacacggggatttctgtgtctgcttggcgacctccctgcgtgcacggcctaggaggtgcacgggccaccatagtcacactggcactgaaaagaaagcgttgccctggtgattctttcccccccgtttgtaatgttaactgatcaggaagtgcagtttgggtgggatgccgaatcgtcgtgctgacattgagtcacggatgaggaaggtacaagtcctttaagatcaaaactcaaacgggccgttctttctaaggtgtcggtatgtggggagtggtacaaaatggtctgatgctccttcaaaaacattcactttttacaacgtcaaggaattaagcataaaaaagattggttaaaagctttggtttctagtaaaggttagtgtgtgtggtttttttaagaagctgttttgctaaattatttttacttggaatgtttcaaacagatttcaggctgcaaacttgttttataatcgtttgcttctccaagtgaagctcagaaatacctaaaaatagctgtaacgttcgcgttaggaaagatggtgtttattccagtttgcatttttatggtgaaataaaatccttttccaatgaactaaaaaaaaaaaaaaaaaaaaa

SEQ ID NO: 224 - DNA, 2722 bp, Homo sapiens
ttggcgcgtaaaagtggccgggactttgcaggcagcggcggccgggggcggagcgggatcgagccctcgccgaggcctgccgccatgggcccgcgccgccgccgccgcctgtcacccgggccgcgcgggccgtgagcgtcatggccttggccggggcccctgcgggcggcccatgcgcgccggcgctggaggccctgctcggggccggcgcgctgcggctgctcgactcctcgcagatcgtcatcatctccgccgcgcaggacgccagcgccccgccggctcccaccggccccgcggcgcccgccgccggcccctgcgaccctgacctgctgctcttcgccacaccgcaggcgccccggcccacacccagtgcgccgcggcccgcgctcggccgcccgccggtgaagcggaggctggacctggaaactgaccatcagtacctggccgagagcagtgggccagctcggggcagaggccgccatccaggaaaaggtgtgaaatccccgggggagaagtcacgctatgagacctcactgaatctgaccaccaagcgcttcctggagctgctgagccactcggctgacggtgtcgtcgacctgaactgggctgccgaggtgctgaaggtgcagaagcggcgcatctatgacatcaccaacgtccttgagggcatccagctcattgccaagaagtccaagaaccacatccagtggctgggcagccacaccacagtgggcgtcggcggacggcttgaggggttgacccaggacctccgacagctgcaggagagcgagcagcagctggaccacctgatgaatatctgtactacgcagctgcgcctgctctccgaggacactgacagccagcgcctggcctacgtgacgtgtcaggaccttcgtagcattgcagaccctgcagagcagatggttatggtgatcaaagcccctcctgagacccagctccaagccgtggactcttcggagaactttcagatctcccttaagagcaaacaaggcccgatcgatgttttcctgtgccctgaggagaccgtaggtgggatcagccctgggaagaccccatcccaggaggtcacttctgaggaggagaacagggccactgactctgccaccatagtgtcaccaccaccatcatctcccccctcatccctcaccacagatcccagccagtctctactcagcctggagcaagaaccgctgttgtcccggatgggcagcctgcgggctcccgtggacgaggaccgcctgtccccgctggtggcggccgactcgctcctggagcatgtgcgggaggacttctccggcctcctccctgaggagttcatcagcctttccccaccccacgaggccctcgactaccacttcggcctcgaggagggcgagggcatcagagacctcttcgactgtgactttggggacctcacccccctggatttctgacagggcttggagggaccagggtttccagagatgctcaccttgtctctgcagccctggagccccctgtccctggccgtcctcccagcctgtttggaaacatttaatttatacccctctcctctgtctccagaagcttctagctctggggtctggctaccgctaggaggctgagcaagccaggaagggaaggagtctgtgtggtgtgtatgtgcatgcagcctacacccacacgtgtgtaccgggggtgaatgtgtgtgagcatgtgtgtgtgcatgtaccggggaatgaaggtgaacatacacctctgtgtgtgcactgcagacacgccccagtgtgtccacatgtgtgtgcatgagtccatgtgtgcgcgtgggggggctctaactgcactttcggcccttttgctctgggggtcccacaaggcccagggcagtgcctgctcccagaatctggtgctctgaccaggccaggtggggaggctttggctggctgggcgtgtaggacggtgagagcacttctgtcttaaaggttttttctgattgaagctttaatggagcgttatttatttatcgaggcctctttggtgagcctggggaatcagcaaaggggaggaggggtgtggggttgataccccaactccctctacccttgagcaagggcaggggtccctgagctgttcttctgccccatactgaaggaactgaggcctgggtgatttatttattgggaaagtgagggagggagacagactgactgacagccatgggtggtcagatggtggggtgggccctctccagggggccagttcagggccccagctgccccccaggatggatatgagatgggagaggtgagtgggggaccttcactgatgtgggcaggaggggtggtgaaggcctcccccagcccagaccctgtggtccctcctgcagtgtctgaagcgcctgcctccccactgctctgccccaccctccaatctgcactttgatttgcttcctaacagctctgttccctcctgctttggttttaataaatattttgatgacgtttgggccgggttttgggactctgttgggaacatttcggggcgggagaggccaaggttgctggggaaatgcccattctccacttcccttctccctgtccgtgcccgatttgatttgagcctcataactcgaagaaaggtcagcttcctcgctgttttggtcctaactcaaaagcagatccagtaaaggtttttgttgtaaaaaaaaaaaaaaaaaaaaaaa

SEQ ID NO: 225 - DNA, 2006 bp, Homo sapiens
ctagcagcgggtcggagatcgaaggaacgggccaattgcggctgaaacgtctttggaaggaggaagggggtgagggagcatccctttgagtttcgcctcttctcgaggcggtggtgggaagggagacatacttaatactgccctcttaatccaacggaccttacatcgtgtagactgccgggagggcggcgggaaaagggcaagacgggagttggggaagggaaggagccaggaagccgcgcgggagggcgcgcgcgcgcgcccctttttcagcagtgtggcggggtcgcacgcacgcccgcctcggcggctgggcgcgatttgcgacagtggggggggcggtggaggtggcggcggcagcggcaactttgcggcaagctcgggccgggcttgcttgacggcggtgtggcggaggccccgccccaggcggcaggaacctggagggaggcggaggaatatgtccgagagggaagtgtcgactgcgccggcgggaacagacatgcctgcggccaagaagcagaagctgagcagtgacgagaacagcaatccagacctctctggagacgagaatgatgacgctgtcagtatagaaagtggtacaaacactgaacgccctgatacacctacaaacacgccaaatgcacctggaaggaaaagttggggaaagggaaaatggaagtcaaagaaatgcaaatattctttcaaatgtgtaaatagtctcaaggaagatcataaccaaccattgtttggagttcagtttaactggcacagtaaagaaggagatccattagtgtttgcaactgtaggaagcaacagagttaccttgtatgaatgtcattcacaaggagaaatccggttgttgcaatcttacgtggatgctgatgctgatgaaaacttttacacttgtgcatggacctatgatagcaatacgagccatcctctgctggctgtagctggatctagaggcataattaggataataaatcctataacaatgcagtgtataaagcactatgttggccatggaaatgctatcaatgagctgaaattccatccaagagatccaaatcttctcctgtcagtaagtaaagatcatgctttacgattatggaatatccagacggacactctggtggcaatatttggaggcgtagaagggcacagagatgaagttctaagtgctgattatgatcttttgggtgaaaaaataatgtcctgtggtatggatcattctcttaaactttggaggatcaattcaaagagaatgatgaatgcaattaaggaatcttatgattataatccaaataaaactaacaggccatttatttctcagaaaatccattttcctgatttttctaccagagacatacataggaattatgttgattgtgtgcgatggttaggcgatttgatactttctaagtcttgtgaaaatgccattgtgtgctggaaacctggcaagatggaagatgatatagataaaattaaacccagtgaatctaatgtgactattcttgggcgatttgattacagccagtgtgacatttggtacatgaggttttctatggatttctggcaaaagatgcttgcattgggcaatcaagttggcaaactttatgtttgggatttagaagtagaagatcctcataaagccaaatgtacaacactgactcatcataaatgtggtgctgctattcgacaaaccagttttagcagggatagcagcattcttatagctgtttgtgatgatgccagtatttggcgctgggatcgacttcgataaaatacttttgcctaatcaaaattagagtgtgtttgttgtctgtgtaaaatagaattaatgtatcttgctagtaagggcacgtagagcatttagagttgtctttcagcattcaatcaggctgagctgaatgtagtgatgtttacattgtttacattctttgtactgtcttcctgctcagactctactgcttttaataaaaatttatttttgtaaaaaaaaaaaa

SEQ ID NO: 226 - DNA, 7102 bp, Homo sapiens
ttaggggcagaaaaacatttgtaataattaatggctttgagagacacaaggctttgtttgccccagagtattagttaacccacctagtgctcctaatcatacaatattaaggattgggagggacattcattgcctcactctctatttgtttcaccttctgtaaaattggtagaataatagtacccacttcatagcattgtatgatgattaaattggttaatatttttaaaatgcttagaacacagattgggcacataacagcaagcaccacatgtgtttataagataaattcctttgtgttgccttccgttaaagtttaaataagtaaataaataaataaatacttgcatgacattttgaagtctctctataacatctgagtaagtggcggctgcgacaatgctactggagttccagaatcgtgttggtgacaagattgttcaccagcatatggtgtggtgaaaactcactaatttggaattagttcagattattaagcctgaataggtgaaaatcctgaaatcaaggatctttggaactatttgaaatcagtattttatattttcctgttgtattcattaaagtgttgcaagtgttctatttgatggattaagtatatttaggatatacatgttcaatttgtgattttgtatacttaattggaacaagaaagctaataaaggttttgatatggacatctattcttttaagtaaacttcaatgaaaatatatgagtagagcatatagagatgtaaataatttgtggacacaccacagactgaaatagcaaatttaaaagaaattgttggaagaatcaagtgtttgtggaatgagtcctcctagtaaagttcctgctcttgtgaataattaagcctcatgtataattactatagcaaaaggaagcctaagaagtattagactctacttgtatttaaattacattttacataatttatgtgtatgaaaaatgttttaaatgcttattttcgtaagccatgagatagctcctttatattttaagaatttctgaattaatttgcttggattttattagtgcaaatggcagagctagcaattcctttttctgtgttcccattccatcctattcatccctcttttaggaaactctgaactctggattgtccttgtttacatacctgcctcctgcattggactatgtgtctctgagtgtagtatgactaattcatttgtttgtcaaggactctcaatgcatttgttgaacagcctaattagtaatgtctgcaacaatgacattttactgtatttaataaagctctgggaaagtaggatacacataagacaggtctaggtctaaattctttacagaaacttggatttttagttcggtttgaaatttgaagatgtgagtatatttatctcagtttcccaaaggacaagctaattggaattatcatcctctttcacttgattggatccccagaatgccatttacgcatgcagcaggattttataacagttttaaattctgtatatttgatgaagaggttttatatttttggattcaagcctctttttaaacttctacaatatggtttacaataattccttatatcctgcttttgaaatacatattacaactttttaagtttggaaggctatatttcaaggactgaagttacagtatactcaagtgatacacaagcctagcaccccactttccacatagtgttcgataaagattgataaactcgaaatcacagaccttttaattcttaagacaaatagcagcagaaagaaacatctttggcttatttctggtaaggtttttatgctctgtaaaacaaagaattgtattcatccgcgcagcacagattctattaaaaataaatgtgagagtcgttaatgtagtactgctcatttaccatcaaaattcacttttcaggaataatcccatcagtttaaattggatattggaatgagcattgattacatttaacttggtagcccaaaatttcttcatggggttttgaactcggcgggatttcaaaggttttaaaaatgagtttttgattttttttaaaaccctcaaatttcattacctttaaactaggtcgaaacggggcgcaagagattggattaacaccatagtaatacttattttgttcttaaccatttcagggcttcttgaaatagaggctgtatggtgtaatggaaaaaacagccttggaatctgggagcctgattcctggattcagtcccagttttgcgtgaccttgggcaagttactttacttctctgaatttccgtttcctcctctgcaaaatgaggatcgcaatagccaccttgcaaccttgactggagcgagcctcgcacaccccgcgccggcctggaggaagagcagccatgattacgccgccttcgctccgctacccgcttgcggctggcgccctcctccagcaggtgtaggcgctgccgcgctgccccacgcctttccgccgctcgcgggcctgcgcctcggcgtccccgaggaggccgctgcgggctgaggtagcgcaccggcctctcggcgtcccagtccggtcccgggcggagggaaagcgggcgacccacctccgaggcagaagccgaggcccggccccgccgagtgcggaggagcgcaggcagcccccgcccctcggccctccccccggccctcccggccctccctccgccccctccgccctcgcgcgccgcccgcccgggtcgccgcggggccgtggtgtacgtgcagagcgcgcagagcgagtggcgcccgtatgccctgcgctcctccacagcctgggccgggccgcccgggacgctgaggcggcggcggcggccgagggggccggtcttgcgctccccaggcccgcgcgcctgagcccaggttgccattcgccgcacaggccctattctctcagccctcggcggcgatgaggcgctgaggcggctgccggcgctgcgccggagcttaggactcggaagcggccgggccgagggcgtggggtgccggcctccctgaggcgagggtagcgggtgcatggcgcagtaacggcccctatctctctccccgctccccagcctcgggcgaggccgtccggccgctacccctcctgctcggccgccgcagtcgccgtcgccgccgccgccgccgccatggccaatgacagcggcgggcccggcgggccgagcccgagcgagcgagaccggcagtactgcgagctgtgcgggaagatggagaacctgctgcgctgcagccgctgccgcagctccttctactgctgcaaggagcaccagcgtcaggactggaagaagcacaagctcgtgtgccagggcagcgagggcgccctcggccacggagtgggcccacaccagcattccggccccgcgccgccggctgcagtgccgccgcccagggccggggcccgggagcccaggaaggcagcggcgcgccgggacaacgcctccggggacgcggccaagggaaaagtaaaggccaagcccccggccgacccagcggcggccgcgtcgccgtgtcgtgcggccgccggcggccagggctcggcggtggctgccgaagccgagcccggcaaggaggagccgccggcccgctcatcgctgttccaggagaaggcgaacctgtaccccccaagcaacacgcccggggatgcgctgagccccggcggcggcctgcggcccaacgggcagacgaagcccctgccggcgctgaagctggcgctcgagtacatcgtgccgtgcatgaacaagcacggcatctgtgtggtggacgacttcctcggcaaggagaccggacagcagatcggcgacgaggtgcgcgccctgcacgacaccgggaagttcacggacgggcagctggtcagccagaagagtgactcgtccaaggacatccgaggcgataagatcacctggatcgagggcaaggagcccggctgcgaaaccattgggctgctcatgagcagcatggacgacctgatacgccactgtaacgggaagctgggcagctacaaaatcaatggccggacgaaagccatggttgcttgttatccgggcaatggaacgggttatgtacgtcatgttgataatccaaatggagatggaagatgtgtgacatgtatatattatcttaataaagactgggatgccaaggtaagtggaggtatacttcgaatttttccagaaggcaaagcccagtttgctgacattgaacccaaatttgatagactgctgtttttctggtctgaccgtcgcaaccctcatgaagtacaaccagcatatgctacaaggtacgcaataactgtttggtattttgatgcagatgagagagcacgagctaaagtaaaatatctaacaggtgaaaaaggtgtgagggttgaactcaataaaccttcagattcggtcggtaaagacgtcttctagagcctttgatccagcaataccccacttcacctacaatattgttaactatttgttaacttgtgaatacgaataaatgggataaagaaaaatagacaaccagttcgcattttaataaggaaacagaaacaactttttgtgttgcatcaaacagaagattttgactgctgtgactttgtactgcatgatcaacttcaaatctgtgattgcttacaggaggaagataagctactaattgaaaatggtttttacatctggatatgaaataagtgccctgtgtagaatttttttcattcttatattttgccagatctgttatctagctgagttcatttcatctctcccttttttatatcaagtttgaatttgggataatttttctatattaggtacaatttatctaaactgaattgagaaaaaattacagtattattcctcaaaataacatcaatctatttttgtaaacctgttcatactattaaattttgccctaaaagacctcttaataatgattgttgccagtgactgatgattaattttattttacttaaaataagaaaaggagcactttaattacaactgaaaaatcagattgttttgtagtccttccttacactaatttgaactgttaaagattgctgctttttttttgacattgtcaataacgaaacctaattgtaaaacagtcaccatttactaccaataacttttagttaatgttttacaaggaaaaagacacaagaagagtttaaatttttttgttttgttttgtttttttgagacagtcttgctctgttacccaggctggaggggagtggtgcattcttggctcactgcaacctccgcctcccaggttcaagcaatcctcccacctcagcctcccaactagctgggactgcaggcacacaccaccatgcctgactaatttttgtatgtttagtagagacggggttttgccatgttgcctaggctggggtttaagttaaattttttaaaaaactaaagtgactggcactaagtgaacttgagattatcctcagcttcaagttcctaagataagggctttcttaagctttcaggtgtatgtatcctctagatgtagacaataatgtcccatttctaagtcttttccttttgcttctccttaaattgattgtacttccaaatttgctgttatgtttttttcctaatactgtgatctatctgatctgcagacaagaaccttgtctctgttgaagagcatcaaggggagattatgtacacattgaaactgaagtgtggtgttactgacggaatgtgcagtaactcctcagatatctgttaaggcatttcccagatgtgatgccagccttcttacctgtactgaaagatgcttagcttagaaaaaaacaaaacagatgcaaaatcagataattttattttgtttcatgggttttcttatttactttttaaacaaggaaggaatattagaaaatcacacaaggcctcacatacatgttatttaaagaatgaattgggacggatgtcttagacttcactttcctaggctttttagcaaaacctaaagggtggtatccatattttgcgtgaattatgggtgtaagaccttgcccacttaggttttctatctctgtccttgatcttctttgccaaaatgtgagtatacagaaattttctgtatatttcaacttaagacatttttagcatctgtatagtttgtattcaatttgagaccttttctatgggaagctcagtaatttttattaaaagattgccattgctattcatgtaaaacatggaaaaaaattgtgtagtgaagccaacagtggacttaggatgggattgaatgttcagtatagtgatctcacttaggagaatttgcaggagaaagtgatagtttattgttttttcctcgcccatattcagttttgttctacttcctccccttccttccagatgataacatcacatctctacagtaagtgcctctgccagcccaacccaggagcgcaagttgtctttgccatctggtctatagtacagtgcgcggcgttaggccacaactcaaaagcattatcttttttagggttagtagaaattgttttatgttgatgggaggtttgtttgattgtcaaaatgtacagccacagccttttaatttgggagcccctgttgtcattcaaatgtgtacctctacagttgtaaaaagtattagattctactatctgtgggttgtgcttgccagacaggtcttaaattgtatattttttggaaaagtttatatactctcttaggaatcattgtgaaaagatcaagaaatcaggatggccatttatttaatatccattcatttcatgttagtgggactattaacttgtcaccaagcaggactctatttcaaacaaaatttaaaactgtttgtggcctatatgtgtttaatcctggttaaagataaagcttcataatgctgtttttattcaacacattaaccagctgtaaaacacagacctttatcaagagtaggcaaagattttcaggattcatatacagatagactataaagtcatgtaatttgaaaagcagtgtttcattatgaaagagctctcaagttgcttgtaaagctaatctaattaaaaagatgtataaatgttgttgaaacattaaaaaa

SEQ ID NO: 227 - DNA, 3928 bp, Homo sapiens
gtgtgagtcccatgtgcttggtgggaggcgctgtgtgagaatgtacagggcaggaggaaacatagcagggctggggtgcagaggaggcccagagcagtgcactccagtctgcaggtactgcactgggcactggggagaccaacctggccccaggggcttccctgtggctgccttccagggcagtactaggtaaacaggtgcctgtgctgatgccatgttgctaggagtggaacggacaatcagccggagtactcaaggtgacccttggtctctgaatcctgaataacaaagagggtcagaaggaagagtgtcccaggccagtgctgaggccttgtggtggcgatgagctcagcctgttgaggcatggagcagagtgatgggagaggcacatgaggttgggggcctttgaggctgtggttgggaatttgtattttctcaggatggagtgaagacctggagaggaggggctctggctgctgtgtggggatgaattgtgggaagagggtgcagcactggaccccttccctgccacccatccacgtgcatcatcagtgtaatctctgattggattcctaattggggaggtcttgcccatctctagtcagtaactcactgtttctaagcctcctggaccatggcccaattcttctcccagtgaggtggttgctcagagtgccgacccttccatagggagtgagcagtgcaaagaaggtgccccctcctgaaccttgaagtgtagccattagggttttccctggggggccttctcactaattgtactctggtgctgccagagagaaggttgtcagcttcccactgctaggtggcagtagatggtggcagccctctctttccagggcaaggtctggtggatgaggtgcacatggttaatgcagagcagcttaacatccaccacagagggtgagccctgggataatgtgttgggaggcgtcctggggagggtgaggattgaagcagcccagtctgctgtggcgtgcgtgcttggcaagcatcctgttgtggcagtggccactgatgtttgatcgtgaatgtttatcttgggactgtcttgctgggccgggcccataggtgtagctgagcattcgtggggaatggacgccagcagagttgtaccagggcagagaggtcagggcagagaggtcaagacagatggtccgggctggggagaagttgaagggtccttgtgccagtcctcccctttttgtgtgctacctcatcttgccactgcagtgactttgggcagagggtgggacagggaccttttaaaatttttaaatggcatttcagcctgtgctccagttctccatgtggcaggcactgtgctggctgtcttcccagacacttgttatcttgttcacttgttccacaacaacctgtgaaatagctgtgagctccattggatccatggatgaggaacctgagaccaggaagtcacctgcctgatgccacagctcatgtggcagcactgagacttgaaccagggaattgtgtctgcagaagtggctgggccatttcctttacctctcagccacctttctgccagctccctgatgacaaacatcccggggccctggccacagcattgtagggctgggtcaggggagtggcaactgtcaggcagaggaaagaaccctgtagacagagaaaccaagccctgcaatgagtcctgttagatctccaggagttggggctccagaacctcccaagttatgttctcagagagattaattgctaccgctgtaaacagcagtgtttattacccctgctgtacacatcaggcagttgaggcccattcaggtgttggaactggctagggttacccagcaaattatccttggagttggaattaggtctttctattcagactgtagcttttggctcctgttcggaggtctatgggacagataatttagtggggattctttgtagtccagggcagcagttcttaacattgctgcatggtagaattacctgggaagctttaccaatttcaggcccttccttaggccaggtacttcagaacctcagagctccccagggggctccactccacagccaagggtaagaattcctggtctagggctgtgaggccacctccttgcacacctgaaaatgtttaaattggtattattctactgaaatggctgaggtggggtttggggtatcttgaaacaaatcaaactctgttactaattgagccctagctgggtgccaggccccaggtatgtgtgttgggagggagtgggctcttgaggcccaggagctgaggtttctgatagacttggggatgggattttggctgaaaaagaaagtcttttggggcaggagcttggaacccttgacccaaggagtcatggggaagatggggcaaggaggggtgggaaaataggtaattcatggctgcttctctaagatgtgcctgcctagccccagtaaacctacctccctccatccctgccaggccatggtggcgtgttacccaggcaacgggctcgggtacgtaaggcacgttgacaatccccacggcgatgggcgctgcatcacctgtatctattacctgaatcagaactgggacgttaaggtaggggtgagggtgagggtgagggtggcgctggggctagggctggggcgggggtggcgtgcgtccactccattttccactctcagcccagattctggcattctcctgtttctcttctcaacacacagcgggcagtgcgatctgccggctcttcctgggaaatggcacctcctcctctctagcggactgtgtggtgggaactcccctctttccgggaatggtgctgtctgcccagccccacccggccttgtaatgaacactttcccccttttcctgtctttagtagcttcctgcccatctccatggtgatgcagtctctgggttgtcattcactttgagagcccgaggggtgggagggagtgatgcaggcagacgctgcgcctcctagtgggctcccggggcaccgtgggaggcagcggctcctggccgtaccagctagcctcatcctttggcctgcccccaggtgcatggcggcctgctgcagatcttccctgagggccggcccgtggtagccaacatcgagccactctttgaccggttgctcattttctggtctgaccggcggaacccccacgaggtgaagccagcctatgccaccaggtacgccatcactgtctggtattttgatgccaaggagcgggcagcagccaaagacaagtatcagctagcatcaggacagaaaggtgtccaagtacctgtatcacagccgcctacgcccacctagtggccagtcccagagccgcatggcagacagcttaaatgacttcaggagagccctgggcctgtgctggctgctccttccctgccaccgctgctgcttctgactttgcctctgtcctgcctggtgtggagggctctgtctgttgctgaggaccaaggaggagaagagacctttgctgccccatcatgggggctggggttgtcacctggacagggggcagccgtggaggccaccgttaccaactgaagctgggggcctgggtcctaccctgtctggtcatgaccccattaggtatggagagctgggaggaggcattgtcacttcccaccaggatgcaggacttggggttgaggtgagtcatggcctcttgctggcaatggggtgggaggagtacccccaagtcctctcactcctccagcctggaatgtgaagtgactccccaacccctttggccatggcaggcaccttttggactgggctgccactgcttgggcagagtaaaaggtgccaggaggagcatgggtgtggaagtcctgtcagccaagaaataaaagtttacctcagagctgcaaaaaaaaaaaaaaaaaaaaaaaaaaaaaaaaaaa

SEQ ID NO: 228 - DNA, 3136 bp, Homo sapiens
gcgcagaacttggggagccgccgccgccatccgccgccgcagccagcttccgccgccgcaggaccggcccctgccccagcctccgcagccgcggcgcgtccacgcccgcccgcgcccagggcgagtcggggtcgccgcctgcacgcttctcagtgttccccgcgccccgcatgtaacccggccaggcccccgcaactgtgtcccctgcagctccagccccgggctgcacccccccgccccgacaccagctctccagcctgctcgtccaggatggccgcggccaaggccgagatgcagctgatgtccccgctgcagatctctgacccgttcggatcctttcctcactcgcccaccatggacaactaccctaagctggaggagatgatgctgctgagcaacggggctccccagttcctcggcgccgccggggccccagagggcagcggcagcaacagcagcagcagcagcagcgggggcggtggaggcggcgggggcggcagcaacagcagcagcagcagcagcaccttcaaccctcaggcggacacgggcgagcagccctacgagcacctgaccgcagagtcttttcctgacatctctctgaacaacgagaaggtgctggtggagaccagttaccccagccaaaccactcgactgccccccatcacctatactggccgcttttccctggagcctgcacccaacagtggcaacaccttgtggcccgagcccctcttcagcttggtcagtggcctagtgagcatgaccaacccaccggcctcctcgtcctcagcaccatctccagcggcctcctccgcctccgcctcccagagcccacccctgagctgcgcagtgccatccaacgacagcagtcccatttactcagcggcacccaccttccccacgccgaacactgacattttccctgagccacaaagccaggccttcccgggctcggcagggacagcgctccagtacccgcctcctgcctaccctgccgccaagggtggcttccaggttcccatgatccccgactacctgtttccacagcagcagggggatctgggcctgggcaccccagaccagaagcccttccagggcctggagagccgcacccagcagccttcgctaacccctctgtctactattaaggcctttgccactcagtcgggctcccaggacctgaaggccctcaataccagctaccagtcccagctcatcaaacccagccgcatgcgcaagtaccccaaccggcccagcaagacgcccccccacgaacgcccttacgcttgcccagtggagtcctgtgatcgccgcttctcccgctccgacgagctcacccgccacatccgcatccacacaggccagaagcccttccagtgccgcatctgcatgcgcaacttcagccgcagcgaccacctcaccacccacatccgcacccacacaggcgaaaagcccttcgcctgcgacatctgtggaagaaagtttgccaggagcgatgaacgcaagaggcataccaagatccacttgcggcagaaggacaagaaagcagacaaaagtgttgtggcctcttcggccacctcctctctctcttcctacccgtccccggttgctacctcttacccgtccccggttactacctcttatccatccccggccaccacctcatacccatcccctgtgcccacctccttctcctctcccggctcctcgacctacccatcccctgtgcacagtggcttcccctccccgtcggtggccaccacgtactcctctgttccccctgctttcccggcccaggtcagcagcttcccttcctcagctgtcaccaactccttcagcgcctccacagggctttcggacatgacagcaaccttttctcccaggacaattgaaatttgctaaagggaaaggggaaagaaagggaaaagggagaaaaagaaacacaagagacttaaaggacaggaggaggagatggccataggagaggagggttcctcttaggtcagatggaggttctcagagccaagtcctccctctctactggagtggaaggtctattggccaacaatcctttctgcccacttccccttccccaattactattccctttgacttcagctgcctgaaacagccatgtccaagttcttcacctctatccaaagaacttgatttgcatggattttggataaatcatttcagtatcatctccatcatatgcctgaccccttgctcccttcaatgctagaaaatcgagttggcaaaatggggtttgggcccctcagagccctgccctgcacccttgtacagtgtctgtgccatggatttcgtttttcttggggtactcttgatgtgaagataatttgcatattctattgtattatttggagttaggtcctcacttgggggaaaaaaaaaaaagaaaagccaagcaaaccaatggtgatcctctattttgtgatgatgctgtgacaataagtttgaacctttttttttgaaacagcagtcccagtattctcagagcatgtgtcagagtgttgttccgttaacctttttgtaaatactgcttgaccgtactctcacatgtggcaaaatatggtttggtttttctttttttttttttttgaaagtgttttttcttcgtccttttggtttaaaaagtttcacgtcttggtgccttttgtgtgatgcgccttgctgatggcttgacatgtgcaattgtgagggacatgctcacctctagccttaaggggggcagggagtgatgatttgggggaggctttgggagcaaaataaggaagagggctgagctgagcttcggttctccagaatgtaagaaaacaaaatctaaaacaaaatctgaactctcaaaagtctatttttttaactgaaaatgtaaatttataaatatattcaggagttggaatgttgtagttacctactgagtaggcggcgatttttgtatgttatgaacatgcagttcattattttgtggttctattttactttgtacttgtgtttgcttaaacaaagtgactgtttggcttataaacacattgaatgcgctttattgcccatgggatatgtggtgtatatccttccaaaaaattaaaacgaaaataaagtagctgcgattggg

SEQ ID NO: 229 - DNA, 2992 bp, Homo sapiens
aactgagcgaggagcaattgattaatagctcggcgaggggactcactgactgttataataacactacaccagcaactcctggcttcccagcagccggaacacagacaggagagagtcagtggcaaatagacatttttcttatttcttaaaaaacagcaacttgtttgctacttttatttctgttgatttttttttcttggtgtgtgtggtggttgtttttaagtgtggagggcaaaaggagataccatcccaggctcagtccaacccctctccaaaacggcttttctgacactccaggtagcgagggagttgggtctccaggttgtgcgaggagcaaatgatgaccgccaaggccgtagacaaaatcccagtaactctcagtggttttgtgcaccagctgtctgacaacatctacccggtggaggacctcgccgccacgtcggtgaccatctttcccaatgccgaactgggaggcccctttgaccagatgaacggagtggccggagatggcatgatcaacattgacatgactggagagaagaggtcgttggatctcccatatcccagcagctttgctcccgtctctgcacctagaaaccagaccttcacttacatgggcaagttctccattgaccctcagtaccctggtgccagctgctacccagaaggcataatcaatattgtgagtgcaggcatcttgcaaggggtcacttccccagcttcaaccacagcctcatccagcgtcacctctgcctcccccaacccactggccacaggacccctgggtgtgtgcaccatgtcccagacccagcctgacctggaccacctgtactctccgccaccgcctcctcctccttattctggctgtgcaggagacctctaccaggacccttctgcgttcctgtcagcagccaccacctccacctcttcctctctggcctacccaccacctccttcctatccatcccccaagccagccacggacccaggtctcttcccaatgatcccagactatcctggattctttccatctcagtgccagagagacctacatggtacagctggcccagaccgtaagccctttccctgcccactggacaccctgcgggtgccccctccactcactccactctctacaatccgtaactttaccctggggggccccagtgctggggtgaccggaccaggggccagtggaggcagcgagggaccccggctgcctggtagcagctcagcagcagcagcagccgccgccgccgccgcctataacccacaccacctgccactgcggcccattctgaggcctcgcaagtaccccaacagacccagcaagacgccggtgcacgagaggccctacccgtgcccagcagaaggctgcgaccggcggttctcccgctctgacgagctgacacggcacatccgaatccacactgggcataagcccttccagtgtcggatctgcatgcgcaacttcagccgcagtgaccacctcaccacccatatccgcacccacaccggtgagaagcccttcgcctgtgactactgtggccgaaagtttgcccggagtgatgagaggaagcgccacaccaagatccacctgagacagaaagagcggaaaagcagtgccccctctgcatcggtgccagccccctctacagcctcctgctctgggggcgtgcagcctgggggtaccctgtgcagcagtaacagcagcagtcttggcggagggccgctcgccccttgctcctctcggacccggacaccttgagatgagactcaggctgatacaccagctcccaaaggtcccggaggccctttgtccactggagctgcacaacaaacactaccaccctttcctgtccctctctccctttgttgggcaaagggctttggtggagctagcactgccccctttccacctagaagcaggttcttcctaaaacttagcccattctagtctctcttaggtgagttgactatcaacccaaggcaaaggggaggctcagaaggaggtggtgtggggacccctggccaagagggctgaggtctgaccctgctttaaagggttgtttgactaggttttgctaccccacttccccttattttgacccatcacaggtttttgaccctggatgtcagagttgatctaagacgttttctacaataggttgggagatgctgatcccttcaagtggggacagcaaaaagacaagcaaaactgatgtgcactttatggcttgggactgatttgggggacattgtacagtgagtgaagtatagcctttatgccacactctgtggccctaaaatggtgaatcagagcatatctagttgtctcaacccttgaagcaatatgtattataaactcagagaacagaagtgcaatgtgatgggaggaacatagcaatatctgctccttttcgagttgtttgagaaatgtaggctattttttcagtgtatatccactcagattttgtgtatttttgatgtacactgttctctaaattctgaatctttgggaaaaaatgtaaagcatttatgatctcagaggttaacttatttaagggggatgtacatatattctctgaaactaggatgcatgcaattgtgttggaagtgtccttggtgccttgtgtgatgtagacaatgttacaaggtctgcatgtaaatgggttgccttattatggagaaaaaaatcactccctgagtttagtatggctgtatatttctgcctattaatatttggaattttttttagaaagtatatttttgtatgctttgttttgtgacttaaaagtgttacctttgtagtcaaatttcagataagaatgtacataatgttaccggagctgatttgtttggtcattagctcttaatagttgtgaaaaaataaatctattctaacgcaaaaccactaactgaagttcagataatggatggtttgtgactatagtgtaaataaatacttttcaacaataaaaaaaaaaaaaaa

SEQ ID NO: 230 - DNA, 4342 bp, Homo sapiens
gatcaatactgaggccgcgtccgacccccttgagccgagatccccccccagcccagcccccaccccaccccccgcacacgccccaccccccccacgacccagcctcataccgcaccagctgaggcacccaagaggattaccccctggggccctctcccgccccccaaaaaagagaagatcccctctcctggcccatcccttcccttcttccctcccccctccccccgaactttccctctcgcatgcttttcccctgcaccacggatcgcctctcggatgccgcttgcctggaagctgcgttaggagcgagcggcggcggtggcggcggtggcggcggcggcggcagctcgggagtgctatgaccggcaaactcgccgagaagctgccggtgaccatgagcagtttgctaaaccaactgcctgacaatctgtaccccgaggagatccccagcgcgctcaacctcttctccggcagcagcgactcggtagtccattacaatcagatggctacagagaatgtaatggacatcggtctgaccaacgagaagcccaacccggaactctcttactccggctccttccagccagcccccggcaacaagaccgtgacctacttgggaaagttcgccttcgactccccttccaactggtgccaggacaacatcattagcctcatgagcgccggcatcttgggggtgcccccggcttcaggggcgctcagcacgcagacgtccacggccagcatggtgcagccaccgcagggtgacgtggaggccatgtatcccgcgctacccccctactccaactgcggcgacctctactcagagcccgtgtctttccacgacccccagggcaatcccgggctcgcctattccccccaggattaccaatcggccaagccggcgttggacagcaatctcttccccatgattcctgactacaacctctaccaccaccccaacgacatgggctccattccggagcacaagcccttccagggcatggaccccatccgggtcaacccgccccctattacccctctggagaccatcaaggcattcaaagacaagcagatccacccgggctttggcagcctgccccagccgccgctcaccctcaagcccatccggccccgcaagtaccccaaccggcctagcaagacaccgctccacgaacggccccacgcgtgcccggccgagggctgcgaccgccgtttcagccgttcggacgagctgacccggcacctgcgcatccacacgggccacaagcccttccagtgccggatctgcatgcggagcttcagccgcagcgaccacctcaccactcacatccgcactcatacgggcgagaagccctttgcctgcgagttctgcgggcgcaagtttgcgcgcagcgacgagcgcaagcgccacgccaagatccacctcaagcaaaaggagaagaaggcggagaagggcggtgcaccctctgcatcctcggcgccccccgtgtcgctggcccccgtggtcaccacctgcgcctgaggatcgggcccccagatccccacttttcccctccagtgcctcccggctgctagcctgaaagcagcgggaaagccagccacggaggcgtaggggccgcgccctggcctctccatggacgtgcggccccttgcttccccttcgatgcccccggttcccaacctttcacgccggccagcggtcaggggccagggctggaggcgccttcccctcgcggtcccccacttagccaaggcgtgggggcggaaaggtggcgtctagcccgctttgttcagttcggatcgccttgatccaggggccgccgggccgcgccaaggacctgcaagggactgaaggcggagcccatccaaccctcgcccgacccaaacacctcattgtttcccccacgtctccctctataccccctcgaagactcgagagggggagggggtaaggagcgcaccaaagcgcagagcttgctgcccgccgcacgcacgcgcgcctgcgtgcggggatgcgcgcgagtgtgtgcgtgctcgcgtgtgtgtgtatgtgtgtgtgtgagtgtgtgtgtgtgcgcgcgcgcaagcgtgtgtgtttaagactcttgagctgaactgggctgtgtttaccccaaactcttccccacctcgggtccccaagccgctgggagatgtcccatgctgggggtccgcacgtggctggaggaggtggtcttccatccgctctgaaatcatgtttcttagagaaatgcctcggatgccgccgacgcggtgctgctgccgccgcttcgggtttggcccctcagaacccctccttttctgagcgcttccctcttaggcctcagggcagtttgatctgtggggagaaagagcagccatcgctgagcctgccttttaaaatatatgtgtatttccttagccccactctaagaaatctatgttcctgagtttgccccctgccctcccactccttccccttctcccctctaaaccttctcccatctctttcaaaatcttttcccagaaaggcaggcttcaaccagccactccagctttgtgtcttctctcaattacatagcaatttctccttcccaccatcatggggaagctggctctgcttttgccctttgtcatcaccaacacaacagatagaatttaaatataagtatatggtgtgcgtgtgtatgtatgtgtatgtatatgcatgcatgtgtataaagatgcacatgcgtacatatacataacatacacacaatatgtattcctagcaaaataaaatctctaaggtacttggttatccagtgcagtgcaccggaataaagagaatttgtaggcgtatacagctttaaatgatttattttttatgaaaatgttaactgatgagattatatctacatacgtgtgttatgtgtgtggatatagatgcacacatatctgtacatatacatgtgagtgtacatatatacacatatacacatctatgtatggatatgtgtgtatacacatatacacatctctgtccaaaatttcctcaaagatatggggattttttcatgaatccatgtggatgaatgaggtgtctcctttccatacccagtctcaccttctccccaccctacctcacctcttctcaggcacccctcttccccagctgtcctgccagcccttctcgtacagggtggctcctttgaagtggagtaatagggaaggttgctctctgccacagcttgcagcatggtcttgactgaatgtactgttcctgttagcgttacttctcctgtggtcagtaagttgcccagagagaaggaacaaaggtctggagtttacagaatgtctgtttttaaagtcactttatgcgttttccacttttttcttttttaagaaaaagaagtaccatttttgttttgttttgttttgatttttggtggtggataaataatactaaaaggactctagtggaaaggggggatatcgaagagcagggggttgtgaatttccaggtacttggactttttgtagaaggagagagaagaagatgaagtttgccaggagggcccatattttttcagctgaagggtaaaatctttctttgcagagacagtattttgctgaatactttttataatgtgatgattattaaaaaagcaaaaattttggtcacttccaagctagaaggaggaatcagataccctttaatattttttcctcgctccttctggtatatgcatgtcactgcatgataattgagttttcctttgttttaataaaactgttctcagacattaagctaaactaagagaaaaataactttgttgccaaaaggttgtgctatccagattttttatatgtctgcatgtttaaaaaaaaaaagcaacaaaagaaaatgcactctaacttatgtgaactgagagaaaaaaatcaggttttaaacaggaaaacctatggggaatgatattttttgaaagacttttgtataaagttgagtacttagaaaaaagacaaaccagatgtaatatattttgtggatgtttttatttcttggatttatagtaccttatactaaggttaaaaaaatatgcttgatattgtgaaaaggtgaaattcttcaccaacatttcatttgctcctttgtcatattgtaatgccaatataatatagttaatgaaaacagcatttttaaaaaccgaaatattgaaatggtgtaatgttgtaccatttgcactgtgagcaaatgctaatacagtaaatatattgtgtttgctgacaatcagccggcctataaatctccttattttatttcttgtttttatagcataaagctttagtttggcctgaaaaaaaa

SEQ ID NO: 231 - DNA, 2379 bp, Homo sapiens
cgggagtccccggcacacatcctgtgtccatgtttgggcatttacgtcacggcggcagggccggggcctcccaaaatggcagtggcccggggagtcggaagcccggagccagcgccgccgcagctatataagtgggggggctgtgggctgggggagcccggcagcgctttggagaggcgaggagccgccgcccgaggccggtgcgggcgagcgagggcgccgcggctccccgactcctttcccagaggtgagtgcccgaagccaggagcccgggcgcctaggtctgtgcgctgcggggaacccctaccgccagcctccccgccacccgcgcgcccccaagcccagcgggcgaggccccgggcgccccacagccggcgccgcgccatgctccaccttagcgagttttccgaacccgacgcgctcctcgtcaagtccactgaaggctgttgcgccgaacccagcgctgaattgccccggctgcctgccagggacgctcccgcggccaccggctaccctggagcaggcgacttcttgagctgggctttgaacagctgcggcgcaagtggggacttagccgactcctgcttcctggaggggcctgcgcccacaccccctcccggcctcagctacagcggtagcttcttcattcaggcagtgcccgaacacccgcacgacccggaggcactcttcaacctcatgtcgggcatcttaggcctggcacccttccccggtccagaggcagcagcgtccagatccccgctggatgccccttttcctgcggggtccgatgccttgctgccgggtccgccggacctttactccccggatctgggcgctgcccctttcccagaggcgttctgggaggcctcgccttgcgcgggtgccccctcgcagtgcctgtatgagcctcagctctccccgcccgacgtcaagcccggcctccgggcgcctcccgcctcgccagcgctggacgctgtctctgccttcaagggtccctacgcgccctgggagctgctttctgtgggggccccagggaactgtgggtcacagggagactaccaggccgccccggaggctcgttttcccgtaatagggaccaagattgaggacttgctgtccatcagctgccctgcggaactgccggccgtcccagccaacagactctatcccagcggggcctatgacgctttcccgctggccccgggtgacttaggggagggggctgagggcctccctgggctcctgacccctcctagtggggagggagggagtagcggcgacggcggagagtttctggccagtacgcagcctcagctttccccgctgggccttcgcagcgccgccgcggcggacttccctaaacctctggtggcggacatccctggaagcagtggcgtggctgcaccacccgtgccgccgccgccgcccacccctttcccccaggccaaggcgcgacgcaaggggcgccgcggcggcaaatgcagcacgcgctgcttctgcccgcggccgcacgccaaggccttcgcttgcccggtggagagttgtgtgcggagctttgcgcgctccgacgagctcaatcgccacctgcgcatccacacgggccacaaacccttccagtgccgcatctgcctccgcaacttcagccgcagcgaccacctcaccacgcacgtgcgcacccacaccggcgagaagccttttgcttgcgacgtgtgcggccgccgcttcgcgcgcagcgatgagaagaaacggcacagcaaggtgcacctcaagcagaaggcgcgcgccgaggagcggctcaagggcctcggcttttactcgctgggcctctccttcgcttctctctgagcaagagatgggtttatgggttggggcgccgccgttcggcgcgcacgagttccgggccgttcccctccccgctcttcttccaactcctcctcgcacgcccgagggccggcctccggtcccgcttccagtttccttgaagcgcccgccgcacacgccctattcagcaccagctccgcggacagttcccgcggtccaggcgctgtcacccttgtcagccgcgctttgggggaagtcttctgagaccacccagtgaataggcactaccctgggattcaagacagtcttttgtaactggcacacgccccacgccttcctctataacccccagagacaggctggggcagcgccaaggcggtctcgcgcgggactttgtacagcagtgtcttatccagcagccattggatgtaacgttttgctttgggttttttttccttttgttgttgttaatttttgtaaagcagacgctactctcaagcagttgacaaaactgtttatttttgcaattaaaattattgtgctaaaagcttaaaaaaa

SEQ ID NO: 232 - DNA, 3617 bp, Homo sapiens
acccgtggtgccccatccctataggagctggtgagattgcagcctgctgcctcccctccatcagccacagctattggatttcccacccagaatctttaggtaaatgagatcatgattctggaaggaggtggtgtaatgaatctcaaccccggcaacaacctccttcaccagccgccagcctggacagacagctactccacgtgcaatgtttccagtgggttttttggaggccagtggcatgaaattcatcctcagtactggaccaagtaccaggtgtgggagtggctccagcacctcctggacaccaaccagctggatgccaattgtatccctttccaagagttcgacatcaacggcgagcacctctgcagcatgagtttgcaggagttcacccgggcggcagggacggcggggcagctcctctacagcaacttgcagcatctgaagtggaacggccagtgcagtagtgacctgttccagtccacacacaatgtcattgtcaagactgaacaaactgagccttccatcatgaacacctggaaagacgagaactatttatatgacaccaactatggtagcacagtagatttgttggacagcaaaactttctgccgggctcagatctccatgacaaccaccagtcaccttcctgttgcagagtcacctgatatgaaaaaggagcaagacccccctgccaagtgccacaccaaaaagcacaacccgagagggactcacttatgggaattcatccgcgacatcctcttgaacccagacaagaacccaggattaataaaatgggaagaccgatctgagggcgtcttcaggttcttgaaatcagaggcagtggctcagctatggggtaaaaagaagaacaacagcagcatgacctatgaaaagctcagccgagctatgagatattactacaaaagagaaattctggagcgtgtggatggacgaagactggtatataaatttgggaagaatgcccgaggatggagagaaaatgaaaactgaagctgccaatactttggacacaaaccaaaacacacaccaaataatcagaaacaaagaactcctggacgtaaatatttcaaagactacttttctctgatatttatgtaccatgaggggaacaagaaactacttctaacgggaagaagaaacactacagtcgattaaaaaaattattttgttacttcgaagtatgtcctatatggggaaaaaacgtacacagttttctgtgaaatatgatgctgtatgtggttgtgattttttttcacctctattgtgaattctttttcactgcaagagtaacaggatttgtagccttgtgcttcttgctaagagaaagaaaaacaaaatcagagggcattaaatgttttgtatgtgacatgatttagaaaaaggtgatgcatcctcctcacataagcatccatatggcttcgtcaagggaggtgaacattgttgctgagttaaattccagggtctcagatggttaggacaaagtggatggatgccgggaagtttaacctgagccttaggatccaatgagtggagaatggggacttccaaaacccaaggttggctataatctctgcataaccacatgacttggaatgcttaaatcagcaagaagaataatggtggggtctttatactcattcaggaatggtttatctgatgccagggctgtcttcctttctcccctttggatggttggtgaaatactttaattgccctgtctgctcacttctagctatttaagagagaacccagcttggttcttttttgctccaagtgcttaaaaataagttggaaaaaggagacggtggtgtggaaatggctgaagagtttgctcttgtatccctatagtccaaggtttctcaatctgcacaattgacatttttggccggagtgttctttgtggtgagggctttcctgtgcattgtaagatgttcagcagtatccactcatggtctctaaccacttgacaccagaaaccccccagctgtgataacgcaaaatgtctctagacatcaccaaatgttccctgggggtggcaaatttgcccttgattgagaaccaccagtttagctagtcaatatgaggatggtggtttattctcagaagaaaaagatatgtaaggtcttttagctccttagagtgaagcaaaagcaagacttcaacctcaacctatctttatgttttaaatgttagggacaataagttgaaatagctagaggagcttcttttcagaaccccagatgagagccaatgtcagataaagtaagcatagtaatgtagcaggaactacaatagaagacattttcactggaattacaaagcagaattaaaattatattgtagaaggaaacaccaagaaaagaatttccagggaaaatcctctttgcaggtattaattcttataattttttgtcttttggattatctgtttactgtctcatctgaactgatcccaggtgaacggtttattgcctagatttgtactcagaggaattttttttgttttgttttgtcttttaagaaaggaaagaaaggatgaaaaaaataaacagaaaactcagctcaggcacaattgtcaccaaggagttaaaagcttcttcttcaatagaggaattgttctgggggtcctggagacttaccattgagccatgcaatctgggaagcacaggaataagtagacactttgaaaatggatttgaatgttctcatcccttttgcagcttttctttttggctctctcatgtccttggcttgctcctctattctacctctctttctccagcaataatatgcaaatgaagacatgtatccataagaaggagtgctcttcatcaactaatagagcacctaccacagtgtcatacctggtagaggtgagcaattcatattcaaaggttgcaaagtgtttgtaatatattcatgaggctggaagtaagaagaattaaaaatttgtcctaattacaatgagaaccattctaggtagtgatcttggagcacacatgaataactttctgaaggtgcaaccaaatccatttttatttctgcctggcttggtcacctctgtaaaggtttaacttagtgttgtcaagtaacagttactgaaagagctgagaaaaagaacaatgaacagcaacgatcttgactgtgcaactcagacattcctgcagaaaagacatatgttgctttacaagaaggccaaagaactatggggccttcccagcatttgactgttcattgcatagaatgaattaaatatccagttacttgaatgggtataacgcatgaatatttgtgtgtctgtgtgtgtgtctgagttgtgtgattttattaggggcatctgccaattctctcactgtggttccttctctgactttgcctgttcatcatctaaggaggctagatccttcgctgacttcaccattcctcaaacctgtaagtttctcacttcttccaaattggctttggctctttctgcaacctttccattcaagagcaatctttgctaaggagtaagtgaatgtgaagagtaccaactacaacaattctacagataattagtggattgtgttgtttgttgagagtgaaggtttctt

SEQ ID NO: 233 - DNA, 4985 bp, Homo sapiens
agtccgggtcttggcgggccccctcctccctcccgctccccgcgctctcgccttttaatcatgcccctctgtctgtgtgtgagtgcaggcaggctgacaatgatttcctcagtgattacgtacagagcgagtccctgcgggttaggggccccctctggagccatcctgatggctttgggggccttgcttccattttccattattatgtggactaccggagcgacagcgcagtccaagaccttgcaggatgtctcgccgcaagcaagcgaaaccgagatccctcaaagaccccaactgtaaacttgaagacaagactgaagatggagaggcactagattgtaagaagaggccggaagacggggaggagttggaagacgaagctgtgcacagctgtgacagctgcctccaggtgtttgaatcgctgagcgatatcacagaacacaagattaatcaatgtcaactgacagatggagtggatgttgaagatgatccgacttgctcttggccagcttcctcaccttctagcaaggatcagacttcccctagccatggagaaggttgcgattttggagaggaagaaggtggccctgggcttccatacccgtgtcaattctgtgacaagtcgtttagccgcctcagctacctaaagcaccatgagcagagtcacagtgacaaactgcctttcaaatgcacctactgcagtaggctgttcaaacacaagcgcagccgagatcgccacataaaactccacaccggggacaagaagtaccactgcagtgaatgtgatgctgcgttttccagaagtgatcacttgaagatccacttaaagactcacacgtccaacaagccatataaatgtgccatttgtcgccgtgggtttctgtcctctagttccttacacggacacatgcaggttcatgagaggaacaaggacggctctcagtccggttccaggatggaggactggaagatgaaggacactcagaagtgcagtcagtgtgaggaaggctttgacttcccggaagacctccaaaaacacattgcagagtgccaccccgaatgctccccaaatgaggaccgagcggccctccagtgtgtctactgccacgagctcttcgtagaggagacctccctcatgaaccacatggagcaggtgcatagcggggagaagaagaactcatgcagcatttgttctgagagtttccacacagttgaggaactgtacagccacatggacagtcaccagcaaccggagtcatgcaatcacagcaacagcccttccctggtcacggtgggctatacctccgtgtccagtacgactccagattccaacctctcagtggacagctcaaccatggtggaagctgccccgccaatcccaaagagtcgagggaggaagagggccgctcaacaaacccctgacatgactggtccctcgagtaaacaagcaaaagttacctacagctgtatttactgcaacaaacaattattttcaagtcttgcagttctgcagattcacctgaaaactatgcacttagataagccagaacaggcccatatttgtcagtattgcttggaggtcctgccctcactctataacctaaatgaacatcttaagcaagtgcatgaagctcaggacccaggtctgattgtttctgccatgcctgccattgtctaccagtgtaacttctgttccgaagttgtcaacgacctcaacactcttcaggaacacatccgatgttctcatggatttgcaaaccctgcagctaaagatagtaatgcattcttttgtccccattgctatatggggtttctcactgactcttccctggaagagcatattagacaggttcattgtgacctcagtggctcccgatttgggtctccagtgcttgggactcccaaagaaccagtagtagaagtctattcttgttcctattgtacaaattcgccaatattcaacagcgttcttaaactgaacaagcatatcaaagagaatcataaaaacattcccttggccctgaattatatccacaatgggaagaaatccagggccttaagccccctatctcctgtggccatagagcagacatctcttaagatgatgcaggcagtaggaggtgcacctgcacgtcccactggagaatatatctgtaatcaatgtggtgctaagtacacatccctagacagctttcagactcacctaaaaactcatctcgacactgtgcttccaaaattgacctgtcctcagtgcaacaaggaattccccaaccaagaatccttgctgaagcatgttaccattcactttatgatcacttcaacgtattacatctgtgagagttgtgacaagcaattcacatcagtggatgaccttcagaaacacctgctggacatgcacacctttgtcttctttcgctgcaccctctgccaggaagtttttgactcaaaagtctccattcagctccacttggctgtgaagcacagtaacgaaaagaaagtctataggtgcacatcttgcaactgggacttccgcaacgaaactgacttgcagctccatgtgaaacacaaccacctggaaaaccaagggaaagtgcataagtgcattttctgcggtgagtcctttggcaccgaggtggagctgcaatgccacatcaccactcacagtaagaagtacaactgcaagttctgtagcaaagccttccatgcgatcattttgttagaaaaacacttgcgagaaaaacactgtgtattcgaaaccaagacacccaactgtggaacaaatggagcttccgagcaagtgcagaaagaggaagtggagctgcagactttgctgaccaacagccaggagtcccacaacagtcacgatgggagcgaagaagacgttgacacctctgagcctatgtacggctgcgacatttgtggggcagcctacactatggaaactttgctgcagaatcaccagctccgagaccacaacatcagacctggagaaagtgccatcgtgaaaaagaaagctgagctcattaaagggaattacaagtgcaacgtgtgctctcgaaccttcttctccgaaaatggcctccgggaacatatgcagacccacctaggccctgtcaaacactacatgtgccctatttgcggagagcggtttccctcccttttaactcttactgaacacaaagtcacgcatagtaagagtcttgatactggaaactgccggatttgcaagatgcctctccagagtgaagaggagtttttagagcattgccaaatgcaccctgacttgaggaattccctgacaggctttcgctgcgtggtgtgcatgcagacagtgacctccaccttggaactcaaaatccatgggacgttccacatgcaaaagacagggaatgggtctgcagttcagaccacagggcggggccagcacgtccaaaaactgtataagtgcgcatcttgcctcaaagaattccgttccaagcaagatctggtgaaacttgatatcaatggcctgccatatggtctgtgtgccggctgcgtgaatctcagtaagagcgccagcccaggcattaacgtccctcccggcacgaatagaccaggcttgggccagaatgagaatctgagtgccattgaggggaaaggcaaggtggggggactgaagacacgctgctctagctgcaacgttaagtttgagtctgaaagtgaactccagaaccacatccaaaccatccaccgagagctcgtgccagacagcaacagcacacagttgaaaacgccccaagtatcaccaatgcccagaatcagtccctcccagtcggatgagaagaagacctatcaatgcatcaagtgtcagatggttttctacaatgaatgggatattcaggttcatgttgcaaatcacatgattgatgaaggactgaaccatgaatgcaaactctgcagccagacctttgactctcctgccaaactccagtgccacctgatagagcacagcttcgaagggatgggaggcaccttcaagtgtccagtctgctttacagtatttgttcaagcaaacaagttgcagcagcatattttctctgcccatggacaagaagacaagatctatgactgtacacaatgtccacagaagtttttcttccaaacagagctgcagaatcatacaatgacccaacacagcagttagtgcaagtacagtctctcaaggagaattgattttgtggcacaaaaagggaacatgttttactctttgcacgaaactttcattgttaatgtatattattcagaaacattgtattgtaccataaaacttgtattatcaaactgttggatgttcatgtgtttgaacttttgcgcaccggatagaccccttgtatataaagtgttgcacatgtattatgtcgtctgatactaaaatggtcttataaagacaagtggacttgggccctattcaggcaagattaaaaaaaaaaaaagactatgaccaaaatggcttaagataaagtatttttaaggaagaaagattaaaaacaactgttatacatgagactatggttggacttccttttctttacacttaagcctagaatttctctttaggtatatcagcgcttaaatccaagactattttttattgctgaagattcttgcaaaccatgaagagatgttctcacagaacagaaccccacagctggataaggcccgtatatatatatttgtaagccttgcaatgtgacaggtagcatcactatatatgcaatagttgttatgtagactgtcaaagaatttttttttccctggatacatttgaagctttgagtgttcaaggttttccttaatgatttcacgcagccaaattcttgaatcagttgaactaacctgtatgttactgttattaatgtttactctgcagtctgaacctggagattactggaattgttttccaagaggaaataaattcagtttaccattaggaaaaaaaaaaaaaa

SEQ ID NO: 234 - DNA, 8126 bp, Homo sapiens
cggccgccgccggcacccacagcgccaagagcggcggctccgaggcggctctcaaggagggtggaagcgccgccgcgctgtcctcctcctcctcctcctccgcggcggcagcggcggcatcctcttcctcctcgtcgggcccgggctcggccatggagacggggctgctccccaaccacaaactgaaaaccgttggcgaagcccccgccgcgccgccccaccagcagcaccaccaccaccaccatgcccaccaccaccaccaccatgcccaccacctccaccaccaccacgcactacagcagcagctaaaccagttccagcagcagcagcagcagcagcaacagcagcagcagcagcagcagcaacagcaacatcccatttccaacaacaacagcttgggcggcgcgggcggcggcgcgcctcagcccggccccgacatggagcagccgcaacatggaggcgccaaggacagtgctgcgggcggccaggccgaccccccgggcccgccgctgctgagcaagccgggcgacgaggacgacgcgccgcccaagatgggggagccggcgggcggccgctacgagcacccgggcttgggcgccctgggcacgcagcagccgccggtcgccgtgcccgggggcggcggcggcccggcggccgtcccggagtttaataattactatggcagcgctgcccctgcgagcggcggccccggcggccgcgctgggccttgctttgatcaacatggcggacaacaaagccccgggatggggatgatgcactccgcctccgccgccgccgccggggcccccggcagcatggaccccctgcagaactcccacgaagggtaccccaacagccagtgcaaccattatccgggctacagccggcccggcgcgggcggcggcggcggcggcggcggcggaggaggaggaggcagcggaggaggaggaggaggaggaggagcaggagcaggaggagcaggagcgggagctgtggcggcggcggccgcggcggcggcggcagcagcaggaggcggcggcggcggcggctatgggggctcgtccgcggggtacggggtgctgagctccccccggcagcagggcggcggcatgatgatgggccccgggggcggcggggccgcgagcctcagcaaggcggccgccggctcggcggcggggggcttccagcgcttcgccggccagaaccagcacccgtcgggggccaccccgaccctcaatcagctgctcacctcgcccagccccatgatgcggagctacggcggcagctaccccgagtacagcagccccagcgcgccgccgccgccgccgtcgcagccccagtcccaggcggcggcggcgggggcggcggcgggcggccagcaggcggccgcgggcatgggcttgggcaaggacatgggcgcccagtacgccgctgccagcccggcctgggcggccgcgcaacaaaggagtcacccggcgatgagccccggcacccccggaccgaccatgggcagatcccagggcagcccaatggatccaatggtgatgaagagacctcagttgtatggcatgggcagtaaccctcattctcagcctcagcagagcagtccgtacccaggaggttcctatggccctccaggcccacagcggtatccaattggcatccagggtcggactcccggggccatggccggaatgcagtaccctcagcagcaggactctggagatgccacatggaaagaaacattctggttgatgccacctcagtatggacagcaaggtgtgagtggttactgccagcagggccaacagccatattacagccagcagccgcagcccccgcacctcccaccccaggcgcagtatctgccgtcccagtcccagcagaggtaccagccgcagcaggacatgtctcaggaaggctatggaactagatctcaacctcctctggcccccggaaaacctaaccatgaagacttgaacttaatacagcaagaaagaccatcaagtttaccagatctgtctggctccattgatgacctccccacgggaacggaagcaactttgagctcagcagtcagtgcatccgggtccacgagcagccaaggggatcagagcaacccggcgcagtcgcctttctccccacatgcgtcccctcatctctccagcatcccggggggcccatctccctctcctgttggctctcctgtaggaagcaaccagtctcgatctggcccaatctctcctgcaagtatcccaggtagtcagatgcctccgcagccacccgggagccagtcagaatccagttcccatcccgccttgagccagtcaccaatgccacaggaaagaggttttatggcaggcacacaaagaaaccctcagatggctcagtatggacctcaacagacaggaccatccatgtcgcctcatccttctcctgggggccagatgcatgctggaatcagtagctttcagcagagtaactcaagtgggacttacggtccacagatgagccagtatggaccacaaggtaactactccagacccccagcgtatagtggggtgcccagtgcaagctacagcggcccagggcccggtatgggtatcagtgccaacaaccagatgcatggacaagggccaagccagccatgtggtgctgtgcccctgggacgaatgccatcagctgggatgcagaacagaccatttcctggaaatatgagcagcatgacccccagttctcctggcatgtctcagcagggagggccaggaatggggccgccaatgccaactgtgaaccgtaaggcacaggaggcagccgcagcagtgatgcaggctgctgcgaactcagcacaaagcaggcaaggcagtttccccggcatgaaccagagtggacttatggcttccagctctccctacagccagcccatgaacaacagctctagcctgatgaacacgcaggcgccgccctacagcatggcgcccgccatggtgaacagctcggcagcatctgtgggtcttgcagatatgatgtctcctggtgaatccaaactgcccctgcctctcaaagcagacggcaaagaagaaggcactccacagcccgagagcaagtcaaagaagtccagctcctccaccactactggggagaagatcacgaaggtgtacgagctggggaatgagccagagagaaagctctgggtcgaccgatacctcaccttcatggaagagagaggctctcctgtctcaagtctgcctgccgtgggcaagaagcccctggacctgttccgactctacgtctgcgtcaaagagatcgggggtttggcccaggttaataaaaacaagaagtggcgtgagctggcaaccaacctaaacgttggcacctcaagcagtgcagcgagctccctgaaaaagcagtatattcagtacctgtttgcctttgagtgcaagatcgaacgtggggaggagcccccgccggaagtcttcagcaccggggacaccaaaaagcagcccaagctccagccgccatctcctgctaactcgggatccttgcaaggcccacagaccccccagtcaactggcagcaattccatggcagaggttccaggtgacctgaagccacctaccccagcctccacccctcacggccagatgactccaatgcaaggtggaagaagcagtacaatcagtgtgcacgacccattctcagatgtgagtgattcatccttcccgaaacggaactccatgactccaaacgccccctaccagcagggcatgagcatgcccgatgtgatgggcaggatgccctatgagcccaacaaggacccctttgggggaatgagaaaagtgcctggaagcagcgagccctttatgacgcaaggacagatgcccaacagcagcatgcaggacatgtacaaccaaagtccctccggagcaatgtctaacctgggcatggggcagcgccagcagtttccctatggagccagttacgaccgaaggcatgaaccttatgggcagcagtatccaggccaaggccctccctcgggacagccgccgtatggagggcaccagcccggcctgtacccacagcagccgaattacaaacgccatatggacggcatgtacgggcccccagccaagcgccacgagggcgacatgtacaacatgcagtacagcagccagcagcaggagatgtacaaccagtatggaggctcctactcgggcccggaccgcaggcccatccagggccagtacccgtatccctacagcagggagaggatgcagggcccggggcagatccagacacacggaatcccgcctcagatgatgggcggcccgctgcagtcgtcctccagtgaggggcctcagcagaatatgtgggcagcacgcaatgatatgccttatccctaccagaacaggcagggccctggcggccctacacaggcgcccccttacccaggcatgaaccgcacagacgatatgatggtacccgatcagaggataaatcatgagagccagtggccttctcacgtcagccagcgtcagccttatatgtcgtcctcagcctccatgcagcccatcacacgcccaccacagccgtcctaccagacgccaccgtcactgccaaatcacatctccagggcgcccagcccagcgtccttccagcgctccctggagaaccgcatgtctccaagcaagtctccttttctgccgtctatgaagatgcagaaggtcatgcccacggtccccacatcccaggtcaccgggccaccaccccaaccacccccaatcagaagggagatcacctttcctcctggctcagtagaagcatcacaaccagtcttgaaacaaaggcgaaagattacctccaaagatatcgttactcctgaggcgtggcgtgtgatgatgtcccttaaatcaggtcttttggctgagagtacgtgggctttggacactattaatattcttctgtatgatgacagcactgttgctactttcaatctctcccagttgtctggatttctcgaacttttagtcgagtactttagaaaatgcctgattgacatttttggaattcttatggaatatgaagtgggagaccccagccaaaaagcacttgatcacaacgcagcaaggaaggatgacagccagtccttggcagacgattctgggaaagaggaggaagatgctgaatgtattgatgacgacgaggaagacgaggaggatgaggaggaagacagcgagaagacagaaagcgatgaaaagagcagcatcgctctgactgccccggacgccgctgcagacccaaaggagaagcccaagcaagccagtaagttcgacaagctgccaataaagatagtcaaaaagaacaacctgtttgttgttgaccgatctgacaagttggggcgtgtgcaggagttcaatagtggccttctgcactggcagctcggcgggggtgacaccaccgagcacattcagactcactttgagagcaagatggaaattcctcctcgcaggcgcccacctccccccttaagctccgcaggtagaaagaaagagcaagaaggcaaaggcgactctgaagagcagcaagagaaaagcatcatagcaaccatcgatgacgtcctctctgctcggccaggggcattgcctgaagacgcaaaccctgggccccagaccgaaagcagtaagtttccctttggtatccagcaagccaaaagtcaccggaacatcaagctgctggaggacgagcccaggagccgagacgagactcctctgtgtaccatcgcgcactggcaggactcgctggctaagcgatgcatctgtgtgtccaatattgtccgtagcttgtcattcgtgcctggcaatgatgccgaaatgtccaaacatccaggcctggtgctgatcctggggaagctgattcttcttcaccacgagcatccagagagaaagcgagcaccgcagacctatgagaaagaggaggatgaggacaagggggtggcctgcagcaaagatgagtggtggtgggactgcctcgaggtcttgagggataacacgttggtcacgttggccaacatttccgggcagctagacttgtctgcttacacggaaagcatctgcttgccaattttggatggcttgctgcactggatggtgtgcccgtctgcagaggcacaagatccctttccaactgtgggacccaactcggtcctgtcgcctcagagacttgtgctggagaccctctgtaaactcagtatccaggacaataatgtggacctgatcttggccactcctccatttagtcgtcaggagaaattctatgctacattagttaggtacgttggggatcgcaaaaacccagtctgtcgagaaatgtccatggcgcttttatcgaaccttgcccaaggggacgcactagcagcaagggccatagctgtgcagaaaggaagcattggaaacttgataagcttcctagaggatggggtcacgatggcccagtaccagcagagccagcacaacctcatgcacatgcagcccccgcccctggaaccacctagcgtagacatgatgtgcagggcggccaaggctttgctagccatggccagagtggacgaaaaccgctcggaattccttttgcacgagggccggttgctggatatctcgatatcagctgtcctgaactctctggttgcatctgtcatctgtgatgtactgtttcagattgggcagttatgacataagtgagaaggcaagcatgtgtgagtgaagattagagggtcacatataactggctgttttctgttcttgtttatccagcgtaggaagaaggaaaagaaaatctttgctcctctgccccattcactatttaccaattgggaattaaagaaataattaatttgaacagttatgaaattaatatttgctgtctgtgtgtataagtacatcctttggggttttttttttctcttttttttaaccaaagttgctgtctagtgcattcaaaggtcactttttgttcttcacagatctttttaatgttctttcccatgttgtattgcatttttgggggaagcaaattgactttaaagaaaaaagttgtggcaaaagatgctaagatgcgaaaatttcaccacactgagtcaaaaaggtgaaaaattatccatttcctatgcgttttactcctcagagaatgaaaaaaactgcatcccatcacccaaagttctgtgcaatagaaatttctacagatacaggtataggggctcaaggaggtatgtcggtcagtagtcaaaactatgaaatgatactggtttctccacaggaatatggttccattaggctgggagcaaaaacaatgttttttaagattgagaatacatacctgacaacgatccggaaactgctcctcaccactcccgtcatgcctgctgtcggcgtttgaccttccacgtgacagttcttcacaattcctttcatcattttttaaatattttttttactgcctatgggctgtgatgtatatagaagttgtacattaaacataccctcatttttttcttttcttttttttttttttttttagtacaaagttttagtttctttttcatgatgtggtaactacgaagtgatggtagatttaaataattttttatttttattttatatattttttcattagggccatatctccaaaaaaagaaagaaaaaatacaaaaaacaaaaacaaaaaaaaaagagggtaatgtacaagtttctgtatgtataaagtcatgctcgatttcaggagagcagctgatcacaatttgcttcatgaatcaaggtgtggaaatggttatatatggattgatttagaaaatggttaccagtacagtcaaaaaagagaaaatgaaaaaaatacaactaaaaggaagaaacacaacttcaaagatttttcagtgatgagaatccacatttgtatttcaagataatgtagtttaaaaaaaaaaaaaagaaaaaaacttgatgtaaattcctccttttcctctggcttaatgaatatcatttattcagtataaaatctttatatgttccacatgttaagaataaatgtacattaaatcttgttaagcactgtgaaaaaaaaaaaaaaaaaaaaaa

SEQ ID NO: 235 - DNA, 3564 bp, Homo sapiens
tctacaggagccattttaacagctaaaacttgtcggattgctttttattttcaagctcaaaagacgatagagaaagaatacttgaaggccaagaagcttgagagaagaaaaatttcagaaaaattgtctcaatttgactagaatatcaatgaaccaggaaaactgaagcaccttccctaaagaaaacttgggtatacaattactccacagacagagctgagggttttttacccaaatcagtcactggattttgctgcctgatacgtgaatcttcttggaatttttctcatgtggatctaaggggaatgctttattatggctgctgttgtccaacagaacgacctagtatttgaatttgctagtaacgtcatggaggatgaacgacagcttggtgatccagctatttttcctgccgtaattgtggaacatgttcctggtgctgatattctcaatagttatgccggtctagcctgtgtggaagagcccaatgacatgattactgagagttcactggatgttgctgaagaagaaatcatagacgatgatgatgatgacatcacccttacagttgaagcttcttgtcatgacggggatgaaacaattgaaactattgaggctgctgaggcactcctcaatatggattcccctggccctatgctggatgaaaaacgaataaataataatatatttagttcacctgaagatgacatggttgttgccccagtcacccatgtgtccgtcacattagatgggattcctgaagtgatggaaacacagcaggtgcaagaaaaatatgcagactcaccgggagcctcatcaccagaacagcctaagaggaaaaaaggaagaaaaactaaaccaccacgaccagattccccagccactacgccaaatatatctgtgaagaagaaaaacaaagatggaaagggaaacacaatttatctttgggagtttttactggcactgctccaggacaaggctacttgtcctaaatacatcaagtggacccagcgagagaaaggcatttttaaattggtggattctaaagcagtgtccaggttgtgggggaagcacaaaaacaaacctgatatgaattatgagaccatgggaagagcactcaggtactattaccaaaggggtattctggcaaaagtggaaggtcagcgcttggtgtatcagtttaaagaaatgccaaaagatcttatatatataaatgatgaggatccaagttccagcatagagtcttcagatccatcactatcttcatcagccacttcaaataggaatcaaaccagccggtcgagagtatcttcaagtccaggggtaaaaggaggagccactacagttctaaaaccagggaattctaaagctgcaaaacccaaagatcctgtggaagttgcacaaccatcagaagttttgaggacagtgcagcccacgcagtctccatatcctacccagctcttccggactgttcatgtagtacagccagtacaggctgtcccagagggagaagcagctagaaccagtaccatgcaggatgaaacattaaattcttccgttcagagtattaggactatacaggctccaacccaagttccagtggttgtgtctcctaggaatcagcagttgcatacagtaacactccaaacagtgccactcacaacagttatagccagcacagatccatcagcaggtactggatctcagaagtttattttacaagccattccatcatcacagcccatgacagtactgaaagaaaatgtcatgctgcagtcacaaaaggcgggctctcctccttcaattgtcttgggccctgcccaggttcagcaggtccttactagcaatgttcagaccatttgcaatggaaccgtcagtgtggcttcctctccatccttcagtgctactgcacctgtggtgaccttttctcctcgcagttcacagctggttgctcacccacctggcactgtaatcacttcagttatcaaaactcaagaaacaaaaactcttacacaggaagtagagaaaaaggaatctgaagatcatttgaaagagaacactgagaaaacggagcagcagccacagccttatgtgatggtagtgtccagttccaatggatttacttctcaggtagctatgaaacaaaacgaactgctggaacccaactctttttagttaatataccaaagcttatgaataattgtttgttaattgaacattttcaattatatgcagactgactgattctaagataaattctaaggaggtttctaatttgtaattgttaaaaatagagttaattttgactttgttagatgagggaggaaaactcaactgtttctctttgttatctaaatgtttcagaattcaatcgtgaaggaacaggcattttacactatgaagacattcttttgagatttttatttcagttgctatatcataagcatttttaaagtttcttttctaattttacattgtattagattttctgattcttttgtaaatacagaacttaaatagaaggcaacaggaaatttatataggaactattttcattccacttgtgtaagttaagtcttgactctttcaaatgcaaaaaacctattttatgctttgttaaaattatggtgtcacttagattgactttagttgactgcactatataatatagaactatgaatatgtagaataacatgaaaaattggaggtgctggtggtatggctgaccctgtttcagaagcaggatagtataaaagcatcagcctaagaatggcactcccactaactagctatgtaatcttgacctctttgggctttagttcctctcataaaaggaagagatgtattggattagactagatgatcaccactttctcttctagttctaatttttttaattctaatacctatattttcaagttatgtcaattaaatcattatcaggttatttcctaatgtaagatagctaaaatgttgcagagaaataagtgacccaacaaaatttattcatctgttatgggtcaagatctgccataaattcttcctaaataatttgtttactaactctttaggccactgtgctttgcggtccattagtaaacttgtgttgctaagtgctaaacagaatactgctattttgagagagtcaagactctttcttaagggccaagaaagcaacttgagccttgggctaatctggctgagtagtcagttataaaagcataattgctttatattttggatcattttttactgggggcggacttgggggggttgcatatcaaagataacatatatatccaactttctgaaatgaaatgtttttagattacttttcaactgtaaataatgtacatttaatgtcacaagaaaaaaatgtcttctgcaaattttctagtataacagaaatttttgtagatgaaaaaaatcattatgtttagaggtctaatgctatgttttcatattacagagtgaatttgtatttaaacaaaaatttaaattttggaatcctctaaacatttttgtatctttaattggtttattattaaataaatcatataaaaa

SEQ ID NO: 236 - DNA, 3171 bp, Homo sapiens
gttgccagctgcggcggccgccacagccacagccgccgccgccgccgccgccgcccctgcccctgccgcccctgcccctgccgttaggtggtggggtttctcagcccggcggcgggaggcgggccggcctcggcttcctgtcggaggacgcgcaaggatccgggcgtcggagtgtgtgcgagtgcgtgagtgtgtgtcggtcgcacggcgtgtgtctccggccgcgggttccgcctcctcccctgccgccgctgctcacggtgtaagtcaatgtgaagcagcagctccagccccgggataaacatggcgacgtctctgcatgagggacccacgaaccagctggatctgctcatccgggccgtggaagcatcagttcacagcagtaatgcacactgtacagataagacaattgaagctgctgaagccctgcttcatatggaatctcctacctgcttgagggattcaagaagtcctgtggaagtgtttgttcctccttgtgtatcaactccagaattcatccatgctgctatgaggccagatgtcattacagaaactgtagtggaggtgtcaactgaagagtctgaacccatggatacctctcctattccaacatcaccagatagccatgaaccaatgaaaaagaaaaaagttggccgtaaaccaaagacccagcaatcaccaatttccaatgggtctcctgagttaggtataaagaagaaaccaagagaaggaaaaggaaacacaacctatttgtgggagtttcttttagatctacttcaagataaaaatacttgtcccaggtatattaaatggactcagagagaaaaaggcatattcaagctggtggattcaaaggctgtctctaagctttggggaaagcataagaacaaaccagacatgaactatgaaaccatgggacgagctttgagatactactaccaaaggggaattcttgcaaaggttgaaggacagaggcttgtatatcagttcaaggatatgccgaaaaacatagtggtcatagatgatgacaaaagtgaaacctgtaatgaagatttagcaggaactactgatgaaaaatcattagaacgagtgtcactgtctgcagaaagtctcctgaaagcagcatcctctgttcgcagtggaaaaaattcatcccctataaactgctccagagcagagaagggtgtagctagagttgtgaatatcacttcccctgggcacgatgcttcatccaggtctcctactaccactgcatctgtgtcagcaacagcagctccaaggacagttcgtgtggcaatgcaggtacctgttgtaatgacatcattgggtcagaaaatttcaactgtggcagttcagtcagttaatgcaggtgcaccattaataaccagcactagtccaacaacagcgacctctccaaaggtagtcattcagacaatccctactgtgatgccagcttctactgaaaatggagacaaaatcaccatgcagcctgccaaaattattaccatcccagctacacagcttgcacagtgtcaactgcagacaaagtcaaatctgactggatcaggaagcattaacattgttggaaccccattggctgtgagagcacttacccctgtttcaatagcccatggtacacctgtaatgagactatcaatgcctactcagcaggcatctggccagactcctcctcgagttatcagtgcagtcataaaggggccagaggttaaatcggaagcagtggcaaaaaagcaagaacatgatgtgaaaactttgcagctagtagaagaaaaaccagcagatggaaataagacagtgacccacgtagtggttgtcagtgcgccttcagctattgcccttcctgtaactatgaaaacagaaggactagtgacatgtgagaaataaaatagcagctccaccatggacttcaggctgttagtggcagtactgacataaacatttgcaagggaagtcatcaagaaaagtcaaagaagactttaaaacatttttaatgcatatacaaaaacaatcagacttactggaaataaattacctatcccatgtttcagtgggaaatgaactacatattgagatgctgacagaaaactgcctcttacagtaggaaacaactgaacccatcaataagaaaaaggatcgaaagggaccaagcagctcactacgatatcaagttacactaagacttggaacactaacattctgtaagaggttatatagttttcagtgggaggggttgggatgggtaatctcattgttacatatagcaatttttgatgcattttatatgcataccagcaattattactgtgttcgcacagttctcacttaactggtgctatgtgaagactctgctaatataggtattttagaatgtgaattgaagaatggatcccaaaaacttcagaaagaggatagcaaaaaaagatctagtgcgattttatatatatatatatatatatatacatacatatatatatatcatatagcttaagctgatttaaaacaaaggccttagactaattttcgattttctttcttgaaataagctaatggcttgtttgtgtaaagcttttttattaaaagaaaaattttaaaaatcttgtacctagcacagtattgttatagaatatacatgtaacattttatatggtagtttaagtctgtcagtttcttaattgtggacaaattaacagttggctctggccttttgctgtaacatgcctgtgtcactcacttagccttggcatttgtgcagacataccattttcagttctgctgtcacttggaagttcaggctcagcatgaatttttggcaggtagctctaatacctggagttttctttgtttttttttcttttttttagttgaagtttatgagggaaataccagtgttcagttttgaactataatagtttgtatattcaacatttgaagtatattctattttgttgtactcttgtttcaaagtgtattcaagtaggttttctgaaatatagaaatgaaatttatcttctgttttggtctctggtgatattttaaacaatatttaaaagtcagtatagaagtgttttagttaggaagtgataaaacatctctcttctccttcccaactactgcatgaagaaattctacttccattatattaatatttgg

SEQ ID NO: 237 - DNA, 3149 bp, Homo sapiens
ctgagctcagggaggagctccctccaggctctatttagagccgggtaggggagcgcagcggccagatacctcagcgctacctggcggaactggatttctctcccgcctgccggcctgcctgccacagccggactccgccactccggtagcctcatggctgcaacctgtgagattagcaacatttttagcaactacttcagtgcgatgtacagctcggaggactccaccctggcctctgttccccctgctgccacctttggggccgatgacttggtactgaccctgagcaacccccagatgtcattggagggtacagagaaggccagctggttgggggaacagccccagttctggtcgaagacgcaggttctggactggatcagctaccaagtggagaagaacaagtacgacgcaagcgccattgacttctcacgatgtgacatggatggcgccaccctctgcaattgtgcccttgaggagctgcgtctggtctttgggcctctgggggaccaactccatgcccagctgcgagacctcacttccagctcttctgatgagctcagttggatcattgagctgctggagaaggatggcatggccttccaggaggccctagacccagggccctttgaccagggcagcccctttgcccaggagctgctggacgacggtcagcaagccagcccctaccaccccggcagctgtggcgcaggagccccctcccctggcagctctgacgtctccaccgcagggactggtgcttctcggagctcccactcctcagactccggtggaagtgacgtggacctggatcccactgatggcaagctcttccccagcgatggttttcgtgactgcaagaagggggatcccaagcacgggaagcggaaacgaggccggccccgaaagctgagcaaagagtactgggactgtctcgagggcaagaagagcaagcacgcgcccagaggcacccacctgtgggagttcatccgggacatcctcatccacccggagctcaacgagggcctcatgaagtgggagaatcggcatgaaggcgtcttcaagttcctgcgctccgaggctgtggcccaactatggggccaaaagaaaaagaacagcaacatgacctacgagaagctgagccgggccatgaggtactactacaaacgggagatcctggaacgggtggatggccggcgactcgtctacaagtttggcaaaaactcaagcggctggaaggaggaagaggttctccagagtcggaactgagggttggaactatacccgggaccaaactcacggaccactcgaggcctgcaaaccttcctgggaggacaggcaggccagatggcccctccactggggaatgctcccagctgtgctgtggagagaagctgatgttttggtgtattgtcagccatcgtcctgggactcggagactatggcctcgcctccccaccctcctcttggaattacaagccctggggtttgaagctgactttatagctgcaagtgtatctccttttatctggtgcctcctcaaacccagtctcagacactaaatgcagacaacaccttcctcctgcagacacctggactgagccaaggaggcctggggaggccctaggggagcaccgtgatggagaggacagagcaggggctccagcaccttctttctggactggcgttcacctccctgctcagtgcttgggctccacgggcaggggtcagagcactccctaatttatgtgctatataaatatgtcagatgtacatagagatctattttttctaaaacattcccctccccactcctctcccacagagtgctggactgttccaggccctccagtgggctgatgctgggacccttaggatggggctcccagctcctttctcctgtgaatggaggcagagacctccaataaagtgccttctgggctttttctaacctttgtcttagctacctgtgtactgaaatttgggcctttggatcgaatatggtcaagaggttggaggggaggaaaatgaaggtctaccaggctgagggtgagggcaaaggctgacgaagaggggagttacagatttcctgtagcaggtgtgggcttacagacacatggactgggctgggaggcgagcaaaggaagcagctgagactgttggagaacgcttacaagacttcatgcaagcaaggacatgaactcagaacactgaggtcagaagcatcctgctgtcatgacaccgctcgagtgaccttgaccttgaccaagtctgtcctgtttaggactgatttttcctattaggctagggtttggacctgatgttctcaagatgtctagaattgcatggctggccttgtggaatagatggttttgcattccagccaagtgtgctgtaaactgtatatctgtaatatgaatcccagcttttgagtctgacaaaatcagagttaggatcttgtaaaggaaaaaaaaaaaaaaacaaaacaaaatggagatgagtacttgctgagaaagaatgagggaaggagttggcatttgttgaaagtgtagtctttttctcttttttttttaattgcaacttttactttagatttaggaggtcgtgcgcaggtttgttacatgggtatattgtgtgatgctgagcttgggatgcgaatgatcctgtcacccaggtagtgagtatagcacccagtgaaactgtagtctcatgccaggcactgtgctagcccactctggctcatttaatcctctcctaagaagagaggagacacagcgtccccatttgacagatgcagaaagaggttccacaggtgtgccttgattctgtcctaaaaccgtttcccggaagcttttcctggtgtgggcgcttctaacctaatcctcaatcgattccagaactattactctgtttccacagtgatactgtgtctaggttttagggaggacagttcattgatgttacttaagaatgctttccaggtggaaagttccttaagtttgaggcttcaaattccatacagcacattaaaatcccattcatgagtttgaaatactgctctgttgtcttggaaataccaatcagattgttggctgaagtgatgtggataaagaagggatcttagaaaaactaaaaaaaaaaaaaaaaaa

SEQ ID NO: 238 - DNA, 4195 bp, Homo sapiens
tccacttctcctttcgccggcgccgagttcctggcgccgctcgcccggcccggcttccgaggggagaggacgggctggcggggctggggacccgcgtctcggcccccggagcggggaccacggagacagaccccggcccggcgaccgagctgggcccgtgagccactcggcctcaggtcgctcctgtggttggtccagcccagaatgcagccttgagcctggcttaggccaccacctactccagctctctccaccccctattttactgcagctcagggggtaggctctaggctccaaagtacctgggtattgtcccttcatcaagaaagccccacagctctggagggctctgataatcccgttgtcagctctctgaaaagacagcatggctattaccctacagcccagtgacctgatctttgagttcgcaagcaacgggatggatgatgatatccaccagctggaagacccctctgtgttcccagctgtgatcgtggagcaggtaccctaccctgatttactgcatctgtactcgggactggagttggacgacgttcacaatggcatcataacagacgggaccttgtgcatgacgcaggatcagatcctggaaggcagttttttgctgacagatgacaatgaggccacctcgcacaccatgtcaaccgcggaagtcttactcaatatggagtctcccagcgatatcctggatgagaagcagatcttcagtacctccgaaatgcttccagactcggaccctgcaccagctgtcactctgcccaactacctgtttcctgcctctgagcccgatgccctgaacagggcgggtgacactagtgaccaggaggggcattctctggaggagaaggcctccagagaggaaagtgccaagaagactgggaaatcaaagaagagaatccggaagaccaagggcaaccgaagtacctcacctgtcactgaccccagcatccccattaggaagaaatcaaaggatggcaaaggcagcaccatctatctgtgggagttcctcctggctcttctgcaagacagaaacacctgtcccaagtacatcaagtggacccagcgagagaaaggcatcttcaaactggtggactccaaagctgtgtccaagctgtgggggaagcagaaaaacaagcctgacatgaactatgagacaatggggcgggcactaagatactactaccaaagaggcatactggccaaagtggaagggcagaggctggtgtaccagtttaaggagatgcccaaggacctggtggtcattgaagatgaggatgagagcagcgaagccacagcagccccacctcaggcctccacggcctctgtggcctctgccagtaccacccggcgaaccagctccagggtctcatccagatctgccccccagggcaagggcagctcttcttgggagaagccaaaaattcagcatgtcggtctccagccatctgcgagtctggaattgggaccgtcgctagacgaggagatccccactacctccaccatgctcgtctctccagcagagggccaggtcaagctcaccaaagctgtgagtgcatcttcagtgcccagcaacatccacctaggagtggcccccgtggggtcgggctcggccctgaccctgcagacgatcccactgaccacggtgctgaccaatgggcctcctgccagtactactgctcccactcagctcgttctccagagtgttccagcggcctctactttcaaggacaccttcactttgcaggcctctttccccctgaacgccagtttccaagacagccaggtggcagccccaggggctccactgattctcagtggcctcccccaacttctggctggggccaaccgtccgaccaacccggcgccacccacggtcacaggggctggaccagcagggcccagctctcagccccctgggactgtcattgctgccttcatcaggacttctggcactacagcagcccctagggtcaaggaggggccactgaggtcctcctcctatgttcagggtatggtgacgggggcccccatggaggggctgctggttcctgaagagaccctgagggagctcctgagagatcaggctcatcttcagccacttccaacccaggtggtttccaggggttcccacaatccgagccttctgggcaaccagactttgtctcctcccagccgccccactgttgggctgaccccagtggctgaacttgagctctcctcaggctcagggtccctgctgatggctgagcctagtgtgaccacatctgggagccttctgacaagatcccccaccccagcccctttctccccattcaaccctacttccctcattaagatggagccccatgacatataagcaaaggggtcagggcaagtgtgacccaccaggcaaaattgagcagcattttcatagggaccgacttcagtagcacacctgcccctgcatttcagtgggatgtcaatacacttgaccccaagtcccccggccctgcctggtgtcactgtggccaaacagtgcccagcttaagcatccctggcatcagactatggccttcaagagcactagggcatatgcttttggcagcataacgggctgacttggtgatggagggaaaaagccttgagccaggcagaagtttgtggccagggtttgtgcagcagctttgtgagaagagcccttctacctggctctatctcactggctgcattccctacacagggaatttactaccctatatgtgaatatccctgtatgtacttgtgtgtacttgttggtctgtatcttagtttctttggggaggacagggctgtagctgtgaggtcttgtctccaagggtgtgtgtatgtctccgtggatcagccacagggatagggattttgtttttaagggaaagcattctctaattccctttgttcatgccgagattcagttgctctgagactatggggtacaagtttgatcctccgaatctggagatgttgtagagctggaacgagtgcagagtaggaacgctttgatgcgcatgcacattggggaagatgcgctcctcagggacacaaaggccgagtggggtaaaaccacgaagggagggaagggaagtcagctctgggagcagccctcactggctggaccaaggtactcttcctggagtttgccgtgttagcaaccacagtcaccttgcagtcaggctggaatcttgggccaccccaaagtgctttgctgaaggatttagacggggatgaagtgccctccagcctcagagctagccacaaagcccccagagctgaattcattgagtatttgtgcctagggcttgggctgtttgtgtgataccggccccccgccagacaatagcctttgctgacaccccagcctacttccccgatcctgggctccctcttgattactttttgacattttccagctgtcaggcatcactgcggctagtccggcagcgacctagatggggtccacccccattcctgctcaagcatgggcacctaccacatggtttctgctgctcagcctgcctgcaactcacctcgaaggcggaccagcctgcctctgtgatgactgcagcagacctccttgggtgtaccaatgcccctcatctcccactttcacacctaaccctgactccttcaccaagaagacgggagtcggcagccaggagttcccgtggcacctctctctcttcgtggctccctgcttcccccttccctctttccgaggaagggtcaacctattctctctcaaagccaacccctaggccaattgcctggatctcctcccctctcccttctttaaacgagcttgcctccctcctgccaagtttgagggcaaggctaagaaatgtcagccacggaaacaactctattatctggtgactttgggtaatgtgaatcagtgcctgaggacctttgctgtgtccttggtacagaaccatccacttgacctaactacctcccctggccgcgctctcgctcttctcttctttgttaagccaacaactatcaccctctcctactcttcttctccctgccccctggagggcactgtgtttggttgtgcaaatgtatttactatgcgtgtttccagcagttggcattaaagtgcctttttctaataaaatcagtttattatgacagtttcctgaaaaaaaaaaaaaaaaaa

SEQ ID NO: 239 - DNA, 2317 bp, Homo sapiens
cacaaggctacaggtgtctttatttccactgcacgctggtgctgggagcgcctgccttctcttgccttgaaagcctcctctttggacctagccaccgctgccctcacggtaatgttggactcggtgacacacagcaccttcctgcctaatgcatccttctgcgatcccctgatgtcgtggactgatctgttcagcaatgaagagtactaccctgcctttgagcatcagacagcctgtgactcatactggacatcagtccaccctgaatactggactaagcgccatgtgtgggagtggctccagttctgctgcgaccagtacaagttggacaccaattgcatctccttctgcaacttcaacatcagtggcctgcagctgtgcagcatgacacaggaggagttcgtcgaggcagctggcctctgcggcgagtacctgtacttcatcctccagaacatccgcacacaaggttactccttttttaatgacgctgaagaaagcaaggccaccatcaaagactatgctgattccaactgcttgaaaacaagtggcatcaaaagtcaagactgtcacagtcatagtagaacaagcctccaaagttctcatctatgggaatttgtacgagacctgcttctatctcctgaagaaaactgtggcattctggaatgggaagatagggaacaaggaatttttcgggtggttaaatcggaagccctggcaaagatgtggggacaaaggaagaaaaatgacagaatgacatatgaaaagttgagcagagccctgagatactactataaaacaggaattttggagcgggttgaccgaaggttagtgtacaaatttggaaaaaatgcacacgggtggcaggaagacaagctatgatctgctccaggcatcaagctcattttatggatttctgtcttttaaaacaatcagattgcaatagacattcgaaaggcttcattttcttctctttttttttaacctgcaaacatgctgataaaatttctccacatctcagcttacatttggattcagagttgttgtctacggagggtgagagcagaaactcttaagaaatcctttcttctccctaaggggatgaggggatgatcttttgtggtgtcttgatcaaactttattttcctagagttgtggaatgacaacagcccatgccattgatgctgatcagagaaaaactattcaattctgccattagagacacatccaatgctcccatcccaaaggttcaaaagttttcaaataactgtggcagctcaccaaaggtgggggaaagcatgattagtttgcaggttatggtaggagagggtgagatataagacatacatactttagattttaaattattaaagtcaaaaatccatagaaaagtatccctttttttttttttgagacgggttctcactatgttgcccagggctggtcttgaactcctatgctcaagtgatcctcccacctcggcctcccaaagtactgtgattacaagcgtgagccacggcacctgggcagaaaagtatcttaattaatgaaagagctaagccatcaagctgggacttaattggatttaacataggttcacagaaagtttcctaaccagagcatctttttgaccactcagcaaaacttccacagacatccttctggacttaaacacttaacattaaccacattattaattgttgctgagtttattcccccttctaactgatggctggcatctgatatgcagagttagtcaacagacactggcatcaattacaaaatcactgctgtttctgtgattcaagctgtcaacacaataaaatcgaaattcattgattccatctctggtccagatgttaaacgtttataaaaccggaaatgtcctaacaactctgtaatggcaaattaaattgtgtgtcttttttgttttgtctttctacctgatgtgtattcaagcgctataacacgtatttccttgacaaaaatagtgacagtgaattcacactaataaatgttcataggttaaagtctgcactgacattttctcatcaatcactggtatgtaagttatcagtgactgacagctaggtggactgcccctaggacttctgtttcaccagagcaggaatcaagtggtgaggcactgaatcgctgtacaggctgaagacctccttattagagttgaacttcaaagtaacttgttttaaaaaatgtgaattactgtaaaataatctattttggattcatgtgttttccaggtggatatagtttgtaaacaatgtgaataaagtatttaacatgtaaaaaaaaaaaaaaa

SEQ ID NO: 240 - DNA, 2833 bp, Homo sapiens
ctcgggcccacgtgagctgtagggaaacgcaggggcggcttctaggtgctgccgccgccaccgccaccaccacctccaccgccgcctcggaacccaggcctggggggcggtggggccgcgtatggagcccccgccccccggagctgccaacattgccaacgccaccgccacgctacacacaggtacccctgggatggcgtgagcactcccccagcgatggacccatctgtgacgctgtggcagtttctgctgcagctgctgagagagcaaggcaatggccacatcatctcctggacttcacgggatggtggtgaattcaagctggtggatgcagaggaggtggcccggctgtgggggctacgcaagaacaagaccaacatgaattacgacaagctcagccgggccttgcggtactactatgacaagaacatcatccgcaaggtgagcggccagaagttcgtctacaagtttgtgtcctaccctgaggtcgcagggtgctccactgaggactgcccgccccagccagaggtgtctgttacctccaccatgccaaatgtggcccctgctgctatacatgccgccccaggggacactgtctctggaaagccaggcacacccaagggtgcaggaatggcaggcccaggcggtttggcacgcagcagccggaacgagtacatgcgctcgggcctctattccaccttcaccatccagtctctgcagccgcagccaccccctcatcctcggcctgctgtggtgctccccagtgcagctcctgcaggggcagcagcgcccccctcggggagcaggagcaccagtccaagccccttggaggcctgtctggaggctgaagaggccggcttgcctctgcaggtcatcctgaccccgcccgaggccccaaacctgaaatcggaagagcttaatgtggagccgggtttgggccgggctttgcccccagaagtgaaagtagaagggcccaaggaagagttggaagttgcgggggagagagggtttgtgccagaaaccaccaaggccgagccagaagtccctccacaggagggcgtgccagcccggctgcccgcggttgttatggacaccgcagggcaggcgggcggccatgcggcttccagccctgagatctcccagccgcagaagggccggaagccccgggacctagagcttccactcagcccgagcctgctaggtgggccgggacccgaacggaccccaggatcgggaagtggctccggcctccaggctccggggccggcgctgaccccatccctgcttcctacgcatacattgaccccggtgctgctgacacccagctcgctgcctcctagcattcacttctggagcaccctgagtcccattgcgccccgtagcccggccaagctctccttccagtttccatccagtggcagcgcccaggtgcacatcccttctatcagcgtggatggcctctcgacccccgtggtgctctccccagggccccagaagccatgactactaccaccaccaccaccaccccttctggggtcactccatccatgctctctccagccagccatctcaaggagaaacatagttcaactgaaagactcatgctctgattgtggtggggtggggatccttgggaagaattactcccaagagtaactctcattatctcctccacagaaaacacacagcttccacaacttctctgttttctgtcagtcccccagtggccgcccttacacgtctcctacttcaatggtaggggcggtttatttatttattttttgaaggccactgggaggagcctgacctaaccttttagggtggttaggacatctcccccacctccccacttttttccccaagacaagacaatcgaggtctggcttgagaacgacctttctttctttatttctcagcctgcccttggggagatgagggagccctgtctgcgtttttggatgtgagtagaagagttagtttgttttgttttattattcctggccatactcaggggtccaggaagaatttgtaccatttaatgggttgggagtcttggccaaggaagaatcacacccttggaatagaaatttccacctccccaacctttctctcagacagcttatccttttcaaccaactttttggccagggaggaatgtcccttttgttcttccccctgagaagccattcctttgtctgccaacctccctggggtcctgcctgtttcctcccaatggagggtttttttggggggtggtccccgtctggggggcccctccagccagtactccaggtctccctgtctctcccccgctgccattttgatagtataatctatttttaaatggggcttttcaataggggagagggagtcatctcttcctatatttggtggggtgggtgggaaggaagggatttgggggggaatcttcctgccgcctcccccactccaagtgtttatttttgataccaaacatgaattttcagttccctccctcccagccccccaatttcctgcgggcgggtacaaaggaccctttcaatgtccctggagttgggagggaggaatgggggacataaagcctgtcctgtctctattctaggcaagagagagtgggttcaaaagactcctgggctcacctgttagcgctggcccagcccaggccttgggacctgggggttggtgatttgggggacagtgctacactcgtctccactgtttgttttacttccccaaaatggaccttttttttttctaaagagtcccagagaatggggaattgttcctgtaaatatatatttttcaaagtgaaaaaaaaaaaaaaaaaaaaaaa

SEQ ID NO: 241 - DNA, 2180 bp, Homo sapiens
gggcggaaaagcctgtttacacagactgcacaccgcctggggaataatgcagtaaaggaagtgagccggctcggcctgactgctccaacttcctgctctcacacacaccagaggggaaaaaaaaagaggagcgagagaaagaaaaaaagggggaaaaatcaggatctcattacaagagccacagaccgtctgcagacgcctgtcagcatggaaagtcgggggctttcgcccgggtcctcctagaaattccccccgaagaagactcccccacatctgggtatggagagtgcaatcacgctgtggcagttcctgttgcagttgctgctggatcagaaacatgagcatttgatctgctggacctcgaacgatggtgaattcaagctcctcaaagcagaagaagtggccaagctgtggggactccgaaaaaacaaaacaaatatgaactatgataagctgagcagagccctgcgatactattatgacaagaacatcatcaagaaggtgatcgggcagaagtttgtgtacaagtttgtctctttcccggagatcctgaagatggatcctcacgcggtggagatcagccgggagagccttctgctgcaggacagcgactgcaaggcgtctccggagggccgcgaggcccacaaacacggcctggccgccctcagaagcacgagccgcaacgaatacatccactcaggcctgtactcgtccttcaccattaattccctgcagaacccaccagacgccttcaaggccatcaagacggagaagctggaggagccgcccgaagacagcccccccgtggaagaagtcaggactgtgatcaggtttgtgaccaataaaaccgacaagcacgtcaccaggccggtggtgtccctgccttccacgtcagaggctgcggcggcgtccgccttcctggcctcgtccgtctcggccaagatctcctctttaatgttgccaaacgctgccagtatttcatccgcctcacccttctcatctcggtccccgtccctgtcccccaactcacccctcccttctgaacacagaagcctcttcctggaggccgcctgccatgactccgattccctggagcccttgaacctgtcatcgggctccaagaccaagtctccatctcttcccccaaaggccaaaaaacccaaaggcttggaaatctcagcgcccccgctggtgctctccggcaccgacatcggctccatcgccctcaacagcccagccctcccctcgggatccctcaccccagccttcttcaccgcacagacaccaaatggattgcttctgactccgagtccactgctctccagcatacatttctggagcagccttagtccagttgctccgctgagtcctgccaggctgcaagggccaagcacgctgttccagttccccacactgcttaatggccacatgccagtgccaatccccagtctggacagagctgcttctccagtactgctttcttcaaactctcagaaatcctgatgacgtctggccacaattaaggactcattaactgatgaaacaaatttgtccccacgggctagtttacctgtgtcgtgagaaggacattgtgaaactcttgttaatttggtttgcacttttcataacatggatagtctagatttatgttagcattttaaaaactgtttttgatatattcaagtatatatgaaaatctgtttggcattaagtgaattttaatgtttttgtttttatatccttttagctcttaagtgttgaacactgttgacagtgaagaacttttcttaatggttttcagtataactaataaggatgtgaagcttttttctctttagttctgagtatgctaaactgtgtgcttatatagactataaccagttgtgccttcctttgcatttaatgtaaatgaatgatttatatattttttagtattaagaggaaatgtttgaaagatgaaaattagtatcaaacagctctctagtagaatttcattatttttcaccagtgggcaatatgaaagcatatatcacgttttgttttactttcaattgtataagaattgccttagaacctcttttgaactgaaattcagtaaatgtccaagtaatgtttttataataaactaagccatatttagacaataaacatcgaaaaaaaaaaaaaaaaaaaaaaaaaaa

SEQ ID NO: 242 - DNA, 3077 bp, Homo sapiens
tttcttgttaaacaaacacctaatttatttcttggaggttttgttcagctgtcctaatttatgactttacattccttctggtgctaaactgctcaagtagcctcttgtatcaagtgtgacctgattccttaagaattttacttaatgagaacctctaagctagaaactcttgctaggtgtttcatgcaccttattttctttaatcattacaacaactctaagattgggttctctccaccttataaatgatgactgttttagagaggttaaggttgcttaaaattggtgagttagtgaggggtagagccacgaatggatttctggtcgctgcctccatcgtcagggcaagcttttcccacgactccagcgcttccatttgtcagtccccaggctagaaagccacagtgctaatttagtatttatcaagcgtttgtagtgtcctgggatctggcacttcgatgagaaagctgtgacggccccaacttctaacagcgagtggtaaggaggacgagggacacaggagggaggagactctccccaaagcttagcaccaacagaagtggtcccccgcaggttgctctgcgagcgccacctcttccctccaaccgaggagaaagtggcgcgcctttgaggagtccgaggtcccggcccaggcggcagcttgggtcctggcgggttccggacgggcgcctcagggacctggaagcaaccgcaccgaacgcgacggagagcggcgagacgactccaggaggcgcccgagctacatcccccggccacaccaaacccgggtttgctggcagacgcggctcacgacaccccttagggtcgcagcccctcccccggaagtgacgtgtagcgactacggcgtctgggagggacccaggagcagtcggggggtttgagagtggcggcggccgcggagggcctggcaggccccgccgctgcaaggaacgccccgaacgcgcgcgcccggcgtgtagcggccccaagacccgcgccgccgctgccgcgtgcgggggcggggagggcggggcgccaggagccgcggcggcgggagatgcgggcggctgcgggcacccggcgggctcggcttggccgccgccgccttctacggctccgccgcgggggtcgcagcggctgccgcgccgtcctcgagtttccagcgtgaggaggaggctgagggcggagaggcgcatcgtgttcgaggcggagaccgagggggagccccgcgcgcggcgtcgctcattgctatggacagtgctatcaccctgtggcagttccttcttcagctcctgcagaagcctcagaacaagcacatgatctgttggacctctaatgatgggcagtttaagcttttgcaggcagaagaggtggctcgtctctgggggattcgcaagaacaagcctaacatgaattatgacaaactcagccgagccctcagatactattatgtaaagaatatcatcaaaaaagtgaatggtcagaagtttgtgtacaagtttgtctcttatccagagattttgaacatggatccaatgacagtgggcaggattgagggtgactgtgaaagtttaaacttcagtgaagtcagcagcagttccaaagatgtggagaatggagggaaagataaaccacctcagcctggtgccaagacctctagccgcaatgactacatacactctggcttatattcttcatttactctcaactctttgaactcctccaatgtaaagcttttcaaattgataaagactgagaatccagccgagaaactggcagagaaaaaatctcctcaggagcccacaccatctgtcatcaaatttgtcacgacaccttccaaaaagccaccggttgaacctgttgctgccaccatttcaattggcccaagtatttctccatcttcagaagaaactatccaagctttggagacattggtttccccaaaactgccttccctggaagccccaacctctgcctctaacgtaatgactgcttttgccaccacaccacccatttcgtccataccccctttgcaggaacctcccagaacaccttcaccaccactgagttctcacccagacatcgacacagacattgattcagtggcttctcagccaatggaacttccagagaatttgtcactggagcctaaagaccaggattcagtcttgctagaaaaggacaaagtaaataattcatcaagatccaagaaacccaaagggttagaactggcacccacccttgtgatcacgagcagtgatccaagcccactgggaatactgagcccatctctccctacagcttctcttacaccagcatttttttcacaggtagcttgctcgctctttatggtgtcaccattgctttcatttatttgcccttttaagcaaatccagaatttatacactcaagtttgctttctgttacttaggtttgtcttagaaaggttatgtgtgactgtcatgtgaaagttaccccatttctcatcttaattaggattgctaaaatagaaagtttggagtattttcttaaaaaattcattgttctacaagtaaataaatattttgatttttctatttcctcctaaagaaagtacacacactctctcgctctctctcggtcttataaaactcgttggtgtcttataaaacaaacagtgataatctcaagttagaaaacagtaggtcctgagaaccataagaaaaatgactggtgtgatgttgagtaacaagttggtacagttactttagctatttattaacttgctcatctcatagaacattttagtagatttttcacacacctcattattaaaaaaaaacaaacatgctggtgtcttggttacccattattcctctgtacctgaattcaggttggtttttctatttggaaaagactttataaatgttggcttaaaaagaggttgagcaccagaatctcagaatttaccaccaaagaactcatccatgtaaccaaaaaccacttgtacccccaaaaactattgaaataaaaatttaaaaaattttaaaaaaaaaaaaaaaaaaaaaaaaaaaaaaaaaaaaaaaaaaaaaaaaaaa

SEQ ID NO: 243 - DNA, 5616 bp, Homo sapiens
ctcagactccgacgctgaggactccgccggctcggaggccgccgcgagagcccgggacccagcgggtgagcgcagggcggctgccgaggcgttgcggctgctgcggccggagcaggtcctgaagcgcctcgcggtgtgcgtggacacagccatcctggaagacgccggtgccgacgtcctgatggaggccctggaggccctgggctgcgagtgccgcatcgagccccagcgcccggcccgcagcctgcggtggacccgagcgagtcccgacccctgcccccgcagcctgcctcctgaagtgtgggctgcaggtgaacaggaattgctgctgctgctggagcccgaggagtttctgcagggcgtcgccacactgacccagatctctggcccaacccactgggtgccctggatctcccccgagaccaccgcccggccccacctggctgtcatcgggctggatgcctacctgtggtaccgctcactctcatgcccacagcagggctggctgggacgggggttcaggggaggtgggcacacttctggggttgctgtggcacagctgatcccacttctccaggtgggctctggcagaggccaagctcgggcagggcaggccccatggggagcggggaggaatggtcacctctgctcaggtctcgccagcacgtttcccgggggacacagcagccagagagcccgaaggtggccggtgccgaggtggccgtcagctggccggaggtggaagaggccctggtactcctgcagctctgggcaaacctggacgtgctactggtggcctcttggcaggagctgagtcggcacgtgtgcgccgttaccaaggctctcgcccagtatcccctcaagcagtaccgggaatcccaggccttctccttctgcacagcagggcgctgggcagccggcgagccagtggcaagagacggcgcagggctgcaggcggcctggcggaggcagatcaggcagttcagtcgggtcagcccagccgtggctgatgcagttgtcacagccttcccctccccccgccttctgcagcaggcgctggaggcctgcagcacggagcgggagcgcatgggcctcctggccgaccttcctgtgccgcccagtgaaggcgggcgtccccgcagggtggggcctgacctctcccgccgcatctgcctcttcctgaccacagccaaccctgatctcctgctggacctgggctcctgaccacacgtgggaccaccaggacagcatgcagccttggggacagaccagacaccctgggcggtgggggaggacccccagccacatgtggaccctcagcctgggtgggttctctggctgagcaggtctgacctcagggggagggtgggtggttgcaggggaagttttaggtagctgggaggagaagaggggcttctggctggcagatggctggcggttcctgtgctgagtcctgaacacgtaggccccaggggaggcctcagcagcagggctgtgcccccccaacacacacacacactcggcagggaccagaaggcagctccagggccccactgccacctggaggcttggggtgtggcaccctcagccagaagcagtaggggactcccaaggatgtggaggggcagtgaggcctgggagaaggcccaggctgctcgcaagcccggcctctgcacggatacgtttcagctcacgccatgtgggtgttagacatcaactctacatttattgcagtcctttaagtctatgacggcggggcagccgctgacagcatgcagagcaagttaggaaaaaccgaggccctgtgggaacagcaacgcgggctccagccaggctctcgtcctcgcagcctcccacaagacctggggctcagggcagccgcttccccacccagcacagcagcagaggggccctagagcccccacagaaaggactgtcccagcctcgggagcaagagatggctccctccggacgggcctcatccaactccgccctggagtgtggctggaaggaagggacagagaaagaagggacagaggaaaggggctgtcccagcccaagaaggcagttccactgggaagtcagtcaggtccggcggcagcgcttcctctggcagggccgaggctcgcgactgctggggtgggcggaggtcgctgcctggggatcggacactggagccttgcggcggctgcaactcatgctcaggacccagcccagcttgttgtgtagcacctgcttgaggcccggcggcagcggcagaccctccagcgtgtctcccgagtctggccgcagctggcgcaggcggtggcagcacaggtactggagggaagtggcgctggcacaggagcgggtgaccttcatgctgctccgggccgccgtggagcacaccatcgggtagaatctcttgttctgcagcttggtggctgccacacctggaagggaggggcccagcctgaaccccaggcagggaaggggccagctactgggcgcagcccctcagacctcacgctacagtcacccgggtgggcagctggcacagctgaggcaaggcagggtgcacgcgctggccctgccactccagcctggcctcactgtcccaccccctgggaccctggggcctcaggcttctgggaggaaccctttcagaaaacctcagtgtcccctgggctggggcggggtggctgcctccctcggggtgacagctgagaggagctcaagtcctgtgacggcctcacctatacacttcctgttcttgaaaaaggtgagtgtgccgtgccaggtgtccaggtgcacgccaatgatggagccctggccgaaccgcgatgagaagctggtcttgtcgcccttgtggtggaggaggcctgggggcagccagggtcgcagtgagcccgggagctccaggctcggccccgccccaccctgggcctcacgcacccgtgtaggagaggccccagctgtcctcatccctgcccagcaggctgcagaacgtgtggcggtatttgtccaggtccacatccgacgtcccgatgcccaccatctaggaacaggggccaggcagagggcgcggggctgggctgccggagccaggttccccagaagcaccctgggccgaagcaacttaccatgtcggtgccgtagacgggagaggtcatcttgatctcccagaagtgctggccctcccccagctccttggtgccccggatggccgctgtgccgcagctgtactccatgtggaagctgaccttacggttgtcacagctcagcagggtggctgatgacttatttaagtcatcccagacccagtcgaaatctgcaagagaggcccaggctggggcagccctgagagctccatggggctctgccctgcccacccccaggcccgcccgcagtgcagtcccagcaggggctgggccccacgctcacactcgtcttcctctccgcagcggcagtccctgccccggtgggccgagtgcaggctgctacagaaggaggcctcgctctgcccagcacagtcacagaaggactcgccggtcacgggcaccgcactggggatggatggcggcagcgtggagtactcggggtcggagtccgagtcgctgtgctgggagagaagggccggctgttactacctgttgcccgctctctaccctctcacccttgccctctgtccctgtcccaccctgtccctgacccacccaggaaaggatgggggtccaggcctccagggacttcacagtaccccgagcgcacagcccaggctccctcccaacgggctccggctctgccccattctgcatgaccaggagggccctggaggcccagccacagagcagtagccaaggctgcctggcctccaagtggtttctagacggtggataagccccaggtccaccccacctgcccagagctgagatggtgtggacaccttccctgctaggccagccctgcaggggcccccaggcaaggccaccacccccacaccaggcccagctgcagccacccggcctcagggcagtccccaccacactgtggcccaacgaccttcctgttacctgagcagacctggctcaccacagggtcctactgcccagtgcccactacaggccccgcccctcctggtgcaggtttcagctgtcacctccctgaggcttctccagccccttcacccctgttccatttttcttcttttgcttcactgaagttctccttggtcctgattcttggcctcctcccaccagaacgtgagctccttgtgggaggcagtgcccctcccagcctcctccctgtcacagactgtgtgggggccacccaggggctgaatggaccagggggtcagcagggagagtgctaagtggtggcggggggcctgtggcagaggccttgtgacagtgagggttgagggctggtccagagagatgatgtgatccccaggagaagccacaggggaccatgacatgggcgccaccagcttccaggtgaacgtggacctatcgaaagccagcttcagggcaggacactgtcctttctggaggggatggccccaccccacagacaaggcaggcccagacaactctaccccactgcctagaagtgcgggtccccagagccagggtagaccccctgagtcaggagcccgggcacagaactgagcacctgcactgcaggcccagggccgggttccctggagaaggagaaagactgaagccactgcctacctcctgcccacaacagactgcaggcccatttggtgacacaggacaagcagcacatgtgtcgaacactgccgagcccgcaggcacgcctgcatcccacagccacgagcctgtgaggctcaggcatgtgacctgcaggagctggaggcgggcgggaaggcaggtgggggcctctccctggctggagcagggagctccaggagacctcaggacggcccccacccggtgggtaaggaccctgtttcccaatttgcccccaaggcctaatggacccaccgggcttagggagtcctcactcagaggagaggagcccacccctcccaggacacctggctgagccggaacagcagcgcaggggagctgtgacagcagagagcagcaccaggtcacacaagcagccgccccggaaggacacggcccatggtgacagaggacaagcagcatgcgtgtgtcagacactggcctggcctgtggacacgcccgcgtcccacagccatgaccctgcgaggccaggagagactgctccagggcacatgacctgtggtagctggaagtggggcagggaggcgcagccacactcctgctctggtccgagggagatctcaggaaaccgactgggaaatcaccccccacagggacccccacccctcccagcctcactgcgcccgtcaggccaggcagctgccctcagggtctgccaaggtgggggtcaggggccatgggggcaggtagctctgcctgcaaagcccacaagcatgtcagatcacctgggctgcagacagacaaacacctgagctgttctgaataccttcaggttcctggcctccctgagcaagtgcagaaatttttaccttcaaggatcagggtttttctgtttgtttgttttttaacacacatatatgtg

SEQ ID NO: 244 - DNA, 462 bp, Homo sapiens
gcctccccgctgcagcccccgcactccttcttcggcgcccagcaccgggaccctctccatttctacccctgggtcctgcggaaccgcttcttcggccaccgcttccaggccagcgacgtgccccaggacgggctgcttctgcacggccccttcgcacgcaagcccaagcggatccgcacggccttctcgccctcgcagctgctgcggctggagcgcgccttcgagaagaaccactacgtggtgggcgccgagcggaagcagctggccggcagtctcagcctctccgagacgcaggtgaaggtgtggttccagaaccggaggacaaagtacaaacggcagaagctggaggaggaagggcctgagtccgagcagaagaagaagggctcccatcacatcaaccggtggcgcattgccacgaagcaggccaatggggaggacatcgatgtcacctccaatgactag

SEQ ID NO: 245 - DNA, 2908 bp, Homo sapiens
cgggcgccgcaggagcgagtgagctgggagcgaggggcgaaggcgcggagaagcccggccgcccggtgggcggcagaaggctcagccgaggcggcggcgccgactccgttccactctcggcccggatccaggcctccgggttcccaggcgctcacctccctctgacgcactttaaagagtctccccccttccacctcagggcgagtaatagcgaccaatcatcaagccatttaccaggcttcggaggaagctgtttatgtgatccccgcactaattaggctcatgaactaacaaatcgtttgcacaacttgtgaagaagcgaacacttccatggattgtccttggacttagggcgccctgcccgccttttgcagaggagaaaaaacttttttttttttttgcctcccccgagaactttccccccttctcctccctgcctctaactccgatccccccacgccatctcgccaaaaaaaaaaaaaaaaaaaaaaaagaaaaaaaaagaaaaaaaaagaaaaaaaattaccccaatccacgcctgcaaattcttctggaaggattttcccccctctcttcaggttgggcgcgtttggtgcaagattctcgggatcctcggctttgcctctccctctccctcccccctcctttcctttttcctttcctttcctttctttcttcctttccttccccccacccccacccccaccccaaacaaacgagtccccaattctcgtccgtcctcgccgcgggcagcgggcggcggaggcagcgtgcggcggtcgccaggagctgggagcccagggcgcccgctcctcggcgcagcatgttccagccggcgcccaagcgctgcttcaccatcgagtcgctggtggccaaggacagtcccctgcccgcctcgcgctccgaggaccccatccgtcccgcggcactcagctacgctaactccagccccataaatccgttcctcaacggcttccactcggccgccgccgccgccgccggtaggggcgtctactccaacccggacttggtgttcgccgaggcggtctcgcacccgcccaaccccgccgtgccagtgcacccggtgccgccgccgcacgccctggccgcccaccccctaccctcctcgcactcgccacaccccctattcgcctcgcagcagcgggatccgtccaccttctacccctggctcatccaccgctaccgatatctgggtcatcgcttccaagggaacgacactagccccgagagtttccttttgcacaacgcgctggcccgaaagcccaagcggatccgaaccgccttctccccgtcccagcttctaaggctggaacacgcctttgagaagaatcactacgtggtgggcgccgaaaggaagcagctggcacacagcctcagcctcacggaaactcaggtaaaagtatggtttcagaaccgaagaacaaagttcaaaaggcagaagctggaggaagaaggctcagattcgcaacaaaagaaaaaagggacgcaccatattaaccggtggagaatcgccaccaagcaggcgagtccggaggaaatagacgtgacctcagatgattaaaaacataaacctaaccccacagaaacggacaacatggagcaaaagagacagggagaggtggagaaggaaaaaaccctacaaaacaaaaacaaaccgcatacacgttcaccgagaaagggagagggaatcggagggagcagcggaatgcggcgaagactctggacagcgagggcacagggtcccaaaccgaggccgcgccaagatggcagaggatggaggctccttcatcaacaagcgaccctcgtctaaagaggcagctgagtgagagacacagagagaaggagaaagagggagggagagagagaaagagagagaaagagagagagagagagagagagagaaagctgaacgtgcactctgacaaggggagctgtcaatcaaacaccaaaccggggagacaagatgattggcaggtattccgtttatcacagtccacttaaaaaatgatgatgatgataaaaaccacgacccaaccaggcacaggacttttttgttttttgcacttcgctgtgtttcccccccatctttaaaaataattagtaataaaaaacaaaaattccatatctagccccatcccacacctgtttcaaatccttgaaatgcatgtagcagttgttgggcgaatggtgtttaaagaccgaaaatgaattgtaattttcttttccttttaaagacaggttctgtgtgctttttattttgattttttttcccaagaaatgtgcagtctgtaaacactttttgataccttctgatgtcaaagtgattgtgcaagctaaatgaagtaggctcagcgatagtggtcctcttacagagaaacggggagcaggacgacgggggggctgggggtggcgggggagggtgcccacaaaaagaatcaggacttgtactgggaaaaaaacccctaaattaattatatttcttggacattccctttcctaacatcctgaggcttaaaaccctgatgcaaacttctcctttcagtggttggagaaattggccgagttcaaccattcactgcaatgcctattccaaactttaaatctatctattgcaaaacctgaaggactgtagttagcggggatgatgttaagtgtggccaagcgcacggcggcaagttttcaagcactgagtttctattccaagatcatagacttactaaagagagtgacaaatgcttccttaatgtcttctataccagaatgtaaatatttttgtgttttgtgttaatttgttagaattctaacacactatatacttccaagaagtatgtcaatgtcaatattttgtcaataaagatttatcaatatgccctcaaaaaaaaaaaaa

SEQ ID NO: 246 - DNA, 2962 bp, Homo sapiens
agctcacagacccataatcctgcatttctctaacaagttgtttatggagttgcttctccatttgcctacatcccaaaattcacccctcccgggtttcttctgccccctcctgagtcccggcctgaaggagggggagggacgcgggtgcgggcgcgggtgggggagggcggacccgacgcacagggccagcgccgaggcgccccctctccgccagcggttgacgcccccggattatttatccgcaaagtcccgcgcgcgcccattgggccgaggcccgagtgtcagcgcgagtcccggctcgccattggctccgcacacgtgcggccctgactcacgtgcttccggtttgaaggcaaaaagtgtgcctgggtgattttttttttaagcgagagagtttgtgcaaagatccgagctgtcagagatttgaaaaaaaaaaaaaaaaaaaaaaaaaaaaaaacagcccggcgctggcggagacgcgctctccctgcaaaaaaagcaaaggcgattaaaggcgctgccagcctcacgctctgggcacagctgagcgtgacactcggggaagtcaaacccctcactactgcctaggaagatggctagactttaaatactatttttttccctttaagaaaaaaattattggagctttttttcttgctttctttttccttttctttttctttttttccttcatttttttggccgtggcttactccccatttaaatcaaatcattgaatctggttgcagaaagaaaaaagaaatagccaagtgtctccatatctggatgtctacaaattagagagggagagacagcgagatctatctgctagataagaacgagcgatccaggccagacgcctgagcttttttcctgcacccgccccgtgccttcgctgaggcttcgcctgcctccttcctccgcgcacccccacgggccgctggcaaagtggggtggggagcgaggcggtgggggcgggggccggcgcggcggccggggcggcggggcggccgagcatggaagaacagcagccggaacctaaaagtcagcgcgactcggccctcggcgcggcggcggcggcgactccgggcggcctcagcctgagcctcagtccgggcgccagcggcagcagcggcagcggcagcgatggagacagcgtgccggtgtccccgcagcctgcgcccccctcgccgcccgcggcgccttgcctgccgcccctggcccaccacccgcacctccccccacaccccccgcccccgccgcctcagcatctcgcggcgcctgctcaccagccgcagccagcggcccagctgcaccgcaccaccaactttttcatcgacaacatcctgaggccggacttcggctgcaaaaaggagcagccgccaccgcagcttctggtggctgcggcggccagaggaggcgcaggaggaggaggccgggtcgagcgtgacagaggccagactgccgcaggtagagaccctgtccacccgttgggcacccgggcgccaggcgctgcctcgctcctgtgcgccccggacgcgaactgtggcccacccgacggctcccagccagccgccgccggcgcgggcgcgtctaaagctgggaacccggctgcggcggcggcggcggccgcggcggcagtggcggcggcggcggcggccgcagcagccaagccctcggacaccggtggcggcggcagtggaggcggcgcggggagccccggagcgcagggcaccaaatacccggagcacggcaacccggctatcctacttatgggctcagccaacggcgggcccgtggtcaaaactgactcgcagcagcctctcgtatggcccgcctgggtgtactgcacacgttattcggatcgtccatcctccggtccgcgcaccaggaagctgaagaagaagaagaacgagaaggaggacaagcggccgcggaccgcgttcacggccgagcagctgcagagactcaaggcggagttccaggcaaaccgctacatcacggagcagcggcggcagaccctggcccaggaactcagcctcaacgagtcccagatcaagatctggttccagaacaagcgcgccaagatcaagaaagccacaggcatcaagaacggcctggcgctgcacctcatggcccagggactgtacaaccactccaccaccacggtccaggacaaagacgagagcgagtagccgccacaggccggggccgcgcccgcgccccctcccggcaccgccgccgtcgtctcccggcccctcgctgggggagaaagcatctgctccaaggagggagggagcgcagggaaaagagcgagagagacagaaagagagcctcagaatggacaatgacgttgaaacgcagcatttttgaaaagggagaaagactcggacaggtgctatcgaaaaataagatccattctctattcccagtataagggacgaaactgcgaactccttaaagctctatctagccaaaccgcttacgaccttgtatatatttaatttcaggtaaggaaaacacatacgtgtagcgatctctatttgctggacatttttattaatctcctttattattattgttataattattataattattataattattttatcccctcccccaccgcctcgctgcccccgcccagtttcgttttcgttgcctttttcatttgaatgtcattgcttctccggtgcctcccgacccgcatcgccggccctggtttctctgggacttttctttgtgtgcgagagtgtgtttcctttcgtgtctgcccacctcttctcccccacctcccgggtcccttctgtcggtctgtctgttctgcccccctttcgttttccggagacttgttgagaaatacgaccccacagactgcgagactgaaccgccgctacaagccaaagattttattatgttcagaaacctgtagtctgaaataaagtgtacactgtgctcacga

SEQ ID NO: 247 - DNA, 3405 bp, Homo sapiens
tctctcatcgtctgggcgagcggggcggctcgtggtgtttctaacccagttcgtggattcaaaggtggctccgcgccgagcgcggccggcgacttgtaggacctcagccctggccgcggccgccgcgcacgccctcggaagactcggcggggtgggggcgcgggggtctccgtgtgcgccgcgggagggccgaaggctgatttggaagggcgtccccggagaaccagtgtgggatttactgtgaacagcatggaggagaatgaccccaagcctggcgaagcagcggcggcggtggagggacagcggcagccggaatccagccccggcggcggctcgggcggcggcggcggtagcagcccgggcgaagcggacaccgggcgccggcgggctctgatgctgcccgcggtcctgcaggcgcccggcaaccaccagcacccgcaccgcatcaccaacttcttcatcgacaacatcctgcggcccgagttcggccggcgaaaggacgcggggacctgctgtgcgggcgcgggaggaggaaggggcggcggagccggcggcgaaggcggcgcgagcggtgcggagggaggcggcggcgcgggcggctcggagcagctcttgggctcgggctcccgagagccccggcagaacccgccatgtgcgcccggcgcgggcgggccgctcccagccgccggcagcgactctccgggtgacggggaaggcggctccaagacgctctcgctgcacggtggcgccaagaaaggcggcgaccccggcggccccctggacgggtcgctcaaggcccgcggcttgggcggcggcgacctgtcggtgagctcggactcggacagctcgcaagccggcgccaacctgggcgcgcagcccatgctctggccggcgtgggtctactgtacgcgctactcggaccggccttcttcaggtcccaggtctcgaaaaccaaagaagaagaacccgaacaaagaggacaagcggccgcgcacggcctttaccgccgagcagctgcagaggctcaaggccgagttccagaccaacaggtacctgacggagcagcggcgccagagcctggcgcaggagctgagcctcaacgagtcacagatcaagatttggttccagaacaagcgcgccaagatcaagaaggccacgggcaacaagaacacgctggccgtgcacctcatggcacagggcttgtacaaccactccaccacagccaaggagggcaagtcggacagcgagtagggcggggggcatggaggccaggtctcagtccgcgctaaacaatgcaataatttaaaatcataaagggccagtgtataaagattataccagcattaatagtgaaaatattgtgtattagctaaggttctgaaatattctatgtatatatcatttacaggtggtataaaatccaaaatatctgactataaaatatttttttgagttttttgtgtttatgagattatgctaattttatgggtttttttcttttttgcgaagggggctgcttagggtttcacctttttttaatcccctaagctccattatatgacattggacacttttttattattccaaaagaagaaaaaattaaaacaacttgctgaagtccaaagattttttattgctgcatttcacacaactgtgaaccgaataaatagctcctatttggtctatgacttctgccactttgtttgtgttggcttggtgaggacagcaggaggggcccacacctcaagcctggaccagccacctcaaggccttggggagcttaggggacctggtgggagagaggggacttccagggtccttgggccagttctgggatttggccctgggaagcagcccagcgtaccccaggcctgctctgggaagtcggctccatgctcaccagcagccgcccaggcccgcagcctcacccggctccctctcctcaccctcctgcacctaactccctcctccttctcctttttcctcctcttcctccttcctccttcctcctgctcctcctttcttcttctttttcttctcctcctcctccttccttcctcctcctccttctctttcctcctcctcctcaccaagggcccaaccgtgtgcatacatcgtctgcgtctgtggtctgtgtcgctgtccccagtcccaccgcagtcctgccgcaggcctaaccctcctgccctgggcactgcctccatgcagaagcgcttcgaggttctggggctaaaggcctggggtgtgtggcctaaagcccaagagcggtggggcgaccctccttttggcttggccccaggaatttcctgtgactccaccagccatcatgggtgccagccagggtcccagaaatgaggccatggctcactgtttctgggcgggcagaaggctctgtagagggagatggcatcatctatcttcctttcctttttcttttcttccctatttttttctttttttcctttatttttttcttttcttggagtggctgcttctgctatagagaacattcttccaagataaatatgtgtgtttacacatatgtctgcatgcatgtgaacacacacacacacacacacacaccaggcgtgtttgagtccacagttctgaaacatgtggctaccttgtctttcaaaagaactcagaatcctccaggatctagaagaaggaagaaagtgtgtaaataatcatttcttatcatcactttttgtcttttcttgttttttaaaatatacattttatttttgaaggtgtggtacagtgtaaattaaatatattcaatatatttcccaccaagtacctatatatgtatataaacaaacacattatctatatataacgccacactgtcttctgtttagtgtatggggaaagaccaatccaactgtccatctgtggctgggacagcccagggggtgtgcccacggctgacccaggggtgtgcacacggctgagctgggagtcccgctggtctccctgaggactgagggtgaacttcgctctttgccttaaacctctttatttcattgcagtaatagttttacgttgtacataatagtgtaaacctttttaaaaaggaaagtataaaaacaaaagttgtaatttaaaagtctgaataaccatctgctgcttaggaaactcaatgaaatgacatgcctttttagcaggaagcaaagttggtttctgttttttgttttctttgttgttttagtttataaaacatgtgcattttacagttccagtatcaaatatttataatcttatgagaaatgaatgaatgtttctatttacaactgtgcttatcaaaattgtgaacacccccacccccgcatttttgtgtgttgaaattcttgaaggttacattaaataaaacaaaatctctttattataaaataaaaaaaaaaa

SEQ ID NO: 248 - DNA, 5559 bp, Homo sapiens
agagtccagccgggggtgccgcacccactggggagtggggagggaggacacataggaaatgcctggggctggagtctctttggctctctgccagcaagaaacttaaacgtcctggcttgctcaacccgagtgtccctaaactgtccagacttttgcccgtccattgccactatctctccccactctgggtgtcctacccaaggcgctgtctatgcgtgcccagggcctgtcctgcggatacccagctcgccccttgcagccctttttagagcatctcgcgggctctggcatcaccaagcgcacagccccgggctgcgctcccctaaggtgggtccctcagatccggggctgtccattaaccaggctggcccaaagaggcgcagacactcgaacccgggaaaacttattttattctcggttcccggggttgcagctgccagcggctgagacagtgcgtccgctttgtctctctgcactccccgcagcccccctctcccgcttcctctcccgattaactcccccgacacgctcttctctagctcctctcctcctcccactccttctcctcctcttcctcctcctacaccacaggccgcgctaatgcgcttcctccctcccccggtgtcggtctctttgcatacgcgccccctcccctccccgccgcgccacttatagcggggcgcacggcggcggggcgcagactgctctggcagccggagaggaggcggtgcggcggtggcgctgcggagacccggtccagacgcctggcggccgccggcacacaaggcgctttctagctccctcccccgagcgcacagcccgcctccttccgcggcgcctgcagtggcaggcttgctctgccctaccgtgacgcgctccggagacgctctgcgggtcctggacaccgggtccgcggcgtggggacgacagacggaggcgaacgccatcggtagccggtccgcgagccatcgttcggggcgcagtcctctccccggctggccctcctttctccggggcattcgccaccgcttccctgggctgagacgaccggttcgtcgcctccttgcccgtgaccgtcgctagaactcagttgtgcgttgcggccagtcgccactgctgagtggaaacaaaatgtcagtcagtgtgcatgagaaccgcaagtccagggccagcagcggctccattaacatctatctgtttcacaagtcctcctacgctgacagcgtcctcactcacctgaatcttttacgccagcagcgtctcttcactgacgtccttctccatgccggaaataggaccttcccttgccaccgggcagtgctggctgcatgcagtcgctactttgaggccatgttcagtggtggcctgaaagagagccaggacagtgaggtcaactttgacaattccatccacccagaagtcttggagctgctgcttgactatgcgtactcctcccgggtcatcatcaatgaagaaaatgcagaatcgctcctggaagctggtgacatgctggagtttcaagacatccgggatgcatgtgcagagttcctggaaaagaacctgcatcccaccaactgcctgggcatgctgctgctgtctgatgcacaccagtgcaccaagctgtacgaactatcttggagaatgtgtctcagcaacttccaaaccatcaggaagaatgaagatttcctccagctgccccaggacatggtagtgcaactcttgtccagtgaagagctggagacagaggatgaaaggcttgtgtacgagtctgcaattaactggatcagctatgacctgaagaagcgctattgctacctcccagaactgttgcagacagtaaggctggcacttctgccagccatctatctcatggagaatgtggccatggaggaactcatcaccaagcagagaaagagtaaggaaattgtggaagaggccatcaggtgcaaactgaaaatcctgcagaatgacggtgtggtaaccagcctctgtgcccgacctcggaaaactggccatgccctcttccttctgggaggacagactttcatgtgtgacaagttgtatctggtagaccagaaggccaaagaaatcattcccaaggctgacattcccagcccaagaaaagagtttagtgcatgtgcgattggctgcaaagtgtacattactggggggcgggggtctgaaaatggggtctcaaaagatgtctgggtttatgataccctgcacgaggagtggtccaaggctgcccccatgctggtggccaggtttggccatggctctgctgaactgaagcactgcctgtatgtggttggggggcacacggccgcaactggctgcctcccggcctccccctcagtctctctaaagcaggtagaacattatgaccccacaatcaacaaatggaccatggtggccccactccgagaaggcgttagcaacgccgcagtagtgagtgccaaacttaagttatttgctttcggaggtaccagtgtcagtcatgacaagctccccaaagttcagtgttacgatcagtgtgaaaacaggtggactgtaccggccacctgtccccagccctggcgttacacagcagcagctgtgctggggaaccagatttttattatggggggtgatacagaattctctgcctgctctgcttataaattcaacagtgagacttaccagtggaccaaggtgggagatgtgacagcaaagcgcatgagctgccatgctgtggcctctggaaacaaactctacgtggttggaggatactttggcattcagcgatgcaagactttggactgctacgatccaacattagacgtgtggaacagcatcaccactgtcccgtactcgctgattcctactgcatttgtcagcacctggaaacatctgccttcttaaatgcagtacattctaaagagagtgagcatgagctcactccatcactcgatgagataatatgagatttctacttcggagaggccaagtctaatgaagagaaaaaaaggaaaagaagttgcaagactcgaataaaatctgctgcaccttgtaaatgctctaactggacatgaaggaaaggggcgagggaggggggtgggatttttggtgcaagtagcacatggtttaaatatgaatgaacaaacctgtgatctagtccttgtcttgtaattgtggattaatgtcaatgttaatcagcccctcaaagggagagaaaagctggaccttttcccttgctgtaccatattcagcatttgatttccatgggccccaccatttatgtgtagaatttgaaatggttgtcacctctctctgaggacagagcttgaagcctccacaccagctgctgctggagattcaaagcccaactgtgggtccgagagggaagctggctgggctggctgaagaatgaagaccactggactctccgttaatctctaaggggtctgctccccaggaacgtttctgaacaatggggactttgttggtagccatttggtagatgttcttttctatttataagtgactttaaactttcccttggctgttaagaagtttgttatagatttagctatttattgttcgatgcctgcatgctgaaacaatgcctacagctgtcttcacatgtatggacgtgtgtgaatggttgtacgttttgcacattttgtggctgttgagatgtgctttgctgcacaaacatgaaaatttttgagttacaatttggagcataactggagggtgggttggggaggggtggatttttaaaatgtcaagacagggaaggatgacaaaatggaaatttaaatgacatcctagaggtagagaaaccgtggagatcgcttttctcagactcaccaacttttaatgggatttcatggggtttggttgtgctgatagggtaaggggaggctgctttctgcccttctccccactcccatctgatttacttaattcagtctcagctgctgaaatttggaaaggaccaaattgctttacagtttttttctttgtgtagtatcttgaaatcctggaaaattctatggaatagttctgtatatagggcacaagtaaaggcattgtccaaagtttatttatttatttattaccctaagaatgctttgccataaccacatttaatgggaaaaacggcagtatcacagatgtaaattaactcaccagatttactgggcctgaactcattctcttcttgctatatgatttagcaagttctagaaggtctccaagacaataattacattggcacaatgtatacttcagtgctcacccgtaggcaaatctctttttaaaaaactctttggtgcacaagtaacacatttggccacaaaacaccaaagaattgtaggcagtggcccctattgagaagttttccggtagagttggaaatcagttgtgaatacattctttgctagttggagtgcttgtttactaagcatgtgccgtcgtaggtattagtgctagtctcagataggtgcttcccctgaggtgcaggggaagaccaaagtttgcaactcgaactgctttcgtccatgtttctcacattgctgtattttagaaaataggggttaagactgataacaaccttttacattgtgactgtgtttgcattgtctaatgacagataaatccttaacatttctctccaccttagtactttagactaattgtgtttgtccgtccatgccatgaatgagtgggctgtagttgggcctaaataaatgagctgttggaagaaaagaatcacagtactttccagcagtcagtccctggttcctagatgtgttctaagcaatgcaaatgtctaattgtcccccagtgggcatagtcagtgtcgtttatattgtagcagttacagctctgtagtttatgatgcaaatctgccaagagagatgtatgtgtcactgcatggcttctgaaagcaggatgaattttctgcagctgtttcaaagttggggtctgttcttgaatcctctattaattactgtgtgtgagccagagggagctgtggtaagggttgggcccccagcctgtagggaactttctggactcccactctttgaatcgatataggcatttggtctcactacttgaccattctcaccctgtgaaacgtcccacactttgaagcaaatacaattcacagcacagtacacacaaaaaccttggcataagacagagaaggttcttcttattttgtgggctggttgctgtagaaacacataacaaagggcagccctccacttctggtataattgtgtagccccttttctttgggcttgacacctgtcttgaataagagtgattagagctgcataatgtccctctcttggctattgaccatgtggttcacgtacaaaactctgtataagttgaaggaaaatgttcatgttcatatgtacttgtttgctatgactacattttgaggttttgtaaaactgttatttttttttttttcacaatgtgaaactgaaggtcaataaattattagagattttctcttcaaaaaaaaaaaaaaaaaaaaaaaaaaaaaaaaaaaaaaaaaaa

SEQ ID NO: 249 - DNA, 1812 bp, Homo sapiens
tagctaggcaggaagtcggcgcgggcggcgcggacagtatctgtgggtacccggagcacggagatctcgccggctttacgttcacctcggtgtctgcagcaccctccgcttcctctcctaggcgacgagacccagtggctagaagttcaccatgtctattctcaagatccatgccagggagatctttgactctcgcgggaatcccactgttgaggttgatctcttcacctcaaaaggtctcttcagagctgctgtgcccagtggtgcttcaactggtatctatgaggccctagagctccgggacaatgataagactcgctatatggggaagggtgtctcaaaggctgttgagcacatcaataaaactattgcgcctgccctggttagcaagaaactgaacgtcacagaacaagagaagattgacaaactgatgatcgagatggatggaacagaaaataaatctaagtttggtgcgaacgccattctgggggtgtcccttgccgtctgcaaagctggtgccgttgagaagggggtccccctgtaccgccacatcgctgacttggctggcaactctgaagtcatcctgccagtcccggcgttcaatgtcatcaatggcggttctcatgctggcaacaagctggccatgcaggagttcatgatcctcccagtcggtgcagcaaacttcagggaagccatgcgcattggagcagaggtttaccacaacctgaagaatgtcatcaaggagaaatatgggaaagatgccaccaatgtgggggatgaaggcgggtttgctcccaacatcctggagaataaagaaggcctggagctgctgaagactgctattgggaaagctggctacactgataaggtggtcatcggcatggacgtagcggcctccgagttcttcaggtctgggaagtatgacctggacttcaagtctcccgatgaccccagcaggtacatctcgcctgaccagctggctgacctgtacaagtccttcatcaaggactacccagtggtgtctatcgaagatccctttgaccaggatgactggggagcttggcagaagttcacagccagtgcaggaatccaggtagtgggggatgatctcacagtgaccaacccaaagaggatcgccaaggccgtgaacgagaagtcctgcaactgcctcctgctcaaagtcaaccagattggctccgtgaccgagtctcttcaggcgtgcaagctggcccaggccaatggttggggcgtcatggtgtctcatcgttcgggggagactgaagataccttcatcgctgacctggttgtggggctgtgcactgggcagatcaagactggtgccccttgccgatctgagcgcttggccaagtacaaccagctcctcagaattgaagaggagctgggcagcaaggctaagtttgccggcaggaacttcagaaaccccttggccaagtaagctgtgggcaggcaagcccttcggtcacctgttggctacacagacccctcccctcgtgtcagctcaggcagctcgaggcccccgaccaacacttgcaggggtccctgctagttagcgccccaccgccgtggagttcgtaccgcttccttagaacttctacagaagccaagctccctggagccctgttggcagctctagctttgcagtcgtgtaattggcccaagtcattgtttttctcgcctcactttccaccaagtgtctagagtcatgtgagcctcgtgtcatctccggggtggccacaggctagatccccggtggttttgtgctcaaaataaaaagcctcagtgacccatgag

SEQ ID NO: 250 - DNA, 2756 bp, Homo sapiens
atgcagttaggggagcagctcttggtgagctcagtgaacctgcctggcgcgcacttctacccgctggagagtgcgcgaggcggcagcggcgggagcgctggccacctccccagcgcggccccctctcctcagaagttggacttagacaaagcgtccaagaagttttccggcagtctctcctgcgaggcggtgagcggggagcccgcagccgccagcgcaggggcccccgcggccatgcttagtgacaccgacgccggggacgcatttgccagcgctgcggcagtggccaagccggggcccccggacggccgcaagggctccccctgcggggaggaggagctgccctccgccgctgcagccgccgccgccgccgccgccgcggctgcggccactgcgcgctactccatggacagcctgagctccgagcggtactacctccagtcccccggtcctcaggggtcggagctggctgcgccctgctcactcttcccgtaccaggcggcggctggggcgccccacggacctgtgtacccggctcctaacggggcgcgctacccctacggctccatgctgccccccggcggcttccccgcggctgtgtgcccacccgggagggcgcagttcggcccaggagccggtgcgggcagtggcgcgggcggtagcagcggcgggggcggcggcccgggcacctatcagtacagccagggggctccgctctacgggccgtaccctggagccgcagcggcgggatcttgcggaggactggggggcctgggggttccaggttctggcttccgtgcccacgtctacctgtgcaaccggcctctgtggctcaaattccaccgccaccaaactgagatgatcattacgaaacagggcaggcgcatgtttcctttcttgagcttcaacataaacggactcaatcccactgcccactacaatgtgttcgtagaggtggtgctggcggaccccaaccactggcgcttccaggggggcaaatgggtgacctgtggcaaagccgacaataacatgcagggcaacaaaatgtatgttcacccagagtctcctaatactggttcccactggatgagacaggagatttcattcgggaaattaaaactcaccaataacaaaggcgcaaataacaacaacacccagatgatagtcttacaatccttacacaaataccaaccccgactgcatattgttgaagttacagaggatggcgtggaggacttgaatgagccctcaaagacccagacttttaccttctcagaaacgcaattcattgcagtgactgcctaccaaaacaccgatattactcaactaaagattgatcataacccctttgcaaaaggcttcagagacaactatgattcatcccatcagattgtccctggaggtcggtacggcgttcaatccttcttcccggagccctttgtcaacactttacctcaagcccgctattataatggcgagagaaccgtgccacagaccaacggcctcctttcaccccaacagagcgaagaggtggccaaccctccccagcggtggcttgtcacgcctgtccagcaacctgggaccaacaaactagacatcagttcctatgaatctgaatatacttctagcacattgctcccatatggcattaaatccttgccccttcagacatcccatgccctggggtattacccagacccaacctttcctgcaatggcagggtggggaggtcgaggttcttaccagaggaagatggcagctggactaccatggacctccagaacaagccccactgtgttctctgaagatcagctctccaaggagaaagtgaaagaggaaattggctcttcttggatagagacacccccttccatcaaatctctagattccaatgattcaggagtatacaccagtgcttgtaagcgaaggcggctgtctcctagcaactccagtaatgaaaattcaccctccataaagtgtgaggacattaatgctgaagagtatagtaaagacacctcaaaaggcatgggagggtattatgctttttacacaactccctaaagagttattttaacctcaaaaattagctaactttttgcagatggacttggtggtgttttttgttgtcttctttgcctaggttgccaaaaagatgtttgccttccaccttgatgcatcctgttttgtgcaattctctaaaagaaggtgccaaagctttttgattgctgcaggtaactgaaacaaacctagcatttttaaaaaataagattaatggaagactttaaggtattttaaaattcgaagggtatccaaggttctgtatttatttattggggagacactaacccttcaaagaagcaggctgtgaacattgggtgcccagtgctatcagatgagttaaaacctttgattctcatttctatttgtaaattcttaagcaaatagaagccgagtgttaaggtgttttgcttctgaaagagggctgtgccttccgtttcagaaggagacattttgctgttacattctgccaggggcaaaagatactaggcccaggagtcaagaaaagcttttgtgaaagtgatagtttcacctgactttgattccttaacccccggcttttggaacaagccatgtttgccctagtccaggattgcctcacttgagacttgctaggcctctgctgtgtgctggggtggccagtgggactcaggagagagcaagctaaggagtcaccaaaaaaaaaaaaaaaaaaaaaa

SEQ ID NO: 251 - DNA, 2751 bp, Homo sapiens
gggagcttccggattgagccggaagtccccccagagcggatgccgcggcgggcctgtgggagcggggtcatcttctctctgctgctgtagctgccatgggcaaaagagaccgagcggaccgcgacaagaagaaatccaggaagcggcactatgaggatgaagaggatgatgaagaggacgccccggggaacgaccctcaggaagcggttccctcggcggcggggaagcaggtggatgagtcaggcaccaaagtggatgaatatggagccaaggactacaggctgcaaatgccgctgaaggacgaccacacctccaggcccctctgggtggctcccgatggccatatcttcttggaagccttctctccagtttacaaatatgcccaagacttcttggtggctattgcagagccagtgtgccgaccaacccatgtgcatgagtacaaactaactgcctactccttgtatgcagctgtcagcgttgggctgcaaaccagtgacatcaccgagtacctcaggaagctcagcaagactggagtccctgatggaattatgcagtttattaagttgtgtactgtcagctatggaaaagtcaagctggtcttgaagcacaacagatacttcgttgaaagttgccaccctgatgtaatccagcatcttctccaggaccccgtgatccgagaatgccgcttaagaaactctgaaggggaggccactgagctcatcacagagactttcacaagcaaatctgccatttctaagactgctgaaagcagtggtgggccctccacttcccgagtgacagatccacagggtaaatctgacatccccatggacctgtttgacttctatgagcaaatggacaaggatgaagaagaagaagaagagacacagacagtgtcttttgaagtcaagcaggaaatgattgaggaactccagaaacgttgcatccacctggagtaccctctgttggcagaatatgacttccggaatgattctgtcaaccctgatatcaacattgacctaaagcccacagctgtcctcagaccctatcaggagaagagcttgcgaaagatgtttggaaacgggcgtgcacgttcgggggtcattgttcttccctgcggtgctggaaagtccctggttggtgtgactgctgcatgcactgtcagaaaacgctgtctggtgctgggcaactcagctgtttctgtggagcagtggaaagcccagttcaagatgtggtccaccattgacgacagccagatctgccggttcacctccgatgccaaggacaagcccatcggctgctccgttgccattagcacctactccatgctgggccacaccaccaaaaggtcctgggaggccgagcgagtcatggagtggctcaagacccaggagtggggcctcatgatcctggatgaagtgcacaccataccagccaagatgttccgaagggtgctcaccatcgtgcaggcccactgtaagctgggtttgactgcgaccctcgtccgcgaagatgacaaaattgtggatttaaattttctgattgggcctaagctctacgaagccaactggatggagctgcagaataatggctacatcgccaaagtccagtgtgctgaggtctggtgccctatgtctcctgaattttaccgggaatatgtggcaatcaaaaccaagaaacgaatcttgctgtacaccatgaaccccaacaaatttagagcttgccagtttctgatcaagtttcatgaaaggaggaatgacaagattattgtctttgctgacaatgtgtttgccctaaaggaatatgccattcgactgaacaaaccctatatctacggacctacgtctcagggggaaaggatgcaaattctccagaatttcaagcacaaccccaaaattaacaccatcttcatatccaaggtaggtgacacttcgtttgatctgccggaagcaaatgtcctcattcagatctcatcccatggtggctccaggcgtcaggaagcccaaaggctagggcgggtgcttcgagctaaaaaagggatggttgcagaagagtacaatgcctttttctactcactggtatcccaggacacacaggaaatggcttactcaaccaagcggcagagattcttggtagatcaaggttatagcttcaaggtgatcacgaaactcgctggcatggaggaggaagacttggcgttttcgacaaaagaagagcaacagcagctcttacagaaagtcctggcagccactgacctggatgccgaggaggaggtggtggctggggaatttggctccagatccagccaggcatctcggcgctttggcaccatgagttctatgtctggggccgacgacactgtgtacatggagtaccactcatcgcggagcaaggcgcccagcaaacatgtacacccgctcttcaagcgctttaggaaatgatgcttaggcagggtacttcgttcaagaccggcgcttggcacccttgttggaaagggattttcagcataacattttccttccacctctttgaccttccctccagcgttggccaaattgtgctgaggaagatgcatcaagggcttggctgtgccttcataggtcatctagggttttataaaggaggaggagacaatattttttcaaactttttggggagtggggtcatttctgtatataaaaaatgttaatatttaaggtgtatttatgttaccgttctgaataaacagaatggaccattgaaccagta

SEQ ID NO: 252 - DNA, 7006 bp, Homo sapiens
agcagaagtcggagtcgctgttgggggcggtgtctatggttgagctgagggcgcaggcgccacggcccgtcgagctgggttccaaggcggctggcggcggtagcgtctctgtttccttgtgggcgctcgcgcggccctgggtagtctgtagagaatgccaaatgagggaatcccccactcaagtcaaactcaggagcaagactgtttacagagtcaacctgtcagtaataatgaagaaatggcaatcaagcaagaaagtggtggtgatggggaggtggaggagtacctctcctttcgttctgtgggtgacgggctgtccacctctgctgtggggtgcgcatcagcagctccgaggagagggccagccctgctgcacatcgaccgacatcagatccaggcagtagagcctagcgcccaggcccttgagctgcagggtttgggtgtggacgtctatgaccaggacgtgctggaacagggagtgcttcagcaggtggacaatgccatccatgaggccagccgtgcctcccagctcgttgacgtggagaaggagtatcggtcggtcctggatgacctcacgtcatgtacgacatccctaaggcaaatcaataaaattattgaacagcttagccctcaagctgccaccagcagagacatcaacaggaaactagattctgtaaaacgacagaagtataataaggaacaacagctaaaaaagatcactgcaaaacaaaagcatctccaggccatccttggaggagcagaggtgaaaattgaactagatcacgccagtctggaggaggatgcagagccggggccatccagtcttggcagcatgctcatgcctgtccaggagactgcctgggaagagctcatccgcactggccagatgacaccttttggtacccagatccctcagaaacaggagaaaaagcccagaaaaatcatgcttaatgaagcatcaggcttcgaaaagtatttggcagatcaagcaaaactgtcttttgaaaggaagaagcaaggttgtaataaaagagcagctagaaaagctccagccccagtcacgcctccagccccagtgcaaaataaaaacaaaccaaacaagaaagccagagttctgtccaaaaaagaggagcgtttgaaaaagcacatcaagaaactccagaagagggctttgcagttccaggggaaagtgggattgccaaaggcaaggagaccttgggagtcagacatgaggccagaggcagagggagactctgagggtgaagagtctgagtatttccccacagaggaggaggaagaggaggaagatgacgaggtggagggggcagaggcggacctgtctggagatggtactgactatgagctgaagcctctgcccaagggcgggaaacggcagaagaaagtgccagtgcaggagattgatgatgactttttcccaagttctggggaagaagctgaagctgcttctgtaggagaaggaggaggaggaggtcggaaagtgggaagataccgagatgatggagatgaagattattataagcagcggttaaggagatggaataaactgagactgcaggacaaagagaaacgtctgaagctggaggacgattctgaggaaagtgatgctgaatttgacgaaggttttaaagtgccaggttttctgttcaaaaagctttttaagtaccagcagacaggtgttaggtggctgtgggaattgcactgccagcaggcaggaggaattctgggagatgaaatgggattgggcaagaccatccagataattgccttcttggcaggtctgagctacagcaagatcaggactcgtggttcaaattacaggtttgaggggttgggtccaactgtaattgtctgtccaacaacagtgatgcatcagtgggtgaaggaatttcacacgtggtggcctccgttcagagtggcaattctacatgaaaccggttcctatacccacaaaaaggagaaactaattcgagatgttgctcattgtcatggaattttgatcacatcttactcctacattcgattgatgcaggatgacattagcaggtatgactggcactatgtgatcttggacgaaggacacaaaattcgaaatccaaatgctgctgtcacccttgcttgcaaacagtttcgcacccctcatcggatcattctgtctggctcaccgatgcaaaataacctccgagagctgtggtcgctctttgacttcatcttcccgggaaagttaggcacgttgcctgtgtttatggagcagttctccgtccccatcaccatggggggatattcaaatgcttccccagtacaggtcaaaactgcttacaagtgtgcatgtgtcttacgagataccataaatccatacctactgcggagaatgaagtcagatgtcaagatgagcctttctttgccagataaaaatgaacaggtcttattttgccgtcttacagatgagcagcataaagtctaccaaaatttcgttgattccaaagaagtttacaggattctcaatggagagatgcagattttctccggacttatagccctaagaaaaatttgcaaccaccctgatctcttttctggaggtcccaagaatctcaaaggtcttcctgatgatgaactagaagaagatcagtttgggtactggaaacgttctgggaaaatgattgttgttgagtctttgttgaaaatatggcacaagcagggtcagcgagtattgctgttttctcagtcaaggcagatgctggacatacttgaagtattccttagagcccaaaagtatacctatctcaagatggatggtaccactacaatagcttcaagacagccactgattacgagatacaatgaggacacatccatatttgtgtttcttctgaccacgcgggtgggcggcttaggtgtcaacctgacgggggcaaacagagttgtcatctatgacccagactggaacccaagcacggacacgcaggcccgggagcgagcatggagaataggccagaagaagcaagtgactgtgtacaggctcctgactgcgggcaccattgaagaaaagatctaccaccgacaaatcttcaagcagtttttgacaaatagagtgctaaaagacccaaaacaaaggcggtttttcaaatccaatgatctctatgagctatttactctgactagtcctgatgcatcccagagcactgaaacaagtgcaatttttgcaggaactggatcagatgttcagacacccaaatgccatctaaaaagaaggattcaaccagcctttggagcagaccatgatgttccaaaacgcaagaagttccctgcttctaacatatctgtaaatgatgccacatcatctgaagagaaatctgaggctaaaggagctgaagtaaatgcagtaacttctaatcgaagtgatcctttgaaagatgaccctcacatgagtagtaatgtaactagcaatgataggcttggagaagagacaaatgcagtatctggaccagaagagttgtcagtgattagtggaaatggggaatgttcaaattcttcaggaacaggcaaaacttctatgccatctggtgatgaaagcattgatgaaaagttaggtctttcttacaaaagagaaagacccagccaggctcaaacagaagctttttgggagaataaacaaatggaaaataatttttataagcacaagtcaaaaacaaaacatcatagtgtggcagaagaagagaccctggagaaacatctgagaccaaagcaaaagcctaagaactctaagcattgcagagacgccaagtttgaaggaactcgaattccacacctggtgaagaaaaggcgttaccagaagcaagacagtgaaaacaagagtgaggccaaggaacagagcaatgacgattatgttttggaaaagcttttcaaaaaatcagttggcgtgcacagtgtcatgaagcacgatgccatcatggatggagccagcccagattatgtactggtggaggcagaagccaaccgagtggcccaggatgccctgaaagcactgaggctctctcgtcagcggtgtctgggagcagtgtctggtgttcccacctggactggccacagggggatttctggtgcaccagcaggaaaaaagagtagatttggtaagaaaaggaattctaacttctctgtgcagcatccttcatcaacatctccaacagagaagtgccaggatggcatcatgaaaaaggagggaaaagataatgtccctgagcattttagtggaagagcagaagatgcagactcttcatccgggcccctcgcttcctcctcactcttggctaaaatgagagctagaaaccacctgattctgccagagcgtttagaaagtgaaagcgggcacctgcaggaagcttctgccctgctgcccaccacagaacacgatgaccttctggtggagatgagaaacttcatcgctttccaggcccacactgatggccaggccagcaccagggagatactgcaggagtttgaatccaagttatctgcatcacagtcttgtgtcttccgagaactattgagaaatctgtgcactttccatagaacttctggtggtgaaggaatttggaaactcaagccagaatactgctaaacaacattgcttcctaaactttcaagtccctttttctaacgggcatttctgattattaatttattattaataatcatgtttgtcaatggaagttggctgcacttgatgtttgtttgcatgatgtctacctcagaattaaaactttaaggaagaagaaactcttctctgaaagttaaaagttttaataatgctagctaaaggagaaaatacttggattgatttttttttttttggcaatctaattatattgtaaatcaggtacctaacagttactccttggagcacatttgttcctttacccaaaagatgctgtcagggagcacagttagaagtttgcagaacagaaatctcaatatttttttttattggtgctaaaaacaggtcttacattcagtcagacctgttcaataagttcatcaatatctgataacagcattattttgatgcttaaactttaaacatttatatttaccatttgccacccacaaaggtcaggtttgttatttgttgtttgataattatattaattttcttggaaagatcctcttttcaaggtactggtaaattggtgagtatttttattagtaaagcatgaaatagtatggtaataaatgataagacatgtatttgtggaaagctgtagggtattcagtttaccctggctttcctttaagcagagggcatctttttctctcctacagtcacaaaatgtgttatcattaaaaaaaatcaaattaaagccaaaagtaggtacataaaaaccacacacatgcatgcacacaaacatcactgcagcccacagcagacccagccgttgttaccatgaagtgacaccactccaggcctctcttgtctgcaggctggcaggctgtcttctctccagttgccttcgtcttgcgcctgcctttgcattccttgcgacgggctttcttgtttctgcggtttggattccagccaaggctgtttgtatctcactactgtttatgtgtttgtggttctgtgatggtgttgctttgatcctcagtttattttcttacccatgtttttcttgtttccttctcaggatgattttatcatctcatctttgaagtgttgttttccgaaattcatcgtattcctgaaatttcttcttagctgtcttagtgcagtttgtttcttggatttgtattctctggcatgctcttttcctctctctcatttttctgtagtatgcctgccctcctaccctgctatttctttacatctctctcatgcttaacatggatagctgtgtccagatcttctgtctgctcatccatgtgactcagagaggagggttctgggcaggggggccttgccggactgcatgagaggacatgagttttgctttctctgctctaatattttgcttaagccaagaatccttttcttagagatgttctatatgattcctgtcaggattttctagttttttttggattatagcttgttcatttcttttgtttttagtttggtttatatataatgagggaagaagatgattacattatttttgtcactttgccatcattgtttagaagtcatagaaagaatttttaaataggccaataagtcttaaacttgagtacttggcttagaagaaagtcaaaactccttcctttttgactaagtggtttgtttctggggagctcttaatttctatttttataatcattagcctataaggaaattgtgtcttccttgttctcagggtgatctgctgaccttgttcactcatgaagcatttgggtatcatacttatagtgtctgaaacataaactgtattgagctagacaaggtatagcctcctcttcaagtagcaaatactatcaaaagctataatgcagtaggagcaaggtggtccttgttccagtttttgtctcagttctgctgctgatgtaccatgatcttgggaaggtggtgtctcagtgtggagatctgacacattgttaccgtgcctcctggctggagggacttggagaacaatgcagttaagtagaatggttttaacaatacagagaaatttattcatttagataaaaatctgatttttagaactttaaaagctttgtacagtgtaaatagatttaatgtatttaacatgctttatcagcacaaataaaggattttaaaattttgtcaaaaaattaaatgttaatactatcaccattaaaaatgttcaagcaatagtctgcctccccacccccacaccatcttgcacctgttccacagctaagtacagccctaggtttggtgtgtattctccatgcatttagagaatcacatgacacagactgctgctataatgtcattttcccattcttcctttactaataaaatttttgagtttta

SEQ ID NO: 253 - DNA, 2705 bp, Homo sapiens
attaacccgggaggcggcggcggggaggggagaggctctgagaggcgaggccgggtgaggcggcgagggcggcccgacgggcgcgggacgggacggggcagcgagggcgccgggagccgcggcccggaatcggggcgcttcgccccgggccccccagcatgaagaccccggcggacacagggtttgccttcccggattgggcctacaagccagagtcgtcccctggctcaaggcagatccagctgtggcactttatcctggagctgctgcggaaggaggagtaccagggcgtcattgcctggcagggggactacggggaattcgtcatcaaagaccctgatgaggtggcccggctgtggggcgttcgcaagtgcaagccccagatgaattacgacaagctgagccgggccctgcgctattactataacaagcgcattctgcacaagaccaaggggaaacggttcacctacaagttcaatttcaacaaactggtgctggtcaattacccattcattgatgtggggttggctgggggtgcagtgccccagagtgccccgccagtgccgtcgggtggtagccacttccgcttccctccctcaacgccctccgaggtgctgtcccccaccgaggacccccgctcaccaccagcctgctcttcatcttcatcttccctcttctcggctgtggtggcccgccgcctgggccgaggctcagtcagtgactgtagtgatggcacgtcagagctggaggaaccgctgggagaggatccccgcgcccgaccacccggccctccggatctgggtgccttccgagggcccccgctggcccgcctgccccatgaccctggtgtcttccgagtctatccccggcctcggggtggccctgaacccctcagccccttccctgtgtcgcctctggccggtcctggatccctgctgccccctcagctctccccggctctgcccatgacgcccacccacctggcctacactccctcgcccacgctgagcccgatgtaccccagtggtggcggggggcccagcggctcagggggaggctcccacttctccttcagccctgaggacatgaaacggtacctgcaggcccacacccaaagcgtctacaactaccacctcagcccccgcgccttcctgcactaccctgggctggtggtgccccagccccagcgccctgacaagtgcccgctgccgcccatggcacccgagaccccaccggtcccctcctcggcctcgtcatcctcttcttcttcttcctccccattcaagtttaagctccagccgcccccactcggacgccggcagcgggcagctggggagaaggccgtagccggtgctgacaagagcggtggcagtgcaggcgggctggctgagggggcaggggcgctagccccaccgcccccgccaccacagatcaaggtggagcccatctcggaaggcgagtcggaggaggtagaggtgactgacatcagtgatgaggatgaggaagacggggaggtgttcaagacgccccgtgccccacctgcaccccctaagcctgagcccggcgaggcacccggggcatcccagtgcatgcccctcaagctacgctttaagcggcgctggagtgaagactgtcgcctcgaagggggtgggggccccgctgggggctttgaggatgagggtgaggacaagaaggtgcgtggggaggggcctggggaggctggggggcccctcaccccaaggcgggtgagctctgacctccagcatgccacggcccagctctccctggagcaccgagactcctgagggctgtgggcaggggacctgtgtgccccgcaccccccatgcttcttttgctgccttaagccccctatgccctggaggtgagggcagctctcttgtctcttccctgcctcctcccttttccctccccacattttgtataaaactttaatttcttttttttaaaaatggtgggggtgggtgggtgcccagggctaggggctattccctgtctctgtgggtttctaagctctgggcaaagtggtggtagggggagggagggggaagttaagggggtcacctccattctggggaatttatatttgaattgaggctttggccttaacacccaggaacttttctattacaatcgcttaggaagtaaagccttgtctccctccctgttctctgcctcttgtacccctctgacccacccgctctgccccactcccagccctcctcagccccagccctgcctgccctgcccctccagggggccatgagtgcctaggtttctcataccccacaaggtcacagcaggggagggagggacaattttataatgaaccaaaaattccatgtgttggggggtggggggcggaggagggtgaggggtgccgcccatgggccacaaatctctacaagtgcctgctatccctctcccactccccaccccagcaccggtccaaccccttcatccccagctgctcctaggactggcccatgggcaggcgggtggggggatgggaagggggtgccctgaaaccaaactggaagccccctctgcctcccagctggggcctctggggtggggtggggggctgtggtcaagccttattctgtattggggactgagggtggggggagtagaggggccgctggagaatgtattcaaaacaataaaactttggacctttggatgca

SEQ ID NO: 254 - DNA, 5042 bp, Homo sapiens
gttttcacttggtcggaatggggagagtgtgcaagagatcgctgcgggacaggttcctagagatcgctccgggacggtcgtgacggcccccgagggacatgagagaagaggagcggcgctcaggttattccaggatctttggagacccgaggaaagccgtgttgaccaaaagcaagacaaatgactcacagagaaaaaagatggcagaaccaagggcaactaaagccgtcaggttctgaacagctggtagatgggctggcttactgaaggacatgattcagactgtcccggacccagcagctcatatcaaggaagccttatcagttgtgagtgaggaccagtcgttgtttgagtgtgcctacggaacgccacacctggctaagacagagatgaccgcgtcctcctccagcgactatggacagacttccaagatgagcccacgcgtccctcagcaggattggctgtctcaacccccagccagggtcaccatcaaaatggaatgtaaccctagccaggtgaatggctcaaggaactctcctgatgaatgcagtgtggccaaaggcgggaagatggtgggcagcccagacaccgttgggatgaactacggcagctacatggaggagaagcacatgccacccccaaacatgaccacgaacgagcgcagagttatcgtgccagcagatcctacgctatggagtacagaccatgtgcggcagtggctggagtgggcggtgaaagaatatggccttccagacgtcaacatcttgttattccagaacatcgatgggaaggaactgtgcaagatgaccaaggacgacttccagaggctcacccccagctacaacgccgacatccttctctcacatctccactacctcagagagactcctcttccacatttgacttcagatgatgttgataaagccttacaaaactctccacggttaatgcatgctagaaacacagatttaccatatgagccccccaggagatcagcctggaccggtcacggccaccccacgccccagtcgaaagctgctcaaccatctccttccacagtgcccaaaactgaagaccagcgtcctcagttagatccttatcagattcttggaccaacaagtagccgccttgcaaatccaggcagtggccagatccagctttggcagttcctcctggagctcctgtcggacagctccaactccagctgcatcacctgggaaggcaccaacggggagttcaagatgacggatcccgacgaggtggcccggcgctggggagagcggaagagcaaacccaacatgaactacgataagctcagccgcgccctccgttactactatgacaagaacatcatgaccaaggtccatgggaagcgctacgcctacaagttcgacttccacgggatcgcccaggccctccagccccaccccccggagtcatctctgtacaagtacccctcagacctcccgtacatgggctcctatcacgcccacccacagaagatgaactttgtggcgccccaccctccagccctccccgtgacatcttccagtttttttgctgccccaaacccatactggaattcaccaactgggggtatataccccaacactaggctccccaccagccatatgccttctcatctgggcacttactactaaagacctggcggaggcttttcccatcagcgtgcattcaccagcccatcgccacaaactctatcggagaacatgaatcaaaagtgcctcaagaggaatgaaaaaagctttactggggctggggaaggaagccggggaagagatccaaagactcttgggagggagttactgaagtcttactacagaaatgaggaggatgctaaaaatgtcacgaatatggacatatcatctgtggactgaccttgtaaaagacagtgtatgtagaagcatgaagtcttaaggacaaagtgccaaagaaagtggtcttaagaaatgtataaactttagagtagagtttggaatcccactaatgcaaactgggatgaaactaaagcaatagaaacaacacagttttgacctaacataccgtttataatgccattttaaggaaaactacctgtatttaaaaatagaaacatatcaaaaacaagagaaaagacacgagagagactgtggcccatcaacagacgttgatatgcaactgcatggcatgtgctgttttggttgaaatcaaatacattccgtttgatggacagctgtcagctttctcaaactgtgaagatgacccaaagtttccaactcctttacagtattaccgggactatgaactaaaaggtgggactgaggatgtgtatagagtgagcgtgtgattgtagacagaggggtgaagaaggaggaggaagaggcagagaaggaggagaccagggctgggaaagaaacttctcaagcaatgaagactggactcaggacatttggggactgtgtacaatgagttatggagactcgagggttcatgcagtcagtgttataccaaacccagtgttaggagaaaggacacagcgtaatggagaaaggggaagtagtagaattcagaaacaaaaatgcgcatctctttctttgtttgtcaaatgaaaattttaactggaattgtctgatatttaagagaaacattcaggacctcatcattatgtgggggctttgttctccacagggtcaggtaagagatggccttcttggctgccacaatcagaaatcacgcaggcattttgggtaggcggcctccagttttcctttgagtcgcgaacgctgtgcgtttgtcagaatgaagtatacaagtcaatgtttttccccctttttatataataattatataacttatgcatttatacactacgagttgatctcggccagccaaagacacacgacaaaagagacaatcgatataatgtggccttgaattttaactctgtatgcttaatgtttacaatatgaagttattagttcttagaatgcagaatgtatgtaataaaataagcttggcctagcatggcaaatcagatttatacaggagtctgcatttgcactttttttagtgactaaagttgcttaatgaaaacatgtgctgaatgttgtggattttgtgttataatttactttgtccaggaacttgtgcaagggagagccaaggaaataggatgtttggcacccaaatggcgtcagcctctccaggtccttcttgcctcccctcctgtcttttatttctagccccttttggaacagaaggaccccgggtttcacattggagcctccatatttatgcctggaatggaaagaggcctatgaagctggggttgtcattgagaaattctagttcagcacctggtcacaaatcacccttaattcctgctatgattaaaatacatttgttgaacagtgaacaagctaccactcgtaaggcaaactgtattattactggcaaataaagcgtcatggatagctgcaatttctcactttacagaaacaagggataacgtctagatttgctgcggggtttctctttcaggagctctcactaggtagacagctttagtcctgctacatcagagttacctgggcactgtggcttgggattcactagccctgagcctgatgttgctggctatcccttgaagacaatgtttatttccataatctagagtcagtttccctgggcatcttttctttgaatcacaaatgctgccaaccttggtccaggtgaaggcaactcaaaaggtgaaaatacaaggtgaccgtgcgaaggcgctagccgaaacatcttagctgaataggtttctgaactggcccttttcatagctgtttcagggcctgtttttttcacgttgcagtccttttgctatgattatgtgaagttgccaaacctctgtgctgtggatgttttggcagtgggctttgaagtcggcaggacacgattaccaatgctcctgacaccccgtgtcatttggattagacggagcccaaccatccatcattttgcagcagcctgggaaggcccacaaagtgcccgtatctccttagggaaaataaataaatacaatcatgaaagctggcagttaggctgacccaaactgtgctaatggaaaagatcagtcatttttattttggaatgcaaagtcaagacacacctacattcttcatagaaatacacatttacttggataatcactcagttctctcttcaagactgtctcatgagcaagatcataaaaacaagacatgattatcatattcaattttaacagatgttttccattagatccctcaaccctccacccccagtccaggttattagcaagtcttatgagcaactgggataattttggataacatgataatactgagttccttcaaatacataattcttaaattgtttcaaaatggcattaactctctgttactgttgtaatctaattccaaagccccctccaggtcatattcataattgcatgaaccttttctctctgtttgtccctgtctcttggcttgccctgatgtatactcagactcctgtacaatcttactcctgctggcaagagatttgtcttcttttcttgtcttcaattggctttcgggccttgtatgtggtaaaatcaccaaatcacagtcaagactgtgtttttgttcctagtttgatgcccttatgtcccggaggggttcacaaagtgctttgtcaggactgctgcagttagaaggctcactgcttctcctaagccttctgcacagatgtggcacctgcaacccaggagcaggagccggaggagctgccctctgacagcaggtgcagcagagatggctacagctcaggagctgggaaggtgatggggcacagggaaagcacagatgttctgcagcgccccaaagtgacccattgcctggagaaagagaagaaaatattttttaaaaagctagtttatttagcttctcattaattcattcaaataaagtcgtgaggtgactaattagagaataaaaattactttggactactcaaaaatacaccaaaaaaaa

SEQ ID NO: 255 - DNA, 6330 bp, Homo sapiens
aggagctggcggagggcgttcgtcctgggactgcacttgctcccgtcgggtcgcccggcttcaccggacccgcaggctcccggggcagggccggggccagagctcgcgtgtcggcgggacatgcgctgcgtcgcctctaacctcgggctgtgctctttttccaggtggcccgccggtttctgagccttctgccctgcggggacacggtctgcaccctgcccgcggccacggaccatgaccatgaccctccacaccaaagcatctgggatggccctactgcatcagatccaagggaacgagctggagcccctgaaccgtccgcagctcaagatccccctggagcggcccctgggcgaggtgtacctggacagcagcaagcccgccgtgtacaactaccccgagggcgccgcctacgagttcaacgccgcggccgccgccaacgcgcaggtctacggtcagaccggcctcccctacggccccgggtctgaggctgcggcgttcggctccaacggcctggggggtttccccccactcaacagcgtgtctccgagcccgctgatgctactgcacccgccgccgcagctgtcgcctttcctgcagccccacggccagcaggtgccctactacctggagaacgagcccagcggctacacggtgcgcgaggccggcccgccggcattctacaggccaaattcagataatcgacgccagggtggcagagaaagattggccagtaccaatgacaagggaagtatggctatggaatctgccaaggagactcgctactgtgcagtgtgcaatgactatgcttcaggctaccattatggagtctggtcctgtgagggctgcaaggccttcttcaagagaagtattcaaggacataacgactatatgtgtccagccaccaaccagtgcaccattgataaaaacaggaggaagagctgccaggcctgccggctccgcaaatgctacgaagtgggaatgatgaaaggtgggatacgaaaagaccgaagaggagggagaatgttgaaacacaagcgccagagagatgatggggagggcaggggtgaagtggggtctgctggagacatgagagctgccaacctttggccaagcccgctcatgatcaaacgctctaagaagaacagcctggccttgtccctgacggccgaccagatggtcagtgccttgttggatgctgagccccccatactctattccgagtatgatcctaccagacccttcagtgaagcttcgatgatgggcttactgaccaacctggcagacagggagctggttcacatgatcaactgggcgaagagggtgccaggctttgtggatttgaccctccatgatcaggtccaccttctagaatgtgcctggctagagatcctgatgattggtctcgtctggcgctccatggagcacccagggaagctactgtttgctcctaacttgctcttggacaggaaccagggaaaatgtgtagagggcatggtggagatcttcgacatgctgctggctacatcatctcggttccgcatgatgaatctgcagggagaggagtttgtgtgcctcaaatctattattttgcttaattctggagtgtacacatttctgtccagcaccctgaagtctctggaagagaaggaccatatccaccgagtcctggacaagatcacagacactttgatccacctgatggccaaggcaggcctgaccctgcagcagcagcaccagcggctggcccagctcctcctcatcctctcccacatcaggcacatgagtaacaaaggcatggagcatctgtacagcatgaagtgcaagaacgtggtgcccctctatgacctgctgctggagatgctggacgcccaccgcctacatgcgcccactagccgtggaggggcatccgtggaggagacggaccaaagccacttggccactgcgggctctacttcatcgcattccttgcaaaagtattacatcacgggggaggcagagggtttccctgccacggtctgagagctccctggctcccacacggttcagataatccctgctgcattttaccctcatcatgcaccactttagccaaattctgtctcctgcatacactccggcatgcatccaacaccaatggctttctagatgagtggccattcatttgcttgctcagttcttagtggcacatcttctgtcttctgttgggaacagccaaagggattccaaggctaaatctttgtaacagctctctttcccccttgctatgttactaagcgtgaggattcccgtagctcttcacagctgaactcagtctatgggttggggctcagataactctgtgcatttaagctacttgtagagacccaggcctggagagtagacattttgcctctgataagcactttttaaatggctctaagaataagccacagcaaagaatttaaagtggctcctttaattggtgacttggagaaagctaggtcaagggtttattatagcaccctcttgtattcctatggcaatgcatccttttatgaaagtggtacaccttaaagcttttatatgactgtagcagagtatctggtgattgtcaattcattccccctataggaatacaaggggcacacagggaaggcagatcccctagttggcaagactattttaacttgatacactgcagattcagatgtgctgaaagctctgcctctggctttccggtcatgggttccagttaattcatgcctcccatggacctatggagagcagcaagttgatcttagttaagtctccctatatgagggataagttcctgatttttgtttttatttttgtgttacaaaagaaagccctccctccctgaacttgcagtaaggtcagcttcaggacctgttccagtgggcactgtacttggatcttcccggcgtgtgtgtgccttacacaggggtgaactgttcactgtggtgatgcatgatgagggtaaatggtagttgaaaggagcaggggccctggtgttgcatttagccctggggcatggagctgaacagtacttgtgcaggattgttgtggctactagagaacaagagggaaagtagggcagaaactggatacagttctgaggcacagccagacttgctcagggtggccctgccacaggctgcagctacctaggaacattccttgcagaccccgcattgccctttgggggtgccctgggatccctggggtagtccagctcttcttcatttcccagcgtggccctggttggaagaagcagctgtcacagctgctgtagacagctgtgttcctacaattggcccagcaccctggggcacgggagaagggtggggaccgttgctgtcactactcaggctgactggggcctggtcagattacgtatgcccttggtggtttagagataatccaaaatcagggtttggtttggggaagaaaatcctcccccttcctcccccgccccgttccctaccgcctccactcctgccagctcatttccttcaatttcctttgacctataggctaaaaaagaaaggctcattccagccacagggcagccttccctgggcctttgcttctctagcacaattatgggttacttcctttttcttaacaaaaaagaatgtttgatttcctctgggtgaccttattgtctgtaattgaaaccctattgagaggtgatgtctgtgttagccaatgacccaggtgagctgctcgggcttctcttggtatgtcttgtttggaaaagtggatttcattcatttctgattgtccagttaagtgatcaccaaaggactgagaatctgggagggcaaaaaaaaaaaaaaagtttttatgtgcacttaaatttggggacaattttatgtatctgtgttaaggatatgtttaagaacataattcttttgttgctgtttgtttaagaagcaccttagtttgtttaagaagcaccttatatagtataatatatatttttttgaaattacattgcttgtttatcagacaattgaatgtagtaattctgttctggatttaatttgactgggttaacatgcaaaaaccaaggaaaaatatttagtttttttttttttttttgtatacttttcaagctaccttgtcatgtatacagtcatttatgcctaaagcctggtgattattcatttaaatgaagatcacatttcatatcaacttttgtatccacagtagacaaaatagcactaatccagatgcctattgttggatactgaatgacagacaatcttatgtagcaaagattatgcctgaaaaggaaaattattcagggcagctaattttgcttttaccaaaatatcagtagtaatatttttggacagtagctaatgggtcagtgggttctttttaatgtttatacttagattttcttttaaaaaaattaaaataaaacaaaaaaaaatttctaggactagacgatgtaataccagctaaagccaaacaattatacagtggaaggttttacattattcatccaatgtgtttctattcatgttaagatactactacatttgaagtgggcagagaacatcagatgattgaaatgttcgcccaggggtctccagcaactttggaaatctctttgtatttttacttgaagtgccactaatggacagcagatattttctggctgatgttggtattgggtgtaggaacatgatttaaaaaaaaactcttgcctctgctttcccccactctgaggcaagttaaaatgtaaaagatgtgatttatctggggggctcaggtatggtggggaagtggattcaggaatctggggaatggcaaatatattaagaagagtattgaaagtatttggaggaaaatggttaattctgggtgtgcaccagggttcagtagagtccacttctgccctggagaccacaaatcaactagctccatttacagccatttctaaaatggcagcttcagttctagagaagaaagaacaacatcagcagtaaagtccatggaatagctagtggtctgtgtttcttttcgccattgcctagcttgccgtaatgattctataatgccatcatgcagcaattatgagaggctaggtcatccaaagagaagaccctatcaatgtaggttgcaaaatctaacccctaaggaagtgcagtctttgatttgatttccctagtaaccttgcagatatgtttaaccaagccatagcccatgccttttgagggctgaacaaataagggacttactgataatttacttttgatcacattaaggtgttctcaccttgaaatcttatacactgaaatggccattgatttaggccactggcttagagtactccttcccctgcatgacactgattacaaatactttcctattcatactttccaattatgagatggactgtgggtactgggagtgatcactaacaccatagtaatgtctaatattcacaggcagatctgcttggggaagctagttatgtgaaaggcaaatagagtcatacagtagctcaaaaggcaaccataattctctttggtgcaggtcttgggagcgtgatctagattacactgcaccattcccaagttaatcccctgaaaacttactctcaactggagcaaatgaactttggtcccaaatatccatcttttcagtagcgttaattatgctctgtttccaactgcatttcctttccaattgaattaaagtgtggcctcgtttttagtcatttaaaattgttttctaagtaattgctgcctctattatggcacttcaattttgcactgtcttttgagattcaagaaaaatttctattcttttttttgcatccaattgtgcctgaacttttaaaatatgtaaatgctgccatgttccaaacccatcgtcagtgtgtgtgtttagagctgtgcaccctagaaacaacatattgtcccatgagcaggtgcctgagacacagacccctttgcattcacagagaggtcattggttatagagacttgaattaataagtgacattatgccagtttctgttctctcacaggtgataaacaatgctttttgtgcactacatactcttcagtgtagagctcttgttttatgggaaaaggctcaaatgccaaattgtgtttgatggattaatatgcccttttgccgatgcatactattactgatgtgactcggttttgtcgcagctttgctttgtttaatgaaacacacttgtaaacctcttttgcactttgaaaaagaatccagcgggatgctcgagcacctgtaaacaattttctcaacctatttgatgttcaaataaagaattaaactaaa

SEQ ID NO: 256 - DNA, 2169 bp, Homo sapiens
ctcggtctttaaaaggaagaaggggcttatcgttaagtcgcttgtgatcttttcagtttctccagctgctggctttttggacacccactcccccgccaggaggcagttgcaagcgcggaggctgcgagaaataactgcctcttgaaacttgcagggcgaagagcaggcggcgagcgctgggccggggagggaccacccgagctgcgacgggctctggggctgcggggcagggctggcgcccggagcctgagctgcaggaggtgcgctcgctttcctcaacaggtggcggcggggcgcgcgccgggagaccccccctaatgcgggaaaagcacgtgtccgcattttagagaaggcaaggccggtgtgtttatctgcaagccattatacttgcccacgaatctttgagaacattataatgacctttgtgcctcttcttgcaaggtgttttctcagctgttatctcaagacatggatataaaaaactcaccatctagccttaattctccttcctcctacaactgcagtcaatccatcttacccctggagcacggctccatatacataccttcctcctatgtagacagccaccatgaatatccagccatgacattctatagccctgctgtgatgaattacagcattcccagcaatgtcactaacttggaaggtgggcctggtcggcagaccacaagcccaaatgtgttgtggccaacacctgggcacctttctcctttagtggtccatcgccagttatcacatctgtatgcggaacctcaaaagagtccctggtgtgaagcaagatcgctagaacacaccttacctgtaaacagagagacactgaaaaggaaggttagtgggaaccgttgcgccagccctgttactggtccaggttcaaagagggatgctcacttctgcgctgtctgcagcgattacgcatcgggatatcactatggagtctggtcgtgtgaaggatgtaaggccttttttaaaagaagcattcaaggacataatgattatatttgtccagctacaaatcagtgtacaatcgataaaaaccggcgcaagagctgccaggcctgccgacttcggaagtgttacgaagtgggaatggtgaagtgtggctcccggagagagagatgtgggtaccgccttgtgcggagacagagaagtgccgacgagcagctgcactgtgccggcaaggccaagagaagtggcggccacgcgccccgagtgcgggagctgctgctggacgccctgagccccgagcagctagtgctcaccctcctggaggctgagccgccccatgtgctgatcagccgccccagtgcgcccttcaccgaggcctccatgatgatgtccctgaccaagttggccgacaaggagttggtacacatgatcagctgggccaagaagattcccggctttgtggagctcagcctgttcgaccaagtgcggctcttggagagctgttggatggaggtgttaatgatggggctgatgtggcgctcaattgaccaccccggcaagctcatctttgctccagatcttgttctggacagggatgaggggaaatgcgtagaaggaattctggaaatctttgacatgctcctggcaactacttcaaggtttcgagagttaaaactccaacacaaagaatatctctgtgtcaaggccatgatcctgctcaattccagtatgtaccctctggtcacagcgacccaggatgctgacagcagccggaagctggctcacttgctgaacgccgtgaccgatgctttggtttgggtgattgccaagagcggcatctcctcccagcagcaatccatgcgcctggctaacctcctgatgctcctgtcccacgtcaggcatgcgagtaacaagggcatggaacatctgctcaacatgaagtgcaaaaatgtggtcccagtgtatgacctgctgctggagatgctgaatgcccacgtgcttcgcgggtgcaagtcctccatcacggggtccgagtgcagcccggcagaggacagtaaaagcaaagagggctcccagaacccacagtctcagtgacgcctggccctgaggtgaactggcccacagaggtcacaggctgaagcgtgaactccagtgtgtcaggagcctgggcttcatctttctgctgtgtggtccctcatttgg

SEQ ID NO: 257 - DNA, 2221 bp, Homo sapiens
tcctacaagcagccggcggcgccgccgagtgaggggacgcggcgcggtggggcggcgcggcccgaggaggcggcggaggaggggccgcccgcggcccccggctcactccggcactccgggccgctcggcccccatgcctgcccgaccgcgctgccggagccccaggtgaccagcgccatgtccagccaggtggtgggcattgagcctctctacatcaaggcagagccggccagccctgacagtccaaagggttcctcggagacagagaccgagcctcctgtggccctggcccctggtccagctcccactcgctgcctcccaggccacaaggaagaggaggatggggagggggctgggcctggcgagcagggcggtgggaagctggtgctcagctccctgcccaagcgcctctgcctggtctgtggggacgtggcctccggctaccactatggtgtggcatcctgtgaggcctgcaaagccttcttcaagaggaccatccaggggagcatcgagtacagctgtccggcctccaacgagtgtgagatcaccaagcggagacgcaaggcctgccaggcctgccgcttcaccaagtgcctgcgggtgggcatgctcaaggagggagtgcgcctggaccgcgtccggggtgggcggcagaagtacaagcggcggccggaggtggacccactgcccttcccgggccccttccctgctgggcccctggcagtcgctggaggcccccggaagacagcagccccagtgaatgcactggtgtctcatctgctggtggttgagcctgagaagctctatgccatgcctgaccccgcaggccctgatgggcacctcccagccgtggctaccctctgtgacctctttgaccgagagattgtggtcaccatcagctgggccaagagcatcccaggcttctcatcgctgtcgctgtctgaccagatgtcagtactgcagagcgtgtggatggaggtgctggtgctgggtgtggcccagcgctcactgccactgcaggatgagctggccttcgctgaggacttagtcctggatgaagagggggcacgggcagctggcctgggggaactgggggctgccctgctgcaactagtgcggcggctgcaggccctgcggctggagcgagaggagtatgttctactaaaggccttggcccttgccaattcagactctgtgcacatcgaagatgccgaggctgtggagcagctgcgagaagctctgcacgaggccctgctggagtatgaagccggccgggctggccccggagggggtgctgagcggcggcgggcgggcaggctgctgctcacgctaccgctcctccgccagacagcgggcaaagtgctggcccatttctatggggtgaagctggagggcaaggtgcccatgcacaagctgttcttggagatgctcgaggccatgatggactgaggcaaggggtgggactggtgggggttctggcaggacctgcctagcatggggtcagccccaagggctggggcggagctggggtctgggcagtgccacagcctgctggcagggccagggcaatgccatcagcccctgggaacaggccccacgccctctcctccccctcctagggggtgtcagaagctgggaacgtgtgtccaggctctgggcacagtgctgccccttgcaagccataacgtgcccccagagtgtagggggccttgcggaagccatagggggctgcacgggatgcgtgggaggcagaaacctatctcagggagggaaggggatggaggccagagtctcccagtgggtgatgcttttgctgctgcttaatcctaccccctcttcaaagcagagtgggacttggagagcaaaggcccatgcccccttcgctcctcctctcatcatttgcattgggcattagtgtccccccttgaagcaataactccaagcagactccagcccctggacccctggggtggccagggcttccccatcagctcccaacgagcctcctcagggggtaggagagcactgcctctatgccctgcagagcaataacactatatttatttttgggtttggccagggaggcgcagggacatggggcaagccagggcccagagcccttggctgtacagagactctattttaatgtatatttgctgcaaagagaaaccgcttttggttttaaacctttaatgagaaaaaaatatataataccgagctc

SEQ ID NO: 258 - DNA, 3029 bp, Homo sapiens
ccgcagagaggtgtggtcagggacatttcccctggccgggagcccatggagcactgtcctcagagatgcgcaggttaggctcactgtctaggccaggcccaccttagtcactgtggactggcaatggaagctcttcctggacacacctgccctagccctcaccctggggtggaagagaaatgagcttggcttgcaactcagaccattccacggaggcatcctccccttcctgggctggtgaataaaagtttcctgaggtcaaggacttccttttccctgccaaaatggtgtccagaactttgaggccagaggtgatccagtgatttgggagctgcaggtcacacaggctgctcagagggctgctgaacaggatgtcctcggacgacaggcacctgggctccagctgcggctccttcatcaagactgagccgtccagcccgtcctcgggcatcgatgccctcagccaccacagccccagtggctcgtccgacgccagcggcggctttggcctggccctgggcacccacgccaacggtctggactcgccacccatgtttgcaggcgccgggctgggaggcaccccatgccgcaagagctacgaggactgtgccagcggcatcatggaggactcggccatcaagtgcgagtacatgctcaacgccatccccaagcgcctgtgcctcgtgtgcggggacattgcctctggctaccactacggcgtggcctcctgcgaggcttgcaaggccttcttcaagaggactatccaagggaacattgagtacagctgcccggccaccaacgagtgcgagatcaccaaacggaggcgcaagtcctgccaggcctgccgcttcatgaaatgcctcaaagtggggatgctgaaggaaggtgtgcgccttgatcgagtgcgtggaggccgtcagaaatacaagcgacggctggactcagagagcagcccatacctgagcttacaaatttctccacctgctaaaaagccattgaccaagattgtctcatacctactggtggctgagccggacaagctctatgccatgcctccccctggtatgcctgagggggacatcaaggccctgaccactctctgtgacctggcagaccgagagcttgtggtcatcattggctgggccaagcacatcccaggcttctcaagcctctccctgggggaccagatgagcctgctgcagagtgcctggatggaaatcctcatcctgggcatcgtgtaccgctcgctgccctatgacgacaagctggtgtacgctgaggactacatcatggatgaggagcactcccgcctcgcggggctgctggagctctaccgggccatcctgcagctggtacgcaggtacaagaagctcaaggtggagaaggaggagtttgtgacgctcaaggccctggccctcgccaactccgattccatgtacatcgaggatctagaggctgtccagaagctgcaggacctgctgcacgaggcactgcaggactacgagctgagccagcgccatgaggagccctggaggacgggcaagctgctgctgacactgccgctgctgcggcagacggccgccaaggccgtgcagcacttctatagcgtcaaactgcagggcaaagtgcccatgcacaaactcttcctggagatgctggaggccaaggttggccaagagcagcttagaggatctcccaaggatgaaagaatgtcaagccatgatggaaaatgccccttccaatcagctgccttcacaagcagggatcagagcaactccccggggatccccaatccacgcccttctagtccaacccccctcaatgagagaggcaggcagatctcacccagcactaggacaccaggaggccagggaaagcatctctggctcaccatgtaacatctggcttggagcaagtgggtgttctgcacaccaggcagctgcacctcactggatctagtgttgctgcgagtgacctcacttcagagcccctctagcagagtggggcggaagtcctgatggttggtgtccatgaggtggaagctgcttttatacttaaaactcagatcacaacaggaaatgtgtcagtaacaatggaactccatccaatgggaaagttcctggtactgaaggggtccattggacactcagaaaagaagttcaggggccaacttcttagctggaatcctggccagatgaggaccctctccggggaagggagaggactgacttagtggaaggtggtgaagtgaggagagtttaggggaaccttcccccagtggaacagatctcaagtttaccctaaacctgccatttctggaaaatctgtaaagaggaaacagcctgtctcagctgtactctcatgatacaggtcatttgaaatgaaccaagaaataaaacatgaaaatccaaccatggagaaggtggtatggctgggttttgtttggtccccttgtccttatacgttctaaagtttccagactggctttgtcactttgtgaactcgtcatgtgtgaaaaccaatctttgcatatagggaacttcctcgggccacactttaagaaccaagtaagaggctctcaagactccagcagagtcgggaggccatggcagcgccttagaggagctggaacctgcacccacctgtgtcggtggggggggcctcctttccccatagactctgccctccctctgtgcagatggaagtggcaggggagggtgaccagcttgtgacaagaagactgaagggtccagagtccatgctcacggaacagcaccaaagaaaagcactatgtggaaagattgttttattttctaataatgataatatggctggaatggcttcttaagatgtatatattttttaaaatggcagttccccattgcagcatcacctacttgtatgtctttctgcctctgtatatgttctcccagaaacccccatgtaaatcaaatgccctaggatgcttccatcctggtcccatgtatctggaatctaataaataaggaaaggaaaaaaaaaaaaaaaaa

SEQ ID NO: 259 - DNA, 5253 bp, Homo sapiens
aatcggggctttaagtccttgattaggagagtgtgagagctttggtcccaactggctgtgcctataggcttgtcactaggagaacatttgtgttaattgcactgtgctctgtcaaggaaactttgatttatagctggggtgcacaaataatggttgccggtcgcacatggattcggtagaactttgccttcctgaatctttttccctgcactacgaggaagagcttctctgcagaatgtcaaacaaagatcgacacattgattccagctgttcgtccttcatcaagacggaaccttccagcccagcctccctgacggacagcgtcaaccaccacagccctggtggctcttcagacgccagtgggagctacagttcaaccatgaatggccatcagaacggacttgactcgccacctctctacccttctgctcctatcctgggaggtagtgggcctgtcaggaaactgtatgatgactgctccagcaccattgttgaagatccccagaccaagtgtgaatacatgctcaactcgatgcccaagagactgtgtttagtgtgtggtgacatcgcttctgggtaccactatggggtagcatcatgtgaagcctgcaaggcattcttcaagaggacaattcaaggcaatatagaatacagctgccctgccacgaatgaatgtgaaatcacaaagcgcagacgtaaatcctgccaggcttgccgcttcatgaagtgtttaaaagtgggcatgctgaaagaaggggtgcgtcttgacagagtacgtggaggtcggcagaagtacaagcgcaggatagatgcggagaacagcccatacctgaaccctcagctggttcagccagccaaaaagccatataacaagattgtctcacatttgttggtggctgaaccggagaagatctatgccatgcctgaccctactgtccccgacagtgacatcaaagccctcactacactgtgtgacttggccgaccgagagttggtggttatcattggatgggcgaagcatattccaggcttctccacgctgtccctggcggaccagatgagccttctgcagagtgcttggatggaaattttgatccttggtgtcgtataccggtctctttcgtttgaggatgaacttgtctatgcagacgattatataatggacgaagaccagtccaaattagcaggccttcttgatctaaataatgctatcctgcagctggtaaagaaatacaagagcatgaagctggaaaaagaagaatttgtcaccctcaaagctatagctcttgctaattcagactccatgcacatagaagatgttgaagccgttcagaagcttcaggatgtcttacatgaagcgctgcaggattatgaagctggccagcacatggaagaccctcgtcgagctggcaagatgctgatgacactgccactcctgaggcagacctctaccaaggccgtgcagcatttctacaacatcaaactagaaggcaaagtcccaatgcacaaactttttttggaaatgttggaggccaaggtctgactaaaagctccctgggccttcccatccttcatgttgaaaaagggaaaataaacccaagagtgatgtcgaagaaacttagagtttagttaacaacatcaaaaatcaacagactgcactgataatttagcagcaagactatgaagcagctttcagattcctccataggttcctgatgagtttctttctactttctccatcatcttctttcctctttcttcccacatttctctttctctttattttttctccttttcttctttcacctcccttatttctttgcttctttcattcctagttcccattctcctttattttcttcccgtctgcctgccttctttcttttctttacctactctcattcctctcttttctcatccttccccttttttctaaatttgaaatagctttagtttaaaaaaaaatcctcccttccccctttcctttccctttctttcctttttccctttccttttccctttcctttcctttcctcttgaccttctttccatctttctttttcttccttctgctgctgaacttttaaaagaggtctctaactgaagagagatggaagccagccctgccaaaggatggagatccataatatggatgccagtgaacttattgtgaaccatactgtccccaatgactaaggaatcaaagagagagaaccaacgttcctaaaagtacagtgcaacatatacaaattgactgagtgcagtattagatttcatgggagcagcctctaattagacaacttaagcaacgttgcatcggctgcttcttatcattgcttttccatctagatcagttacagccatttgattccttaattgttttttcaagtcttccaggtatttgttagtttagctactatgtaactttttcagggaatagtttaagctttattcattcatgcaatactaaagagaaataagaatactgcaattttgtgctggctttgaacaattacgaacaataatgaaggacaaatgaatcctgaaggaagatttttaaaaatgttttgtttcttcttacaaatggagatttttttgtaccagctttaccacttttcagccatttattaatatgggaatttaacttactcaagcaatagttgaagggaaggtgcatattatcacggatgcaatttatgttgtgtgccagtctggtcccaaacatcaatttcttaacatgagctccagtttacctaaatgttcactgacacaaaggatgagattacacctacagtgactctgagtagtcacatatataagcactgcacatgagatatagatccgtagaattgtcaggagtgcacctctctacttgggaggtacaattgccatatgatttctagctgccatggtggttaggaatgtgatactgcctgtttgcaaagtcacagaccttgcctcagaaggagctgtgagccagtattcatttaagaggcaataaggcaaatgccagaattaaaaaaaaaaatcatcaaagacagaaaatgcctgaccaaattctaaaacctaatccatataagtttattcatttaggaatgttcgtttaaattaatctgcagtttttaccaagagctaagccaatatatgtgcttttcaaccagtattgtcacagcatgaaagtcaagtcaggttccagactgttaagaggtgtaatctaatgaagaaatcaattagatgccccgaaatctacagtcgctgaataaccaataaacagtaacctccatcaaatgctataccaatggaccagtgttagtagctgctccctgtattatgtgaacagtcttattctatgtacacagatgtaattaaaattgtaatcctaacaaacaaaagaaatgtagttcagcttttcaatgtttcatgtttgctgtgcttttctgaattttatgttgcattcaaagactgttgtcttgttcttgtggtgtttggattcttgtggtgtgtgcttttagacacagggtagaattagagacaatattggatgtacaattcctcaggagactacagtagtatattctattccttaccagtaataaggttcttcctaataataattaagagattgaaactccaaacaagtattcattatgaacagatacacatcaaaatcataataatattttcaaaacaaggaataatttctctaatggtttattatagaataccaatgtatagcttagaaataaaactttgaatatttcaagaatatagataagtctaatttttaaatgctgtatatatggctttcactcaatcatctctcagatgttgttattaactcgctctgtgttgttgcaaaactttttggtgcagattcgtttccaaaactattgctactttgtgtgctttaaacaaaataccttgggttgatgaaacatcaacccagtgctaggaatactgtgtatctatcattagctatatgggactatattgtagattgtggtttctcagtagagaagtgactgtagtgtgattctagataaatcatcattagcaattcattcagatggtcaataacttgaaatttatagctgtgataggagttcagaaattggcacatccctttaaaaataacaacagaaaatacaactcctgggaaaaaaggtgctgattctataagattatttatatatgtaagtgtttaaaaagattattttccagaaagtttgtgcagggtttaagttgctactattcaactacactatatataaataaaatatatacaatatatacattgttttcactgtatcacattaaagtacttgggcttcagaagtaagagccaaccaactgaaaacctgagatggagatatgttcaaagaatgagatacaattttttagttttcagtttaagtaactctcagcattacaaaagagtaagtatctcacaaataggaaataaaactaaaacgtggatttaaaaagaactgcacgggctttagggtaaatgctcatcttaaacctcactagagggaagtcttctcaagtttcaagcaagaccatttacttaatgtgaagttttggaaagttataaaggtgtatgttttagccatatgattttaattttaattttgcttcttttaggttcgttcttatttaaagcaatatgattgtgtgactccttgtagttacacttgtgtttcaatcagatcagattgttgtatttattccactattttgcatttaaatgataacataaaagatataaaaaatttaaaactgctatttttcttatagaagagaaaatgggtgttggtgattgtattttaattatttaagcgtctctgtttacctgcctaggaaaacattttatggcagtcttatgtgcaaagatcgtaaaaggacaaaaaatttaaactgcttataataatccaggagttgcattatagccagtagtaaaaataataataataataataaaaccatgtctatagctgtagatgggcttcacatctgtaaagcaatcaattgtatatttttgtgatgtgtaccatactgtgtgctccagcaaatgtccatttgtgtaaatgtatttattttatattgtatatattgttaaatgcaaaaaggagatatgattctgtaactccaatcagttcagatgtgtaactcaaattattatgcctttcaggatgatggtagagcaatattaaacaagcttccacttttgactgctaaaaaaaaaaaaaaaaa

SEQ ID NO: 260 - DNA, 1591 bp, Homo sapiens
cccgggatcgccgcggaaccacgcacagagtctgcagaagtgcacagctttatcgacagcgcttgaagcatggagtctcttcgcgggtacacccacagtgatattggctaccgcagcctggcagtcggcgaggacatcgaggaagtgaatgatgagaaacttaccgtgacctcgctgatggcaaggggaggagaggacgaggagaatacacggtccaaacctgagtacggaacagaagcggaaaacaacgttggcacggaagggtccgtcccctcggacgaccaagaccgtgagggtggcggcggccacgagccggagcaacagcaggaggagccgcccctgaccaagccggagcaacagcaggaggagccgcccctgctcgagctgaagcaagagcaggaggagccgccccagacgaccgtggaggggccacagccggcggaggggccacaaaccgctgagggaccacagcccccagagaggaaacgccgccgccgcaccgcgttcacgcagtttcagctgcaggagctagagaactttttcgatgaatctcaatatcccgacgttgtggcgcgagagagacttgcagcacgcctgaatttgactgaagacagagtgcaggtttggtttcagaacagaagagccaagtggaaacgaaatcagagggtgctaatgttgagaaacactgctactgctgacctggcccaccctttggacatgttcttgggtggggcctattatgctgctcctgctctggatcctgctttgtgtgttcatctggtgccacaactacctagaccacctgtgctgcctgtgccacctatgccacccaggccacccatggtccctatgccacccaggccacccatagcacctatgccacccatggcgcctgtgccacccggctcacgcatggcgcctgtgccacccgggccacgcatggcgcctgtgccaccctggccgcccatggcgcctgtgccaccctggccgcccatggcgcctgtgccaaccgggccgcccatggcgcctgtgccacccgggccgcccatggcgcgtgtgccacccgggccgcccatggcgcgtgtgccacccgggccgcccatggcgcctctgccacccgggccgcccatggcgcctctgccacccgggccgcccatggcgcctctgccacccgggccgcccatggcgcctctgccacccaggtcacatgtgcctcacactggcctggctcctgtacacatcacatgggcccctgtcatcaacagttattatgcatgtccctttttctaaagtaaggtattcataacagtttttccaaagttctttcctgccagatagaaattgtgcacagcacagcatcaagtaattcgttagatgcttgttaaatgaagtgggtaggtgaacaaagttaacgaatgccctgttatttttgtaggccacataattgtagtattttcaataaagatgtgacttaatagtaaaaaaaaaaaaaaaaaaaaaaaaaaaaaaaaaaaaaaaaaaaaaaaaaaaaaaaaaaaaaaaaaaaaaaaaaaaaaaaaaaaaaaaaaaaaaaaaaaaaaaaaaaaaaaaa

SEQ ID NO: 261 - DNA, 2088 bp, Homo sapiens
ggtccgagttcggaatttcggttcaaggcccagttcctcggattgttcctgcgcaacttcagtttcccttccaggcacgggcaatgagtgtttggccgcgacgagttggaaagcccggatgcgtccttcggttgggcggggtgtctcagtgacgtcactgggggtataaaagggcctgggtggcgggcgcctgggcagagcgtcctagcagtgtcactgcgtgggttggtttgtgtagagaggcgtgagcgagcccgttgtccggagtgcacctgctgcctgttctgtccctcccgggagcccccgccgctgtcgccgtcgagtcgccatggaagtgcagaaagaggcacagcgcatcatgaccctgtcggtgtggaagatgtatcactcccgcatgcagcgcggtggcctgcggctgcaccggagtctgcagctgtcgctggtcatgcgcagcgcccgggagctctacctctcggccaaggtggaggccctcgagcccgaggtgtcgttgccggccgccctcccctctgaccctcgcctgcacccgccccgagaagccgagtccacggccgagacagcgacccccgacggtgagcacccgtttccggagccaatggacacgcaggaggcgccgacagccgaggagacctccgcctgctgtgccccgcgccccgccaaagtcagccgcaaacgacgcagcagcagcctgagcgacggcggggacgctggactggtcccgagcaagaaagcccgtctggaagaaaaggaagaagaggagggagcgtcatccgaagtcgccgatcgcctgcagccccctccggcgcaagcggagggcgcctttcccaacctggcccgcgtcctgcagaggcgcttctccggcctcctgaactgcagccccgcggcccctccgacggcgccgcccgcgtgcgaggcaaagcccgcttgccgcccggcggacagcatgctcaacgtgctcgtgcgggccgtggtggccttctgaggaccccgagcggcgctgccggagcccagagcgcgcgtcgaaccgtcggcccgagggcgcagacctgaggcgaggccacccccctccatcctgggggaagcgcccgcgaaaaccgtggagagaagccgccgcccgggctgctgagaggcccggagagggactctgtccccggggagccatcgccttcagtgtgcagggacggcaccgaggagtctgagccgggggcgcgggcgccttccgcagagacctgcgcccacaggtgctgtcttagtggactgggacgtgaacctttcgctctccttctggactgggagaagggaggcttgggtgttgtgttttttgttttgtttgtttgtttgtttttaaagatctcctcagggtcggacttcattttgtactgtgggctgtgctggccctttcaaggtttttcaagagttggttttgcgtttccaacctcggagaattccaggcactccccttccccctccgctgacatacttgtataagcggtcatcgttgcgtcatggggcaggcgtggggagcttcctgtcgccttgcgtgggtgtggggcctgggaggaggtcctggggcgtgcacccgccctgggcagtggggaggagagtggcctgagttacttcacccccgcgtgctgctggttaatgtcccgcgtctctgcaccttcgggtgggagcggggactgatctactttcacattctcaagtttttctcatctgcattagaggtgcccagtaggttcccaggttccagcgtgcccctccctcagacacacggacacaatcagccgagaagttcctggtctgaatcacgagaatgtggaggggtggggggtgtcagtggaaaggcataaggctgagctgagaccagttgctggtgaaactgggccaatctggggaggggaacatccttgccagggagtttctgagggtctgctttgtttacctttcgtgcggtggattctttttaactccgtctacctggcgttttgttagaaatgtcagataggaaaataaaaaccatttgagtaaaaaaaaaaaaaaaaaaaaaaaaaaaaaaaaaaaaaaaaaaaa

SEQ ID NO: 262 - DNA, 5242 bp, Homo sapiens
gagatcgagagcgaacgaggcagccgccggcggagaggagggagcgggcgagggccgggcaggaggagcgggcgcggcgcgggcgaggctgggacccgagcgcgctcacttcgccgcaaagtgccaacttcccctggagtgccgggcgcgcaccgtccgggcgcgggggaaagaaaggcagcgggaatttgagatttttgggaagaaagtcggatttcccccgtccccttccccctgttactaatcctcattaaaaagaaaaacaacagtaactgcaaacttgctaccatcccgtacgtcccccactcctggcaccatgaaggcggccgtcgatctcaagccgactctcaccatcatcaagacggaaaaagtcgatctggagcttttcccctccccggatatggaatgtgcagatgtcccactattaactccaagcagcaaagaaatgatgtctcaagcattaaaagctactttcagtggtttcactaaagaacagcaacgactggggatcccaaaagacccccggcagtggacagaaacccatgttcgggactgggtgatgtgggctgtgaatgaattcagcctgaaaggtgtagacttccagaagttctgtatgaatggagcagccctctgcgccctgggtaaagactgctttctcgagctggccccagactttgttggggacatcttatgggaacatctagagatcctgcagaaagaggatgtgaaaccatatcaagttaatggagtcaacccagcctatccagaatcccgctatacctcggattacttcattagctatggtattgagcatgcccagtgtgttccaccatcggagttctcagagcccagcttcatcacagagtcctatcagacgctccatcccatcagctcggaagagctcctctccctcaagtatgagaatgactacccctcggtcattctccgagaccctctccagacagacaccttgcagaatgactactttgctatcaaacaagaagtcgtcaccccagacaacatgtgcatggggaggaccagtcgtggtaaactcgggggccaggactcttttgaaagcatagagagctacgatagttgtgatcgcctcacccagtcctggagcagccagtcatctttcaacagcctgcagcgtgttccctcctatgacagcttcgactcagaggactatccggctgccctgcccaaccacaagcccaagggcaccttcaaggactatgtgcgggaccgtgctgacctcaataaggacaagcctgtcattcctgctgctgccctagctggctacacaggcagtggaccaatccagctatggcagtttcttctggaattactcactgataaatcctgtcagtcttttatcagctggacaggagatggctgggaattcaaactttctgacccagatgaggtggccaggagatggggaaagaggaaaaacaaacctaagatgaattatgagaaactgagccgtggcctacgctactattacgacaaaaacatcatccacaagacagcggggaaacgctacgtgtaccgctttgtgtgtgacctgcagagcctgctggggtacacccctgaggagctgcacgccatgctggacgtcaagccagatgccgacgagtgatggcactgaaggggctggggaaaccctgctgagaccttccaaggacagccgtgttggttggactctgaattttgaattgttattctattttttattttccagaactcattttttaccttcaggggtgggagctaagtcagttgcagctgtaatcaattgtgcgcagttgggaaaggaaagccaggacttgtggggtgggtgggaccagaaattcttgagcaaattttcaggagagggagaagggccttctcagaagcttgaaggctctggcttaacagagaaagagactaatgtgtccaatcatttttaaaaatcatccatgaaaaagtgtcttgagttgtggacccattagcaagtgacattgtcacatcagaactcatgaaactgatgtaaggcaattaatttgcttctgtttttaggtctgggagggcaaaaaagaggtgggtgggatgaaacatgttttggggggggatgcactgaaaatctgagaactatttacctatcactctagttttgaagcaaagatggacttcagtggggaggggccaaaaccgttgttgtgttaaaatttattttattaaattttgtgccagtattttttttcttaaaaatcgtcttaagctctaaggtggtctcagtattgcaatatcatgtaagtttgtttttatttgccggctgaggattctgtcacaatgaaagaaaactgtttatatagaccccattggaaaagcaaaacgctctcactgagatcagggatcccaaattcatgggacttatataagaaggacaattaatgctgatttgggtacaggggaattatgtgtgtgaatgtcatctacaattaaaaaaaattagcacatccctttacttacttgttatcagtggattctcggggtttggacttaatgttgagctaagaagcattaagtctttgaactgaatgtattttgcatccctggttttggacgacagtaaacgtaggagcactgttgaagtcctggaagggagatcgaaggaggaagattgacttggttctttcttagtcctatatctgtagcatagatgacttggaataaaagctgtatgcatgggcattacccctcaggtcctaagaaataagtcctgaatgcatgtcgttccaaactaacactctgtaatttttcttttatgtcttattttccaagagtcctccattttttgcaccccctcaccgccaactctgttattcagtagagagaagtgtacggctttctgattggtgagtgaaaaagtaacttgagacacgacctaagttgaagagtttagacttgctgagttttagaagtgatggaaattaagagagcatttcaataaaatgtgacttggctgtctttggaagagaagtgcaaggctttcctttgaagaatttaaattagtccggtaggatgtcaggtgagactgtgtatgcaaaatgaatggcacaggtgatgccagggcctcttgcttgggtctgatgtcttggcacagggtaagtgaaggttaattccagaagagaggaatgacttgaaggcaaaggaaactaaggaaggaggttcagtgaggaaaataaggttgtccatgagatttgaatagatttttagttcccccaaggtttaaatacaaacatagtcaagcaaggtagtcatctttctgctggttgtgagggggaatctgaaaatggagttttagaggaaaagtcaacatctaactagtgaggaaaagtgcctaatacaattagaatctccctcactctatagttgcccagttgaaaggataaggaggaggggtggcttttatggacttccatgagagaaggaaagaaatatttcaggtaagcttctcagggctggccctttttgggatttggatgagaaattggaagtactaactactttctagcatatctttaagaaaattgattgttatttactcccagatcctcttgcagacccagaattatcaggaacatagctctgtgattcatgagtgtccccatactgatgaattggagcatccatatggaaagcaaaggcagaattatcccagctgtattattttgatcttttggatgcaggtgccttaatgaagctctcaaaatattttaggagctgctcagggagtgttgggtggaactgtttggactacattgttttctcttagattatgtgatttttgttgggcactggcaaaaggtgtgtgtgtgaatgtgtgcatgtgtgtgaatgttgtgtgtgtgtgtgtgtgtgtgtgtgtgtgtgtgtgtgtgtgtgtttgcagacatgcaaaactgcagctgaaataataccttagatttctaggtaagtctttccacatttcaataatgggtaagagtagaaccagggccgggtatcaattattgcttgctgtttgcaaccaggcataaaatcactttctcaaatcatccaccgttcctattaaatttatgccggaaactctccttctgtgagtataactcctgcagttcctatagcagataagatataagaaagtgcctcctagtgctcctccgcccgcttgtttgctaaaattccctttctctctaagtccaccattttcaagatttgtagatagtgtattagttaagacagctttgtcgatctggccagatgttttttctcctttgtccaaaggccagagaccatcccaggaagagtggtgggtggtttatacactggaaatgttgcgtttatgctttttaaaaacacacgttaacttcagaggaaggatgggcaaatctggtctagctgggtgaaacccttattttcccagagatgccttaacctttgttggttttggctttagggttcagagtcacttttgttcccttctccattctggagagggacttcccctacatagagccctgatttttgtggctgtggggattggaggtagcattcaaagatcagatgtgcttttcctcactttggagatgaacactctgggttttacagcattaacctgcctaaccttcatggtgagaaatacaccatctctcttctagtcatgctgtgcatgccgcttactctgttggggtctatataaatttgttgaactcttacctacattccaaagaagtttcaaggaaccataaatatatgtatacatatacatatataaaatatatatattaaaataaaattatcaggaatactgcctcagttattgaacttttttttttaagaatactttttttttaagctgagaagtatagggatgaaaaagatgttatattgtgtttgactattttccaacttgtattttcatataatttatattttttaaaagctgaaaatttagaagcaagatgaaaaaaaggaaaagcaggtgctttttaaaaatcagaactgaggtagcttagagatgtagcgatgtaagtgtcgatgtttttttaaaaaaaaatgcaaaaaaattcttatggcggagttttttgtttgtttattttagtagctgatgctggcacatcattttgctggagagttttttatatactgtagcctgatttcatattgtattttaaactgtgtgaaattaaaaacaaagaatttcattcataatgct

SEQ ID NO: 263 - DNA, 3672 bp, Homo sapiens
gcccggttacttcctccagagactgacgagtgcggtgtcgctccagctcagagctcccggagccgcccggccagcgtccggcctccctgatcgtctctggccggcgccctcgccctcgcccggcgcgcaccgagcagccgcgggcgccgagcagccaccgtcccgaccaagcgccggccctgcccgcagcggcaggatgaatgatttcggaatcaagaatatggaccaggtagcccctgtggctaacagttacagagggacactcaagcgccagccagcctttgacacctttgatgggtccctgtttgctgtttttccttctctaaatgaagagcaaacactgcaagaagtgccaacaggcttggattccatttctcatgactccgccaactgtgaattgcctttgttaaccccgtgcagcaaggctgtgatgagtcaagccttaaaagctaccttcagtggcttcaaaaaggaacagcggcgcctgggcattccaaagaacccctggctgtggagtgagcaacaggtatgccagtggcttctctgggccaccaatgagttcagtctggtgaacgtgaatctgcagaggttcggcatgaatggccagatgctgtgtaaccttggcaaggaacgctttctggagctggcacctgactttgtgggtgacattctctgggaacatctggagcaaatgatcaaagaaaaccaagaaaagacagaagatcaatatgaagaaaattcacacctcacctccgttcctcattggattaacagcaatacattaggttttggcacagagcaggcgccctatggaatgcagacacagaattaccccaaaggcggcctcctggacagcatgtgtccggcctccacacccagcgtactcagctctgagcaggagtttcagatgttccccaagtctcggctcagctccgtcagcgtcacctactgctctgtcagtcaggacttcccaggcagcaacttgaatttgctcaccaacaattctgggactcccaaagaccacgactcccctgagaacggtgcggacagcttcgagagctcagactccctcctccagtcctggaacagccagtcgtccttgctggatgtgcaacgggttccttccttcgagagcttcgaagatgactgcagccagtctctctgcctcaataagccaaccatgtctttcaaggattacatccaagagaggagtgacccagtggagcaaggcaaaccagttatacctgcagctgtgctggccggcttcacaggaagtggacctattcagctgtggcagtttctcctggagctgctatcagacaaatcctgccagtcattcatcagctggactggagacggatgggagtttaagctcgccgaccccgatgaggtggcccgccggtggggaaagaggaaaaataagcccaagatgaactacgagaagctgagccggggcttacgctactattacgacaagaacatcatccacaagacgtcggggaagcgctacgtgtaccgcttcgtgtgcgacctccagaacttgctggggttcacgcccgaggaactgcacgccatcctgggcgtccagcccgacacggaggactgaggtcgccgggaccaccctgagccggccccaggctcgtggactgagtgggaagcccatcctgaccagctgctccgaggacccaggaaaggcaggattgaaaatgtccaggaaagtggccaagaagcagtggccttattgcatcccaaaccacgcctcttgaccaggctgcctcccttgtggcagcaacggcacagctaattctactcacagtgcttttaagtgaaaatggtcgagaaagaggcaccaggaagccgtcctggcgcctggcagtccgtgggacgggatggttctggctgtttgagattctcaaaggagcgagcatgtcgtggacacacacagactatttttagattttcttttgccttttgcaaccaggaacagcaaatgcaaaaactctttgagagggtaggagggtgggaaggaaacaaccatgtcatttcagaagttagtttgtatatattattataatcttataattgttctcagaatcccttaacagttgtatttaacagaaattgtatattgtaatttaaaataattatataactgtatttgaaataagaattcagacatctgaggttttatttcatttttcaatagcacatatggaattttgcaaagatttaatctgccaagggccgactaagagaagttgtaaagtatgtattatttacatttaatagacttacagggataaggcctgtggggggtaatccctgctttttgtgtttttttgtttgtttgtttgtttgtttttggggggttttcttgccttggttgtctggcaaggactttgtacatttgggagtttttatgagaaacttaaatgttattatctgggcttatatctggcctctgctttctcctttaattgtaaagtaaaagctataaagcagtatttttcttgacaaatggcatatgttttccacttctttgcatgcgtttaagtcagtttatacacaaaatggattttattttttagtttaactgtgtttctccgacagctcacctctctctgaccacccagccatttccttcctgtgctccacgttcttctgtgtgattaaaataagaatattatttttggaaatatgcaactccttttcagagatcaggagggatttatgtagcagctatttttactgcaaaagtaattcactggaaaaaaaatgtaatttgtaagaaagctttatttttatctcagctctatgtaaagttaaagttactgtacagagctgaaggacggggggcggtaggggtcttgatgaaacctcttgaacgaagcacagtttgtcccatctttgttcactcgtgtgtctcaaccatcttaatagcatgctgctcctttttgctcagtgtccacagcaagatgacgtgattcttattttcttggacacagactattctgaggcacagagcggggacttaagatgggaaagagaaagcatcggagccattcattcggagaaaacgttttgatcaaaatggagacttttgtagtcgtttcaaaagagcacctgagtcatgtgtattcccggcctttataaatgacccggtcaagttggtttcaaagtccgacaggcttgtctgtttactagctgcgtggccttggacgggtggctgacatctgtaaagaatcctcctgtgatgaaactgaggaatcgggtggccgggcaagctgggaagagcaaagccagagctgcgctgcctcaatacccacaaaagaccattcccagtatacataagcacaggatgtttttctcaagagggatgtatttatcacttggacatctgtttataatataaacagacatgtgactgggaacatcttgctgccaaaagaatcctaggcagtggctcattgtatgtgaggttgaaccacgtgaaattgccaatattaggctggcttttatctacaaagaaggagtttcatggggttcagcctaacagttatggaaactacagtccttataaaccattggcatggtaataaacagatcttaagtataaaaattttgtaattgggcctttactctctcaataataaagtattttgtttatataaa

SEQ ID NO: 264 - DNA, 6824 bp, Homo sapiens
aaggaaaccagcccaatagtggacctaacaccccaataatgggaactggcgactcgaaacacacggtttcagtatccccaggcgccttaacaataagcagcgggttacagaggaaatcgagtctctccgtggcgcttccaggctgaggacccagcgcctaccggccgagcaccccctagggcagaggggcgagggagacccgcgggaaggggcagcaagccgcctgattgacagcccgaaatctgatcttgtgaaagagacgcggagccaatgggaggcagcgatccatcagtttggattggaggcccctggaggagaagtagaggaaaaaccaccgaattgagctctgtcagaggcgctttcggcttccaagggggaagtgctgggctataattaatgtttttattaaatttggagggaagtttttgcagcctttcgcctagcgtggccttcagtcccgttaggtgcaaagcaagtctcgttgatcgccattgctagttttgcacacgtttgcgaatcagagctgcccggggtacaccgaccgcgcagggaaacatcgagagtgtaaataaatacatcgcctcttgttcggatttttgctactaccgaaaatatgtaaattgtgaactctgttggctctctttggatccaggttgatagaagtccagatcctgaggaaatctccagctaaatgctcaaaatataaaatactgagctgagatttgcgaagagcagcagcatggatggattttatgaccagcaagtgccttacatggtcaccaatagtcagcgtgggagaaattgtaacgagaaaccaacaaatgtcaggaaaagaaaattcattaacagagatctggctcatgattcagaagaactctttcaagatctaagtcaattacaggaaacatggcttgcagaagctcaggtacctgacaatgatgagcagtttgtaccagactatcaggctgaaagtttggcttttcatggcctgccactgaaaatcaagaaagaaccccacagtccatgttcagaaatcagctctgcctgcagtcaagaacagccctttaaattcagctatggagaaaagtgcctgtacaatgtcagtgcctatgatcagaagccacaagtgggaatgaggccctccaacccccccacaccatccagcacgccagtgtccccactgcatcatgcatctccaaactcaactcatacaccgaaacctgaccgggccttcccagctcacctccctccatcgcagtccataccagatagcagctaccccatggaccacagatttcgccgccagctttctgaaccctgtaactcctttcctcctttgccgacgatgccaagggaaggacgtcctatgtaccaacgccagatgtctgagccaaacatccccttcccaccacaaggctttaagcaggagtaccacgacccagtgtatgaacacaacaccatggttggcagtgcggccagccaaagctttccccctcctctgatgattaaacaggaacccagagattttgcatatgactcagaagtgcctagctgccactccatttatatgaggcaagaaggcttcctggctcatcccagcagaacagaaggctgtatgtttgaaaagggccccaggcagttttatgatgacacctgtgttgtcccagaaaaattcgatggagacatcaaacaagagccaggaatgtatcgggaaggacccacataccaacggcgaggatcacttcagctctggcagtttttggtagctcttctggatgacccttcaaattctcattttattgcctggactggtcgaggcatggaatttaaactgattgagcctgaagaggtggcccgacgttggggcattcagaaaaacaggccagctatgaactatgataaacttagccgttcactccgctattactatgagaaaggaattatgcaaaaggtggctggagagagatatgtctacaagtttgtgtgtgatccagaagcccttttctccatggcctttccagataatcagcgtccactgctgaagacagacatggaacgtcacatcaacgaggaggacacagtgcctctttctcactttgatgagagcatggcctacatgccggaagggggctgctgcaacccccacccctacaacgaaggctacgtgtattaacacaagtgacagtcaagcagggcgtttttgcgcttttccttttttctgcaagatacagagaattgctgaatctttgttttatttctgttgtttgtattttatttttaaataataatacacaaaaaggggcttttcctgttgcattattctatggtctgccatggactgtgcactttatttgagggtgggtgggagtaatctaaacatttattctgtgtaacaggaagctaatgggtgaatgggcagagggatttggggattactttttacttaggcttgggatggggtcctacaagttttgagtatgatgaaactatatcatgtctgtttgatttcataacaacataagataatgtttattttatcggggtatctatggtacagttaatttcacgttgtgtaaatatccacttggagactatttgccttgggcattttcccctgtcatttatgagtctctgcaggtgtacaaaaaaaccccaatctactgtaaatggcagtttaattgttagaaatgactgtttttgcaccacttgtaaaaaggtatttagcgattgcatttgctgtttgttgttttattttgctttatatatgacttgcagaggataaccataaaatgggtaattctctctgaagttgaataatcaccatgactgtaaatgaggggcacaattttggactctggcgccaaactgagtcataggccagtagcattacgtgtatctggtgccaccttgctgtttagatacaaatcataccgtcttttaaatattttgaagcccatttcagttaaataatgacatgtcatggtcctttggaatcttcatttaaatgttaaatctggaatcaaaatgaagcaaaaaatatctgtctccttttcactttcttcagtacataaatacattatttaatcaataagaattaactgtactaaatcatgtattatgctgttctagttacagcaaacactctttaagaaaaatatccaatacactaaataggtactatagtaatttttagacatggtacccattgatatgcatttaaaccttttactgctgtgttatgttgataacatatataaatattagataatgctaatgcttctgctgctgtcttttctgtaatattctctttcatgctgaatttactatgaccatttataagcagtgcagttaactacagatagcatttcaggacaaaatagatgactcaaaccatttattgcttaaaaaatagcttacgccatgctatgctataagcagcttttatgcacattgacaaatgaagagtaagcttcagcttgctaaaggaaactgtggaaccttttgtaacttttggtgatatggaaaattatttacaaaccgtcaaagaatatgaggaagttgctgtatgacatagtgctggcactgatattatccatcatctctttttggacacttctgtaaatgtgattggattgtttgaaagaagatttaaagtttcaaagttttttgttctgtttttgctttgcatttggagaaaatattgaaagcagggtatgttgtttcattcaccttgaaaaaaccatgagtaaatggggatatagaatctctgaatagctcgctaaaagattcaagcaagggacatgaattttgttccatctatcaataatatccagaagaacaacttttttaaagagtctatagcaaaaagcaaaaaaaaaaaaaaattctaaacacaaagtcaaaataaacctattgtaaaagcatttcgtgatgagcatgaaaaagattgtttaaagatgatccccccagctacccattttccaaaactacacagatcacagctcatttctctaagtggagcagttatcaagaaacccaaacaccaaaattgctactcttcacatttaatcctacaaaaagtactccaatttcaaaatatgtatgtaacctgcgatttcaatgattgttgttcatatacatcatgtattattttggcccattttgggcctaaaaaagaaaactatgccttaaaaatcagaaccttttctccccactatgcttatgtggccatctacagcacttagaataaaaacagatgttaaaatattcagtgaaagttttattggaaaaaggaattgagatatataattgagatttggtgaaattgaaggagaaaatttaagtgagtctttaaaatatattctgaatgaaaactgtattgaggattcatttttgttccttttttttctttttctcttttctcctttttcttctttttaatagtctagttttagtcagtcagtgaggaagaattgggccatgctaacgttatcacaagagaacaatggcagaaatggtattagttatataatatttaaggacaaactatatgttttgctgttttaacgtagtgactcactgaactaaatacataattgaccaacattaagtgtatttccaatacagaagggttgaaaatattacattataaactcttttgaaaaatgtatctaaaattttttaagttctgttttgattccactttttggttgagtttttatgtttttgttttcaggtagattaataaatctggcagctgatttctgcaagattcttgtgttttgaatttctcattgaattggctactcaaacatagaaatcatttgttaatgatgtaatgtcttctctcagcttttatcttcactgctgtttgctgtctcttgatgatgacatgttaatacccaatagattaattgcaacaaacacttatactcaaataactaagtaaaaataatttttcttgttatgtccatgaaaagtgcttcagaataaaaatccacaagactgacagtgcagaacatttttctcaaatcatgggcggatcttggaggtctagtttcccgtagatgctgtaaccaattaccacaacttcagtaatttacacaaatttatcttatagttctggaggcagaagttcaaaagaagccttaagagactaaaaccaagatgtccttaggtctggttccttctggaggctccaggggagattcttccagctttcacttctagagtctgctgacattccttggctcctggctacatcacttcaatctctgcttccatggtcacatactcttctactatagtcaaatttccttcctgcctcttataaggatgcttgtgattacatttaggggatgctcagataatccaggacaatctctccatctcaagatccttaacttaatgacgtgtgccaagtccctttggctagataattattcataggtcccagggattaggacatggatgtaaggggtgagggcagggctgttattcagaacaccgcacggaggaggaagactgtgtagcaaagactctaattgatttactcaggaacagtggagttctgctgagggatctaggatttgaaagtactagagtttgcttttatttaccactgagatattttccccttattctgcataaataattttgaaaactttctatattaaatttcaactattccactaaaatgtctggtaatcacatcaagcctttagattattcaaatccttccccagcccccaggaaaacactaagtcatgaaacagaaaaacagaaggtatgataataatagtaataacagttaaatcagtggtctaatccagattttattttttaatacatttcttttggtgttaatatgggttactatgtgatcttatcatttgctagtgattattacttattaggtaagaacaatgtgtaaaatatgtctattactcaaaagaacaattgcaaaatgagtcaacttatctttatataaccaggaaagaaatatattgccagaagctacagaattttgccagatgatagggatttctaaaatgagccactttgtctatcatgcagccttttcagagcttgtaatgagaaaacattacagaggagaaggtcatttggatgtttgttacttggaatcctagaaaacaaaaactaaaatttaaaaataagaagtgagtaagctattttccatttgcgatttggtatggagaagagaggaaatagaattattaaaaaaatacaaattgggtaaaagtgatggtggaaaaaatataaagaaggcaaatgtacatattaagcaattctactaagaattggaaaaatcaagtttcaaaaagatggtaatagttgggcatgatactagaaaatttcacccagtttattcagagctcaactagtacttttaggacttctttttttatatacatgagactcactttgacatacttaaaaaaaaaacagtttatggaaagtacagtttaagaggagaatttgattagactaagtggatatctttatagaaatattaatgatttcagaattttcagttacaagtgtatataccgtggctattgtttatggattcatatgtaaggtagggtcttttttgcatatagactccagtattagttactttcattctaaaattatatttatgcttctatggggaagaaaatttttaattcacttggttgtattaaaattatacttacggtttgagaaaacatgctatgaaaatcatgattatagcaaattaaatatgctcaaaatttaaatctaaaataaaagcccagaaactgaaaaaaaaaaaaaaaaaa

SEQ ID NO: 265 - DNA, 435 bp, Homo sapiens
gcaccacctctttgaagcggtaccagagctcagctttcaccgtttgctccgaaccgagcccgcagtcggaccgtgccagtttggctcgatgccccaaaactaaccaccgaggtcccattcagctgtggcagttcctcctggagctgctccacgacggggcgcgtagcagctgcatccgttggactggcaacagccgcgagttccagctgtgcgaccccaaagaggtggctcggctgtggggcgagcgcaagagaaagccgggcatgaattacgagaagctgagccggggccttcgctactacttacgccgcgacatcgtgcgcaagagcggggggcgaaagtacacgtaccgcttcgggggccgcgtgcccagcctagcctatccggactgtgcgggaggcggacggggagcagagacacaataaaattccgtca

SEQ ID NO: 266 - DNA, 855 bp, Homo sapiens
cccggagacgccgcggaggagaccggaccgaagacggaccgtgccgggaagagcaggcgggtgaaaatgaaagccggctgtagcatcgtggaaaagccagaaggaggtggagggtatcagtttcctgactgggcctacaaaacagagtcatccccaggctcccggcagatccagctgtggcacttcatcctggagctgctgcagaaggaagagttccgccatgtcatcgcctggcagcagggagagtacggggaatttgtcatcaaggatccagatgaggtggcccgcctctggggccgcaggaaatgcaaaccacagatgaattatgacaagctgagccgggccctcagatactattacaacaagaggatccttcataaaacaaaagggaaaagatttacctataaatttaacttcaacaagctggtgatgcccaactacccattcatcaacattcggtcaagtggtgtggttcctcagagtgcaccaccagtgccaacagcctcttcccggttccatttcccacctctggacacccattctccaaccaatgatgtgcagccgggacggttctctgctagctcccaactgcttctggccaggagtccagtaatggtactgatagaaagactgagctttcagagctggaggatggctcagctgctgactggcgccggggtgtggatcccgtgtcctccaggaatgccattggtggaggagggattggccatcagaaacgcaagcctgacataatgcttcctctgtttgctaggccagggatgtaccctgacccccacagtcccttcgctgtctctccaatccctggccgcggaggtgtccttaatgtcccctagg

SEQ ID NO: 267 - DNA, 2298 bp, Homo sapiens
cacgttcttatgtaaccgagcccgggtaaagcagggctgcagaaagcagaaacggcgagcccggctcctgggagcaggtctcggcccccgcttggggccccggccgtgcggccggagggagcggccggatggagcggaggatgaaagccggatacttggaccagcaagtgccctacaccttcagcagcaaatcgcccggaaatgggagcttgcgcgaagcgctgatcggcccgctggggaagctcatggacccgggctccctgccgcccctcgactctgaagatctcttccaggatctaagtcacttccaggagacgtggctcgctgaagctcaggtaccagacagtgatgagcagtttgttcctgatttccattcagaaaacctagctttccacagccccaccaccaggatcaagaaggagccccagagtccccgcacagacccggccctgtcctgcagcaggaagccgccactcccctaccaccatggcgagcagtgcctttactccagtgcctatgacccccccagacaaatcgccatcaagtcccctgcccctggtgcccttggacagtcgcccctacagccctttccccgggcagagcaacggaatttcctgagatcctctggcacctcccagccccaccctggccatgggtacctcggggaacatagctccgtcttccagcagcccctggacatttgccactccttcacatctcagggagggggccgggaacccctcccagccccctaccaacaccagctgtcggagccctgcccaccctatccccagcagagctttaagcaagaataccatgatcccctgtatgaacaggcgggccagccagccgtggaccagggtggggtcaatgggcacaggtacccaggggcgggggtggtgatcaaacaggaacagacggacttcgcctacgactcagatgtcaccgggtgcgcatcaatgtacctccacacagagggcttctctgggccctctccaggtgacggggccatgggctatggctatgagaaacctctgcgaccattcccagatgatgtctgcgttgtccctgagaaatttgaaggagacatcaagcaggaaggggtcggtgcatttcgagaggggccgccctaccagcgccggggtgccctgcagctgtggcaatttctggtggccttgctggatgacccaacaaatgcccatttcattgcctggacgggccggggaatggagttcaagctcattgagcctgaggaggtcgccaggctctggggcatccagaagaaccggccagccatgaattacgacaagctgagccgctcgctccgatactattatgagaaaggcatcatgcagaaggtggctggtgagcgttacgtgtacaagtttgtgtgtgagcccgaggccctcttctctttggccttcccggacaatcagcgtccagctctcaaggctgagtttgaccggcctgtcagtgaggaggacacagtccctttgtcccacttggatgagagccccgcctacctcccagagctggctggccccgcccagccatttggccccaagggtggctactcttactagcccccagcggctgttccccctgccgcaggtgggtgctgccctgtgtacatataaatgaatctggtgttggggaaaccttcatctgaaacccacagatgtctctggggcagatccccactgtcctaccagttgccctagcccagactctgagctgctcaccggagtcattgggaaggaaaagtggagaaatggcaagtctagagtctcagaaactcccctgggggtttcacctgggccctggaggaattcagctcagcttcttcctaggtccaagccccccacaccttttccccaaccacagagaacaagagtttgttctgttctgggggacagagaaggcgcttcccaacttcatactggcaggagggtgaggaggttcactgagctccccagatctcccactgcggggagacagaagcctggactctgccccacgctgtggccctggagggtcccggtttgtcagttcttggtgctctgtgttcccagaggcaggcggaggttgaagaaaggaacctgggatgaggggtgctgggtataagcagagagggatgggttcctgctccaagggaccctttgcctttcttctgccctttcctaggcccaggcctgggtttgtacttccacctccaccacatctgccagaccttaataaaggcccccacttctcccattaaaaaaaaaaaaaaaaaaaaaaaaaaaaaaaaaaaaaaaa

SEQ ID NO: 268 - DNA, 4102 bp, Homo sapiens
agcctggttggcagctgcggcgcagagtccagccgctggtgcgcggagcggttcaccgtcttcggagcggttcggcccagcctttcgcccaggcgcccaggcccgctgcgcgcgtgcgtgagcgcgcctgcgccgccggggccgctgcaaggggaggagagaggccgcctcaggaggatcccttttcccccagaaattactcaatgctgaaacctctcaaagtggtattagagacgctgaaagcaccatggacgggttttatgatcagcaagtcccttttatggtcccagggaaatctcgatctgaggaatgcagagggcggcctgtgattgacagaaagaggaagtttttggacacagatctggctcacgattctgaagagctatttcaggatctcagtcaacttcaagaggcttggttagctgaagcacaagttcctgatgatgaacagtttgtcccagattttcagtctgataacctggtgcttcatgccccacctccaaccaagatcaaacgggagctgcacagcccctcctctgagctgtcgtcttgtagccatgagcaggctcttggtgctaactatggagaaaagtgcctctacaactattgtgcctatgataggaagcctccctctgggttcaagccattaacccctcctacaacccccctctcacccacccatcagaatcccctatttcccccacctcaggcaactctgcccacctcagggcatgcccctgcagctggcccagttcaaggtgtgggccccgcccccgccccccattcgcttccagagcctggaccacagcagcaaacatttgcggtcccccgaccaccacatcagcccctgcagatgccaaagatgatgcctgaaaaccagtatccatcagaacagagatttcagagacaactgtctgaaccctgccaccccttccctcctcagccaggagttcctggagataatcgccccagttaccatcggcaaatgtcagaacctattgtccctgcagctcccccgccccctcagggattcaaacaagaataccatgacccactctatgaacatggggtcccgggcatgccagggcccccagcacacgggttccagtcaccaatgggaatcaagcaggagcctcgggattactgcgtcgattcagaagtgcctaactgccagtcatcctacatgagagggggttatttctccagcagccatgaaggtttttcatatgaaaaagatccccgattatactttgacgacacttgtgttgtgcctgagagactggaaggcaaagtcaaacaggagcctaccatgtatcgagaggggcccccttaccagaggcgaggttcccttcagctgtggcagttcctggtcacccttcttgatgacccagccaatgcccacttcattgcctggacaggtcgaggcatggagttcaagctgatagaaccggaagaggttgctcggcgctggggcatccagaagaaccggccagccatgaactatgacaagctgagccgctctctccgctattactatgaaaagggcatcatgcagaaggtggctggagagcgatacgtctacaaatttgtctgtgacccagatgccctcttctccatggctttcccggataaccagcgtccgttcctgaaggcagagtccgagtgccacctcagcgaggaggacaccctgccgctgacccactttgaagacagccccgcttacctcctggacatggaccgctgcagcagcctcccctatgccgaaggctttgcttactaagtttctgagtggcggagtggccaaaccctagagctagcagttcccattcaggcaaacaagggcagtggttttgtttgtgtttttggttgttcctaaagcttgccctttgagtattatctggagaacccaagctgtctctggattggcacccttaaagacagatacattggctggggagtgggaacagggaggggcagaaaaccaccaaaaggccagtgcctcaactcttgattctgatgaggtttctgggaagagatcaaaatggagtctccttaccatggacaatacatgcaaagcaatatcttgttcaggttagtacccgcaaaacgggacatagtatgtgacaatctgcatcgatcatggactactaaatgcctttacatagaagggctctgatttgcacaatttgttgaaaaatcacaaacccatagaaaagtaagtaggctaagttggggaggctcaaaccattaagggttaaaaatacatcttaaacattggaaagctcttctagctgaatctgaaatattaccccttgtctagaaaaaggggggcagtcagaacagctgttccccactccgtggttctcaaaatcataaaccatggctactcttgggaaccacccggccatgtggtcgccaagtagagcaagccccctttctcttcccaatcacgtggctgagtgtggatgacttttattttaggagaagggcgattaacacttttgacagtattttgttttgccctgatttgggggattgttttgttttggtggttgttttggaaaaacagtttataaactgatttttgtagttttggtatttaaagcaaaaaaacgaaaaacaaaaaacaaaaacaaaccttttggtaactgtgcactgtgtcctttagccagggccgtgccaacttatgaagacactgcagcttgagaggggctttgctgaggcttccccttggccatgtgaaagcccgccttgttgcctgctttgtgctttctgcaccagacaacctgatggaacatttgcacctgagttgtacatttttgaagtgtgcagggcagcctggacacaagcttagattctctatgtatagttccccgtgttcactaacatgccctctctggaaagcatatgtatataacatgtgtcatgtcctttggaaacctggtcacctggtgaaaacccttgggattcttccctgggcatgactgatgacaatttccatttcatcagtttgttttgttttcctttttctttaaatcttggactttaaaccctacctgtgtgattcagtagggtttgagacttacgtgtgatactgacaggtaagcaacagtgctagcattctagattcctgcctttttttaaaaagaaattattctcattgctgtattatattggaaaagttttaaacaaccaagctaaagctatgtgaaagttgagctcaaagtagaggaaaagttactggtggtaccttgctgcctgctctgctggtagaattctgtgctccccgtgacacttagtacattaagaatgactacactgttcctcgtatgtgaaggaggcagtgctgactccgtgagtgtgagacacgtgctttgaactgcttttctattcatggagcactccatagtctcaaactgtcccccttatgaccaacagcacatttgtgaagaggttcgcagggataaggggtgcactttatagctatggaaacatgagattctcctctattggaagctaattagcccacaaaggtggtaaacctgtagattgggccttaattagcattgtactctaatcaaaggactctttctaaaccatatttatagctttcttaacctacacatagtctatacatagatgcatattttacccccagctggctagagatttatttgttgtaaatgctgtatagatttggttttcctttctttacttaccctggtttggattttttttttttttcttttgaatggatttatgctgtcttagcaatatgacaataatcctctgtagcttgagctacccctcccctgctgtaacttacgtgacctgtgctgtcactgggcataggacagcggcatcacggttgcattcccattggactcatgcacctcccggatggtttttgtttttttcgggggttctttggggtttgtttgtttgcttcttttccagagtgtggaaagtctacagtgcagaaaggcttgaacctgccagctgatttgaaatactttcccctgcgcagggccgtatgcatcctgccaagctgcgttatattctgtactgtgtacaataaagaagtttgcttttcgtttaccaa

SEQ ID NO: 269 - DNA, 5989 bp, Homo sapiens
gcgtcccgggtccccgcgccgcgccgcgacctgcagaccccgccgccgcgctcgggcccgtctcccacgcccccgccgccccgcgcgcccaactccgccggccgccccgccccgccccgcgcgctccagacccccggggcggctgccgggagagatgctggaagaaacttcttaaatgaccgcgtctggctggccgtggagcctttctgggttggggagaggaaaggaaagtggaaaaaacctgagaacttcctgatctctctcgctgtgagacatgtctgagactcctgctcagtgtagcattaagcaggaacgaatttcatatacacctccagagagcccagtgccgagttacgcttcctcgacgccacttcatgttccagtgcctcgagcgctcaggatggaggaagactcgatccgcctgcctgcgcacctgcgcttgcagccaatttactggagcagggatgacgtagcccagtggctcaagtgggctgaaaatgagttttctttaaggccaattgacagcaacacgtttgaaatgaatggcaaagctctcctgctgctgaccaaagaggactttcgctatcgatctcctcattcaggtgatgtgctctatgaactccttcagcatattctgaagcagaggaaacctcggattcttttttcaccattcttccaccctggaaactctatacacacacagccggaggtcatactgcatcagaaccatgaagaagataactgtgtccagaggacccccaggccatccgtggataatgtgcaccataaccctcccaccattgaactgttgcaccgctccaggtcacctatcacgacaaatcaccggccttctcctgaccccgagcagcggcccctccggtcccccctggacaacatgatccgccgcctctccccggctgagagagctcagggacccaggccgcaccaggagaacaaccaccaggagtcctaccctctgtcagtgtctcccatggagaataatcactgcccagcgtcctccgagtcccacccgaagccatccagcccccggcaggagagcacacgcgtgatccagctgatgcccagccccatcatgcaccctctgatcctgaacccccggcactccgtggatttcaaacagtccaggctctccgaggacgggctgcatagggaagggaagcccatcaacctctctcatcgggaagacctggcttacatgaaccacatcatggtctctgtctccccgcctgaagagcacgccatgcccattgggagaatagcagactgtagactgctttgggattacgtctatcagttgctttctgacagccggtacgaaaacttcatccgatgggaggacaaagaatccaaaatattccggatagtggatcccaacggactggctcgactgtggggaaaccataagaacagaacaaacatgacctatgagaaaatgtccagagccctgcgccactactacaaactaaacattatcaggaaggagccaggacaaaggcttttgttcaggtttatgaaaaccccagatgaaatcatgagtggccgaacagaccgtctggagcacctagagtcccaggagctggatgaacaaatataccaagaagatgaatgctgaaggaaccaacagtccacctcagcgggccagcagcccagggaacccctgcccaccaggattgctggaagtgtgacggagcaggcgggctgaggagagtggaaaaggaagcgacccagaaatggcagggacacttctcttgcagaccaagagggaccctggagcaccttagacaaactacccagcacaggcggggctggaattctggcggagggcatgagcctgggactccatgtcacgtttccttctgatttggaatctctccatctgtaattcctcaccctcacccttccaccgttgttagtatcatggtgtttttgtttttgtttttgttttaagaacctgcagtttgactcttcatcgttcatctaggggaagacatctgatgttgttttcctatggaaatatatatctattatatatatattttttgcaaatctcacaaagtgcggcaagcccagctggtcaggaaagagaatacttgcagaggggttcaggttcctctttttcctgccacgtggatcaggtctgttcctgttactgttgggtcttggctgaaaaaaaaaaatgcttttaaaaaagataaaatgaaaaggagagctctctttttctctctcttgctctgttcttcccttggtcccctctgtcctcccgccctgcctgcagttgagattcagatgccttctgacagagttcagcctcttggagagtcttggggattgttggcacctaaacagaatcagtgacccgggtgctttgtggccagcagcacagaatcaaacccgcatcccagcattgggccacccatctgagggaggccaaaatcatcacagatgctgctgtgctgcagacagatacatgctagtccagagagccgcccctgagatggctgtgagaaccatgtgtctaaggcgtaagataaggatggaaggctgtccaagttatttggaaggcctcggcagcttgggattagcttgggagcgcagcgctgcaaagtggaaaatatgaaaagaccacacaggcccagcagtccagaaactgggcaaaaatattctgcagtggggatttatttttccaaagcaggtaacagaggctagtgagaaagaaaagctcctctctgctccattccaaaggccatcttgtggtcagtttcatgccctcacctgatttttttttttttttttttttttcaattcctaaccttttttaaagtttcctggtctccactggacacagagctttggagacggaggatcccagagggcagtctcagttgcaatcagtgtgtgcccagcctgggcagacaggaaattcctcggatacattattttttctttctttcatagctgtgtctcagaaaggacccatttgtggctctttttcacctcaaaataagatcgatggtatcttgtaaaatgagggtagtgccacttcttagtatttttgaaagctgttttagattttttttttttttccttttctagccatctaaattgactcttccaatataggtctcagaaatccaatatttggagtacaatttcttttaatccagattacacctgccttacaaagcaccccctccttgttcccctctgtttcctctactcagttgggggagaaactcacagctcctccgggatacatatgtgccctcagcagcagctcccaggtgaagttaccagacccctgggcttctccccagctttttctgagttgagtcagacatgtagagtttgggtcacacaggcaagaggaattttccctcggccttactgacaaggacaccaacctagggtgcaaacagatggactatggttcaaggacactggaattgaggagctgatcaaggctctcttcagccttgctctgtccctgcctcttatcagagcacaggtagacacacgggcatagccagcccactcctactgtcacaggcgccccaccattcaaccttccgggaggtcagggaccttctatatgaggcgagtgggtctcagtctgcttgaatggtgatgagattctgctggatctcagcacgctgcaggtgtcttttgagagcattcagtaggacatggtgatccctatttcagcctctaagatgactggtattctatctgaaatgcagagattaagccaaatacctgatgtattgtgaaagccactgattttaagaatggagagaaagggattttttactgcatccctctgtatgaatatgaaatcagagaccagggcatgatgttgctaggattagagcctctcagtctggcctcttcacccaagtgcaagaactcagtctcttactgttcaaagaatcttaacagttgaattatggagggaaattcccttttgccccaagcatttctatatttaaagcaatatcccaggagaatatgttagacttaggatgataccttcagccacttgaagaagaaatagaaggcgctcattccaatatagtctttatttcccattcagatacaggttgagcatccctaatctgaacagttaaaacccccaaatgccccaaaatccaaaccttcctgaacgctatgacaccatgagtggaaaattccacacctaacaaacacatttgctttcttatggttcaatgtacacaaactgttttatatagaaaatgatttcaaatatcataaaattaccttcaggctatgtgtataaagtatatatgagccataaatgaattttgtgtttagactttgtgtccatccccaagatctctcattttatatatatatatatatatatatatatatatatatatatatatatatacacacacacacacatacacaaatattccaggatacaaaaaaaaacatttaaaaatccgagacccagaacacttctggtcccaagcatttcagataagggatatcaatctgtactaccaataaggatttcgtaattcccctaactgcaaatgtcctcttcatttgttctttatgagaaaacccgggtagtgccagcacctggatacagtatttacaccctgcagaccctaaagatttcagattcagttagcaaaccttgatgaagcacctgctggacactgagggacccaaagctcaatcagccataatccctgctttcagagtttatattgtacctgcctaatccacccggcgtgactcatttcaacactaagtactaggggtgttgtcaggagacaaatctgaagtcaggagaggaaaatgcaaaggagccctgccgtgtgatggatgtgcattctcacttgggtcttgaagttctcattcctacatctcaagctagccaggcagtctcctctctatcagaagaaagcactggtaattggctagactggctatgttgaaggtaacatgaactctaagatcttgacccagggcgacttggttttgcttaaggtggcatcaccaatgttccaaatcctttagggagatgagggtatccccacagaaaaagaggaataatagaccaatggattttctcctttcaccagtatgtttggaaccctctgatccaatgtcttttgatactgatctcttgtccaaatgagaatgtcgctttagctgaaattcaaatggctgtgacaatttaccgaaatgatgaagtaaccaccattcccacctttcactgcctaggctccaagtctgaatacatttttgaaataggaactcccttttgcaaaaaagaaacctgggtgtcagggaggtgaagtgacttgccctaggagcagacagcatgccaagaatggaattaggctcaggatccagcctgggctcaccctgtgtggctcattcccacccaggaaactgaagataaaagatttgggaaaacacaccaagaaaaaggggcagttttctttgcccaagcatttggtgctagttagaggctgttcactctctcctgctcctcttcggagtagaaataaaggctgtgacacaaggaagccagtggggtgggagggaggcaccataatccctccctaaaacccacagaagactaacctgatactcttttgacccaactgcatcaacactaaacagctgcagaccccctgaatctttcacacatgccaagtgaacattcttgatgatttctctttgtgaccgcaaccacctgcaaaccagaacgactctagaatttccttccccgcccccctttttgtttagtttctaatctcttgtttatgaggtgtggggtttataagggactgaatcaaatgaatgtaacaaaaaagaaaaaaaaaacaaaaaaaaatgccttttctcagggccagtgagttgcaaataatttttaaagaaaagcctataattacatcatctcaataaattttttataaaaaaaaaaaaa

SEQ ID NO: 270 - DNA, 4835 bp, Homo sapiens
ccttgccaagtaacagctttgctgtccaacatcgtgtgctgcttcgcgagaaagtcacattcggaccctttggctagattatcttagacgaattttacaatgtgaagttctgcatagatgccagtcaaccagatgttggaagctggctcaagtacattagattcgctggctgttatgatcagcacaaccttgttgcatgccagataaatgatcagatattctatagagtagttgcagacattgcgccgggagaggagcttctgctgttcatgaagagcgaagactatccccatgaaactatggcgccggatatccacgaagaacggcaatatcgctgcgaagactgtgaccagctctttgaatctaaggctgaactagcagatcaccaaaagtttccatgcagtactcctcactcagcattttcaatggttgaagaggactttcagcaaaaactcgaaagcgagaatgatctccaagagatacacacgatccaggagtgtaaggaatgtgaccaagtttttcctgatttgcaaagcctggagaaacacatgctgtcacatactgaagagagggaatacaagtgtgatcagtgtcccaaggcatttaactggaagtccaatttaattcgccaccagatgtcacatgacagtggaaagcactatgaatgtgaaaactgtgccaaggttttcacggaccctagcaaccttcagcggcacattcgctctcagcatgtcggtgcccgggcccatgcatgcccggagtgtggcaaaacgtttgccacttcgtcgggcctcaaacaacacaagcacatccacagcagtgtgaagccctttatctgtgaggtctgccataaatcctatactcagttttcaaacctttgccgtcataagcgcatgcatgctgattgcagaacccaaatcaagtgcaaagactgtggacaaatgttcagcactacgtcttccttaaataaacacaggaggttttgtgagggcaagaaccattttgcggcaggtggattttttggccaaggcatttcacttcctggaaccccagctatggataaaacgtccatggttaatatgagtcatgccaacccgggccttgctgactattttggcgccaataggcatcctgctggtcttacctttccaacagctcctggattttcttttagcttccctggtctgtttccttccggcttgtaccacaggcctcctttgatacctgctagttctcctgttaaaggactatcaagtactgaacagacaaacaaaagtcaaagtcccctcatgacacatcctcagatactgccagctacacaggatattttgaaggcactatctaaacacccatctgtaggggacaataagccagtggagctccagcccgagaggtcctctgaagagaggccctttgagaaaatcagtgaccagtcagagagtagtgaccttgatgatgtcagtacaccaagtggcagtgacctggaaacaacctcgggctctgatctggaaagtgacattgaaagtgataaagagaaatttaaagaaaatggtaaaatgttcaaagacaaagtaagccctcttcagaatctggcttcaataaataataagaaagaatacagcaatcattccattttctcaccatctttagaggagcagactgcggtgtcaggagctgtgaatgattctataaaggctattgcttctattgctgaaaaatactttggttcaacaggactggtggggctgcaagacaaaaaagttggagctttaccttacccttccatgtttcccctcccattttttccagcattctctcaatcaatgtacccatttcctgatagagacttgagatcgttacctttgaaaatggaaccccaatcaccaggtgaagtaaagaaactgcagaagggcagctctgagtccccctttgatctcaccactaagcgaaaggatgagaagcccttgactccagtcccctccaagcctccagtgacacctgccacaagccaagaccagcccctggatctaagtatgggcagtaggagtagagccagtgggacaaagctgactgagcctcgaaaaaaccacgtgtttgggggaaaaaaaggaagcaacgtcgaatcaagacctgcttcagatggttccttgcagcatgcaagacccactcctttctttatggaccctatttacagagtagagaaaagaaaactaactgacccacttgaagctttaaaagagaaatacttgaggccttctccaggattcttgtttcacccacaattccaactgcctgatcagagaacttggatgtcagctattgaaaacatggcagaaaagctagagagcttcagtgccctgaaacctgaggccagtgagctcttacagtcagtgccctctatgttcaacttcagggcgcctcccaatgccctgccagagaaccttctgcggaagggaaaggagcgctatacctgcagatactgtggcaagatttttccaaggtctgcaaacctaacacggcacttgagaacccacacaggagagcagccttacagatgcaaatactgtgacagatcatttagcatatcttctaacttgcaaaggcatgttcgcaacatccacaataaagagaagccatttaagtgtcacttatgtgataggtgttttggtcaacaaaccaatttagacagacacctaaagaaacatgagaatgggaacatgtccggtacagcaacatcgtcgcctcattctgaactggaaagtacaggtgcgattctggatgacaaagaagatgcttacttcacagaaattcgaaatttcattgggaacagcaaccatggcagccaatctcccaggaatgtggaggagagaatgaatggcagtcattttaaagatgaaaaggctttggtgaccagtcaaaattcagacttgctggatgatgaagaagttgaagatgaggtgttgttagatgaggaggatgaagacaatgatattactggaaaaacaggaaaggaaccagtgacaagtaatttacatgaaggaaaccctgaggatgactatgaagaaaccagtgccctggagatgagttgcaagacatccccagtgaggtataaagaggaagaatataaaagtggactttctgctctagatcatataaggcacttcacagatagcctcaaaatgaggaaaatggaagataatcaatattctgaagctgagctgtcttcttttagtacttcccatgtgccagaggaacttaagcagccgttacacagaaagtccaaatcgcaggcatatgctatgatgctgtcactgtctgacaaggagtccctccattctacatcccacagttcttccaacgtgtggcacagtatggccagggctgcggcggaatccagtgctatccagtccataagccacgtatgacgttatcaaggttgaccagagtgggaccaagtccaacagtagcatggctctttcatataggactatttacaagactgctgagcagaatgccttataaacctgcagggtcactcatctaaagtctagtgaccttaaactgaatgatttaaaaaagaaaagaaagaaaaaagaaactatttattctcgatattttgttttgcacagcaaaggcagctgctgacttctggaagatcaatcaatgcgacttaaagtgattcagtgaaaacaaaaaacttggtgggctgaaggcatcttccagtttaccccaccttagggtatgggtgggtgagaagggcagttgagatggcagcattgatatgaatgaacactccatagaaactgaattctcttttgtacaagatcacctgacatgattgggaacagttgcttttaattacagatttaatttttttcttcgttaaagttttatgtaatttaaccctttgaagacagaagtagttggatgaaatgcacagtcaattattatagaaactgataacagggagtacttgttcccccttttgccttcttaagtacattgtttaaaactagggaaaaagggtatgtgtatattgtaaactatggatgttaacactcaaagaggttaagtcagtgaagtaacctattcatcaccagtaccgctgtaccactaataaattgtttgccaaatccttgtaataacatcttaattttagacaatcatgtcactgtttttaatgtttatttttttgtgtgtgttgcgtgtatcatgtatttatttgttggcaaactattgtttgttgattaaaatagcactgttccagtcagccactactttatgacgtctgaggcacacccctttccgaatttcaaggaccaaggtgacccgacctgtgtatgagagtgccaaatggtgtttggcttttcttaacattcctttttgtttgtttgttttgttttccttcttaatgaactaaatacgaatagatgcaacttagtttttgtaatactgaaatcgattcaattgtataaacgattataatttctttcatggaagcatgattcttctgattaaaaactgtactccatattttatgctggttgtctgcaagcttgtgcgatgttatgttcatgttaatcctatttgtaaaatgaagtgttcccaaccttatgttaaaagagagaagtaaataacagactgtattcagttattttgccctttattgaggaaccagatttgttttctttttgtttgtaatctcattttgaaataatcagcaagttgaggtactttcttcaaatgctttgtacaatataaactgttatgcctttcagtgcattactatgggaggagcaactaaaaaataaagacttacaaaaaggagtattttt

SEQ ID NO: 271 - DNA, 1858 bp, Homo sapiens
ctctgcctgggtgtctccctctctcagtgtgtgtgtctctctgtctgttttcacactctcctccccaatcgagcgaggcccacacctggcgcatcactgccgagccattagctgcgggtttcctttcatcttcgctgtggcagacgtttctatttatccacttgcgctcgccgagtggcgtcaccagcggtactgtaatgacgattgcagcaggaggatgacagcttagaaagaagagggcaatggggcttcctcccagaggcggtgcggcacagaggagcgctcgcttcacaaggtgaccctagctcccaccgccaccgccgcggtcgcggtccagaccgcgctccagcagctccgcgccctcccaggcacccggcctttctttctccctcttgcaaccaagatccgtccggccgctggagacccagggagccggggttaggaactcacttggggctttcccctcccccaccggagagccccgggatggagagccgaaaggacatggttgtgtttctggatgggggtcagcttggcactctggttggcaagagagtctcaaatttgtccgaagccgtgggcagcccgctgccggagccgcccgagaaaatggtgccccgtggttgcctgagccctcgggccgtccctccggccacccgggagcgcggcgggggaggcccggaggaggagccggtagatggactcgcaggcagcgcggcggggccgggcgccgagccccaggtagctggggcggccatgctcggcccaggacccccggccccctcagtcgacagcctctccggacaggggcaacccagtagctcggacaccgagtcggatttctatgaagaaatcgaggtgagctgcaccccggactgcgccaccgggaacgccgagtaccagcacagcaaagggtccggctccgaggcgctggtcggcagtccgaacggagggagcgagacccccaagagcaacggcggcagtggtgggggcggctcgcaaggcaccctggcgtgcagcgccagtgaccagatgcgtcgttaccgcaccgccttcacccgagagcagattgcgcggctggagaaggaattctaccgggagaactacgtatccaggccgcggagatgtgagctggcggccgccctaaacctgccggaaaccaccatcaaggtgtggttccagaaccggcgcatgaaggacaagcggcagcgcctggccatgacgtggccgcacccggcggaccccgccttctacacttacatgatgagccatgcggcggccgcgggcggcctgccctaccccttcccatcgcacctgcccctgccctactactcgccggtgggcctgggcgccgcatccgccgcctccgccgccgcctcgcccttcagcggctcgctgcgcccgctcgacacgttccgcgtgctgtcgcagccctacccgcggcccgaactgctgtgcgccttccgccacccgccgctctaccccgggcccgcgcacggactgggcgcctctgccggcggcccctgctcctgcctcgcctgtcacagcggcccggccaacgggctggcgccccgggctgccgccgcctcggacttcacctgtgcctccacctcccgctcggactccttcctcaccttcgcgccctcggtgctcagcaaggcctcctccgtcgcgctggaccagagggaggaggtgcccctcactagataaggggccgccggctggctgccggctccatgacgcccgtggggtcaccccccggccccgggactcagccagcctcgctcctcgctcctcgctcctcgcccctaggacgccaagggggaaaggagagggcggaaaaggaccagcgggatcc

SEQ ID NO: 272 - DNA, 356 bp, Homo sapiens
cagctgggagaccacagggtactcggggttgggcttggtcggagagaagtagaccaagcccattcagaggtccggaaggggcagaggtcctgggacacgagctgggaacacggggcgctccctaacccaggctgcggcgcgtctctccccgcaggtgtggttccagaaccggcgcatgaaggacaagcggcagcgcctggccatgtcctggccgcacccagccgaccccagcttctacacctacatgatgacgcacgcggccgccaccggaagcctgccctaccccttccactcgcacgtgccgctgcactactacccgcacgtgggcgtcacggcggcggcggccgcggctgcag

SEQ ID NO: 273 - DNA, 4341 bp, Homo sapiens
aaaccaataaggttaggacaagagaatagctgtggtttgcgttgcaaaaaccaaaaaaaaaaaaaaaaaaaaaaaaagaaagccccgaggctccatgggcagacctacaaggctgcgcaaacaaatcgagggatgagattctgctgtttctttgtctagggttctcagatgctatctgccgctgctgtttggtggggaaggagcgctgggcgcaaagctgttaccaaacagaacggtgggagctgatggctccgagtttggggcgaggtagaaactctccagtgccacttccgactttaagccttcctgttgccgtccactgtggcgggtttcttcctggggaacacgttttcgctcagtcgctcggcagcccgagcctgcggcagcggccaggcgcctgccccctgcgccgagctttcccctgcagaggcgctccactcccagaagcgccgcggctgcaccagagcgcctgagagcccccgcgcgtacccatccaggagcaaaactatgtcaggaatggaggtttgctaacccagaaaattcgaaggaacacattaaactggtggatgcagcagatgtaagcgctgtgcaaacatctcaagccagttcagatgttgctgtttcctcaagttgcaggtctatggaaatgcaggatctaaccagcccgcatagccgtctgagtggtagtagtgaatcccccagtggccccaaactcggtaactctcatataaatagtaattccatgactcccaatggcaccgaagttaaaacagagccaatgagcagcagtgaaacagcttcaacgacagccgacgggtctttaaacaatttctcaggttcagcaattgggagcagtagtttcagcccacgaccaactcaccagttctctccaccacagatttacccttccaacagaccatacccacatattctccctaccccttcctcacaaactatggctgcatatgggcaaacacagtttaccacaggaatgcaacaagctacagcctatgccacgtacccacagccaggacagccgtacggcatttcctcatatggtgcattgtgggcaggcatcaagactgaaggtggattgtcacagtctcagtcacctggacagacaggatttctcagctatggcacaagcttcagtacccctcaacctggacaggcaccatacagctaccagatgcaaggtagcagttttacaacatcatcaggaatatatacaggaaataattcactcacaaattcctctggatttaatagttcacagcaggactatccgtcttatcccagttttggccagggtcagtacgcacagtattataacagctcaccgtatccagcacattatatgaccagcagcaacaccagcccaacgacaccatccaccaatgccacttaccagcttcaagaaccgccatctggcatcaccagccaagcagttacagatcccacagcagagtacagcacaatccacagcccatcaacacccattaaagattcagattctgatcgattgcgtcgaggttcagatgggaaatcacgtggacggggccgaagaaacaataatccttcacctcccccagattctgatcttgagagagtgttcatctgggacttggatgagacaatcattgttttccactccttgcttactgggtcctacgccaacagatatgggagggatccacccacttcagtttcccttggactgcgaatggaagaaatgattttcaacttggcagacacacatttattttttaatgacttagaagaatgtgaccaagtccatatagatgatgtttcttcagatgataacggacaggacctaagcacatataactttggaacagatggctttcctgctgcagcaaccagtgctaacttatgtttggcaactggtgtacggggcggtgtggactggatgagaaagttggccttccgctacagacgggtaaaagagatctacaacacctacaaaaataatgttggaggtctgcttggtccagctaagagggaagcctggctgcagttgagggccgaaattgaagccctgaccgactcctggttgacactggccctgaaagcactctcgctcattcactcccggacaaactgtgtgaatattttagtaacaactactcagctcatcccagcattggcgaaagtcctgctgtatgggttaggaattgtatttccaatagaaaatatttacagtgcaactaaaataggaaaagaaagctgttttgagagaataattcaaaggtttggaagaaaagtggtgtatgttgttataggagatggtgtagaagaagaacaaggagcaaaaaagcacgcgatgcccttctggaggatctccagccactcggacctcatggccctgcaccatgccttggaactggagtacctgtaacagcgctcggcactttgacagcgcacagctgctctgtgaccagggacagatccagcaggccccagtctcgcatcagcgccggcctccagaacttagcaatttccgcctggtgatgcgcagttgctgtcagtcttgacctctgcctttgtggtgaatggaggaccacgtctatttcatcagaacagctgttgactctagtactgtgaatccagtgaaaataagccatgagaatgttttagcacagcgttatgtgtctgccacattaactacacggttcaaacctgtgaagaaaggacctgcaaacgcttcagttgttagcattttcaatgtgatataaacagcttctccaatacagcaaacctaattgcacaacagagactgaaatgtgtttcctgaataccagtggaggaattttcttgtaaagaaggtttactttttggtgtctcatacccagggtaatctgtacatctctacttatttatgaacagactttttttaaaaagataaaaaaacagctttattgaggtataattcacccaccagacttttttaaacatcaaataattgaagagacaatagcattagaaataagtgattaaaggcctctgcctcacaacatggcaagtacagtactttgaattttagcacattgcatagtagttttaagtatgtctaatttaaacgtataatatgtacatcactgagacaatcatgtacagaaagaatttttggtgtaaatttgtaataatggataattcttttacatattgtttagggaaatgatattgaaaggtagcaatgcctggatagtgaagcatgaggcagcacgtgcacaaattcatgtgccgtgccttatctgagttttcggtataaatatgtagataatggattttttttttttagataatgttgtcaagaccaaaagcatggatgtcaagtgtcagtaaggattttgttttctaaaattttttcctgcatcagttcttctgagggccttgatgaaataacacagcagtttcttaaacaatttgaaacaaaatgagctctcctaccacctcactttttcatttccacactaatgtattatatgtaactacttggaaaaaataattattcaaatgcttcttcccacaaagaatatagatgatagtagatatattttattaataaaatggttcatgaatcggagactaacaaagttttcatgtgctcagaattattaattatcgtgtctgcattttctttcgataaaggaagacacacgatgctaatccggaaatcagcaaactttgcattactccctatgtgcgtattttctctttcttcctgtcaccctgaggaaggttcattgccattgtcatcaccatggaaacaacgttcctctccacctgcattatgtactacatgacaggcatcaatctggggaaataataaaattatcacctttgtcagaccataagagtttctccaaaagtggtcagtttggctgggcaatattttctctcatctaacaaacacaatccattgtcatgaaattacccttaggatgagtcttctttaatcaatcatatattgggcgggaaaaacaccagctttgacccgaagtagttgaagagctacttcattcttttctgaagttgtgtgttgctgctagaaatagtcatttgtgaattatccaaattgtttaaattcacaattgaattagttttttcttcctttttgcttgaagcaaacagttgacaatttttaaccttttcattttatgtttttgtactctgcagactgaaaagacaaagtttatcttggccttactgtataaaggtgtgctgtgtccaccgttgtgtacagaatttttcttcattaattttgtgtttaagttaataaaatttatttgtgatgtactgtaaaaaaaaaaaaaaaaa

SEQ ID NO: 274 - DNA, 3096 bp, Homo sapiens
cgggcgcccagagggcaaatgaggggcggcggggtggcgggtcggggggagacgcggaatttcccagcgcgggggctctggcttaccctgcaaccgggcagtctctttctgtttacggagagaaaggggaaatggaaaagtcggggaggcggtggctggcgtccgctgcgccgcccctgggcaggctcagacgccgtgagtcaggggcagagcagggcggtctgagcgtgcgggcgacgcgggtctcactcgtccgctccgctctggactgcgcgccacgctctggggtccggcgccctggttcctgcttctgccgctgccgccgccggatcccagtggcccggcgtgctcggctcccacaggcctgcagccagcatcgcaccgaaccttcggggggccgcggctggagcgctcggccggcgtgggagcgccaaggccgcagatgcaatcttcttaccgcgaagaagccaggggaataggtagccacatcttgtttgcagataagaaaggaagctaacgcagtatctgcaaagccaggagtctgactcagtacttttctcactcatgcatacaaagcagctaaaaatgacacagcttatttaccatgcccctgacactgcactgagcactttatgagcttgaactctgttaatcctcacgaccacctcatgagactctccagaaagagcaacagtaatggagtacatgagcactggaagtgacaataaagaagagattgatttattaattaaacatttaaatgtgtctgatgtaatagacattatggaaaatctttatgcaagtgaagagccagcagtttatgaacccagtctaatgaccatgtgtcaagacagtaatcaaaacgatgagcgttctaagtctctgctgcttagtggccaagaggtaccatggttgtcatcagtcagatatggaactgtggaggatttgcttgcttttgcaaaccatatatccaacactgcaaagcatttttatggacaacgaccacaggaatctggaattttattaaacatggtcatcactccccaaaatggacgttaccaaatagattccgatgttctcctgatcccctggaagctgacttacaggaatattggttctgattttattcctcggggcgcctttggaaaggtatacttggcacaagatataaagacgaagaaaagaatggcgtgtaaactgatcccagtagatcaatttaagccatctgatgtggaaatccaggcttgcttccggcacgagaacatcgcagagctgtatggcgcagtcctgtggggtgaaactgtccatctctttatggaagcaggcgagggagggtctgttctggagaaactggagagctgtggaccaatgagagaatttgaaattatttgggtgacaaagcatgttctcaagggacttgattttctacactcaaagaaagtgatccatcatgatattaaacctagcaacattgttttcatgtccacaaaagctgttttggtggattttggcctaagtgttcaaatgaccgaagatgtctattttcctaaggacctccgaggaacagagatttacatgagcccagaggtcatcctgtgcaggggccattcaaccaaagcagacatctacagcctgggggccacgctcatccacatgcagacgggcaccccaccctgggtgaagcgctaccctcgctcagcctatccctcctacctgtacataatccacaagcaagcacctccactggaagacattgcagatgactgcagtccagggatgagagagctgatagaagcttccctggagagaaaccccaatcaccgcccaagagccgcagacctactaaaacatgaggccctgaacccgcccagagaggatcagccacgctgtcagagtctggactctgccctcttggagcgcaagaggctgctgagtaggaaggagctggaacttcctgagaacattgctgattcttcgtgcacaggaagcaccgaggaatctgagatgctcaagaggcaacgctctctctacatcgacctcggcgctctggctggctacttcaatcttgttcggggaccaccaacgcttgaatatggctgaaggatgccatgtttgctctaaattaagacagcattgatctcctggaggctggttctgctgcctctacacaggggccctgtacagtgaatggtgccattttcgaaggagcagtgtgacctcctgtgacccatgaatgtgcctccaagcggccctgtgtgtttgacatgtgaagctatttgatatgcaccaggtctcaaggttctcatttctcaggtgacgtgattctaaggcaggaatttgagagttcacagaaggatcgtgtctgctgactgtttcattcactgtgcactttgctcaaaattttaaaaataccaatcacaaggataatagagtagcctaaaattactattcttggttcttatttaagtatggaatattcattttactcagaatagctgttttgtgtatattggtgtatattatataactctttgagcctttattggtaaattctggtatacattgaattcattataatttgggtgactagaacaacttgaagattgtagcaataagctggactagtgtcctaaaaatggctaactgatgaattagaagccatctgacagcaggccactagtgacagtttcttttgtgttcctatggaaacattttatactgtacatgctatgctgaagacattcaaaacgtgatgttttgaatgtggataaaactgtgtaaaccacataatttttgtacatcccaaaggatgagaatgtgacctttaagaaaaatgaaaacttttgtaaattattgatgattttgtaattcttatgactaaattttcttttaagcatttgtatattaaaatagcatactgtgtatgttttatatcaaatgccttcatgaatctttcatacatatatatatttgtaacattgtaaagtatgtgagtagtcttatgtaaagtatgtttttacattatgcaaataaaacccaatacttttgtccaatgtggttggtcaaatcaactgaataaattcagtattttgcctt

SEQ ID NO: 275 - DNA, 4456 bp, Homo sapiens
cgccgccgcgcgagggagcgaccagggcagcgcgacgcgggcagagcgagcgccgcggaccccggaggcgagcggccgagggagcccagtcccaacttcgggccccggccccgcgcgccccggcccggccccgcgaggtctcggcgcggaagatggccggcggcgtggacggccccatcgggatcccgttccccgaccacagcagcgacatcctgagtgggctgaacgagcagcggacgcagggcctgctgtgcgacgtggtgatcctggtggagggccgcgagttccccacgcaccgctcggtgctggccgcctgcagccagtacttcaagaagctgttcacgtcgggcgccgtggtggaccagcagaacgtgtacgagatcgacttcgtcagcgccgaggcgctcaccgcgctcatggacttcgcctacacggccacgctcaccgtcagcacagccaacgtgggtgacatcctcagcgccgcccgcctgctggagatccccgccgtgagccacgtgtgcgccgacctcctggaccggcagatcctggcggccgacgcgggcgccgacgccgggcagctggaccttgtagatcaaattgatcagcgcaacctcctccgcgccaaggagtacctcgagttcttccagagcaaccccatgaacagcctgccccccgcggccgccgccgccgctgccagcttcccgtggtccgcctttggggcgtccgatgatgacctggatgccaccaaggaggccgtggccgccgctgtggccgccgtggccgcgggcgactgcaacggcttagacttctatgggccgggccccccggccgagcggcccccgacgggggacggggacgagggcgacagcaacccgggtctgtggccagagcgggatgaggacgcccccaccgggggtctctttccgccgccggtggccccgccggccgccacgcagaacggccactacggccgcggcggagaggaggaggccgcctcgctgtcggaggcggcccccgagccgggcgactctccgggcttcctgtcgggagcggccgagggcgaggacggggacgggcccgacgtggacgggctggcggccagcacgctgctgcagcagatgatgtcatcggtgggccgggcgggggccgcggcgggggacagcgacgaggagtcgcgggccgacgacaagggcgtcatggactactacctgaagtacttcagcggcgcccacgacggcgacgtctacccggcctggtcgcagaaggtggagaagaagatccgagccaaggccttccagaagtgccccatctgcgagaaggtcatccagggcgccggcaagctgccgcgacacatccgcacccacacgggcgagaagccctacgagtgcaacatctgcaaggtccgcttcaccaggcaggacaagctgaaggtgcacatgcggaagcacacgggcgagaagccgtacctgtgccagcagtgcggcgccgcctttgcccacaactacgacctgaagaaccacatgcgcgtgcacacgggcctgcgcccctaccagtgcgacagctgctgcaagaccttcgtccgctccgaccacctgcacagacacctcaagaaagacggctgcaacggcgtcccctcgcgccgcggccgcaagccccgcgtccggggcggggcgcccgaccccagcccgggggccaccgcgacccccggcgcccccgcccagcccagctcccccgacgcccggcgcaacggccaggagaagcactttaaggacgaggacgaggacgaggacgtggccagccccgacggcttgggccggttgaatgtagcgggcgccggtggaggaggtgacagcggaggtggccccggggccgccaccgacggtaacttcacagccggactcgcctaaaaaccaaaaagagaaaacagaaacccgagaaagagagagacagagagagagaaaaaaaatcacccaccacccccccaaaaacacaaaaaaagaaaatctatctatatacagatatctatatctatatatatatatacagatatatatatatgacgcgtcacagaatctagggtagcgctttctcagatttccctcctttctgacgtttttctccctccgcaggggccccggccctccctggctccccttccccccaccaccccatcgctgggtttcggggcttggtttggggttttttgtaggacacaaggaatccgagaccccgcacagccccctgggcacccggcatggggcctggggcccgatccgaggccctgggctggggggagggtagacgtgggggcgctggggggggactggggtgggcttttaatttcctcccctcgctggtttctatgagtctttcagacaagaccttaaatgatttctgtctgctctgagcggacgttaaaatgggcccccgtcccccgacccgcaccctccttcctcagggcacttactaagggaggggtctccctctccatctccccagtggcctccccgcctccaaccctgcctgcggcctccccccgtcgcccaccccacgtctcctggccactgagacacaaacctatttatttctaggcctggagaaaggagatcggactggggttcccggtggggcgccaggatggctcctgggggtgctcctgccgccttccttcacggcacttacaaccggcgggacccccagggaccacccctcagggcgcccccccacccccgcccggtccacctagacccccacgtttggagattcaaaacttctgtcttcgtcctctcccccgagccccctctcccaaatttttaaagcactttttagatttttttttctctttcctccttaaaaacaaaatttatatatagatatatatatatatataaataatatacttttcctcagaggagcaggcaacagtgtgggataaacagagtcacgatcagaggaaccccagggtctggtgatggcagggatggggggagagagagaaaatccacaaattccaatgtcacaaaagcaataaaacaaactagaaaaaaaaaaggttttacaaaatgaaaggaaggaaaaaaaaaaaggcaaccaaccacattagaagtcttggcactttgtaacggaacgggtactacactttatcttaattcttaatttaaaaacatgtttacaagttacaaccaacttctatgaaaagttgaaaagacaaaaaaaaaaaaaaaaagcgagcgagagagagagcgagagagagagcgagagcagaagaaattcctaaaagtcgatttatttttgtacaaaataataaaaaaaaaaacccaccacaaacgtagaatccacttctgttccccaaaaagcgagaaggggggttcaggaggaagccatcgcaggggacctgggagacgccccgaggtgtttgtgcttcacccccagacgtcagcctcgaaggcaggactgtggggtgttcgtgctgtgttccccccgctccccctttctgtccccttttttggttctgacgtgaagaggtcttagcgcccgcttctgtccacggggtctctccttcctcctccctagctcagggatgggccttccagccggagcaccccgatccccatccggcaccccccaatcccccaacacgcctgtccctcccgcatggccaccaaggagctggaccttggatgcgcctaccctgctgaggtgggtgacaggggccccccacctccagggccttagaaccaccgcccctctccccaccccaggcacccctctttttactcaaaggcactgactgtaatccagggggactgggacctgcctccccccaacctctggctcccacaaggcccggtgttgaccgagccacaggccacggacaggggccggggttggggagactatgtcgccagatgccaggacgccctcaccccgtttgcatatgcaatgctagcatgggaccccgaaaatagacgctctgctgcactgagacttcttgtcaatgcccaaccggcgggggggtgtctccctgcccccgacccccccatacccccttctctgtgacacacacatcttctcgtctctttttctttcattgttaaagggaagctttttaagaaggcaattttcatattgtttctacgggatggttttggttcccttcccttcccacccccccttaagcctgtcagccccctccaaatgtctcaggatcccccctctcccctggggctgggtgacagcaccccggctgcgttcacaccccagtgtcacagggcgagctgttctggagagaaaaccatctgtcgtggctgagcggggagcttgaacacccaggccagggacacccctccccagctcccagagaggccccctgaggggtgagccctctttccaccttcccctatccatgcaccccctcgcaataaaaccaactctaaaatcaaaaaaaaaaaaaaaa

SEQ ID NO: 276 - DNA, 2007 bp, Homo sapiens
acagcagggattttgacaacaacaccccgctacacatagcagcccagaacaactgcccggccatcatgaatgccctgatcgaagcaggggcccacatggacgccaccaatgccttcaagaagacggcctacgagctgctggacgagaagctgctggccaggggtaccatgcagcccttcaactacgtgaccctgcagtgccttgcggcccgggccctggataagaacaagatcccttacaagggcttcatcccggaagatctggaggcgttcatcgaactgcactgacctgcccagaacgcctgcaccctcacctctcccctctcctgctgagatgggggaaatccggctgcggcatagcagatgctcgttcttgcctccttcaggcaccaatcaggagaagggttctgcctcccatcccctctacctgcagacagggtcggaggtgttagcgagcctttggtgctagaagcctgcggggtcatgtgctaagaggacagtctttctccgggagcccgctcactcattctgagttaggaaaagacacaagaccttccccacatcctgtctgcctgggttagggaggcctttgccttgttacctagaggcggagggactgaagccattgcgttccttccctgctagaaacacaggaagaagttgaggacggtctgccttttctcgtccctttacctggccagataactccagccgctgaatacagtgttaggactgggggctcctgagatgagagtttgagattcagggaatgagaccacctctcatttcttccagcatgatcgcgccctgctcccgtgccaccgtagtccctggcagacaggcagggctctgcccagggcagcctgccacttgcatagctttcggttggtttggtgttctgtttatttaataagtgggcaggttgcaagcgttgcacagaaattctgagattttactgcctttttttttttttttttaagaaagttgtttgttggactccataagtgaatttcaagcagtgaggattttgtggtgcctgagatggccgagggcacagggagtgagctgtatgtgtgaggaatttggtgagcgagataaaagtccacggtgtcaacccctaaaacatgggtgaccgtacatttttatacatctccactctacggccttttacaggctttccgattttacaggcctttccaagtttccattctccttagagagagaactgtgcttccaaacagaaatcaggagtgaccacaaagcctgaaaacactttgccacccagcaaagaactggcacaattggtttgggtctgcattgccatagtgcccgagttaaaactgcaggccactctgccttgcaaacctcacgtggcctctgatttcattgtgggtgcatccacaggtggcccgagctgttctttcagctgctccaaggattgagacccaagtcatcatgaaaaaggcccaagtacagtcttaatgcgataaatccactagctaagacgtcgagtgccaagaccagccttccagccgaggtttggacaaagtctcaggttcccgtgactcagggtaaggtgctggggctgccagaggacctgccccagcaagattttttgtcaagagcgagactccatcagcccaggcagacgggagcaggttcttggccagcgtagacagcagcaaacagcagcagggaagccattctcactgcatcctccctgcagtagccacggccaggcccttaggaggagcagtgaccgggggtgtccagaaatatcctgtccctggatggaaactaggtctcgtttggattttttttttttttttgccgtgttaggaaattatttattaatttacaagacaggttttaactcagccgaggtgggaaatggtgtccctgtccctcccaaagcacagagcacagaaatgaggccgtttacatggcgagtctccgtgctggtgtttaagtcattaaaaagatactcaaagaaaaaaaaaaaaaaaaa

SEQ ID NO: 277 - DNA, 2095 bp, Homo sapiens
cttttaaagtttgaggggcggtggtggcggcggccggcaggcgcgggggaacacaggggccgctacgggagccgcgccgccgcccatgtcattccacttcaagtgacttcatgtgatgtcagctgaatgtaaaagacagtgatctcacgcggaggggaagatgtttgccatcaaaatgtgacagaagagacacgctgcatggctcggaacgcatctccttggtggtgggggaaagagacttagaggagagaggctgcgccctggcccagcctggctcggctcagctccgcgcgccatggcaagctcggcttccctggagaccatggtgcccccggcctgcccgcgcgccggagcgtcgccggccacttccaagacactggccttttccatcgagcgcatcatggccaagacgtcggagccccgtgcgccctttgagccccggcctggagcgctagaggcggacggcagccagggcaagaaactgctcaacctctgctcgccgctgccctgtatgatccccctccagcccctaggctacgaggtgccgtcaaagacactgctcagttactcggagctctggaaaagcagcctccgggcgggcggcggcggaggcggcggcggcggtggcggcggcggcggcgggggggccccagtgtgcggcgccagcggcttgtgcaaaaccaactgtggcgtgtgctgcaaggccgagctgggcctggcgccgtccgcgctgcccgcgggcagggtcatcaagccgcaggtcatcaaccaggctgtggggctgccggccagcggctcgctctactacttcaactacctggactcgaccgcgtacccgccgtctgagctcctcagcggccacctcttcccgtctggcctcctcaatgcgcaggcccccgccgccctggctgctcaccccaagctctttctgctggagaacgccaagctggccggcctggctgcggacaagttcccccacccggctccctatccccataaggagcgcttgccggcgccgctggagcaggtactgaaggaaaactcggccctgactgccgagcgcggaggcgtcaagggccacagcaagctgccaggaggctccgcagatggcaagcccaaaaacttcacctgcgaggtgtgcggcaaggtgtttaacgctcactataatctcacccgccacatgccggtccacaccggagccagaccgttcgtgtgcaaagtctgcggcaaaggctttcgccaggccagcacgctctgcaggcacaaaattatccacacccaggaaaagccacataaatgcaaccagtgcggcaaagcgttcaaccgcagctccacgctcaacacgcatatccgcatccacgcgggctacaagcccttcgtctgcgaattttgcggcaaaggctttcaccaaaaagggaactacaagaaccacaagctgacccacagcggcgagaagcagtacaaatgtaccatctgcaacaaggccttccaccaggtctacaacctaaccttccatatgcacacccacaacgacaagaagcctttcacgtgcgccacttgcggcaaagggttttgcagaaactttgacttaaagaaacatgtgcgcaaactccacgacagcgtgggccctgctgccccctccgcaaaggacctgactaggacagtgcagagctgagagctactgccttgcccttccttccctccctgtaccacctgaaaacagatcacacatataaacttatttctaaaattaaaagaaaaaaaaactatagcagagaggctaaaatctatttatcgaaaccagcatatttttggaaagctaaatgtttcctcgatgactggcagcaaactcgtggcccccacctttgtatattcaggaaacttatttaaatccagtgcgccgaaacgtatttaattccaggcctccgcttctcctggggcagccagttttaaccccagcctgtcaccgtgagcgccccagaagagcgcggcgcccctagccatctttatacagccatgtaaatcctcctgtacaagcgaacacggaatatatacatatataactcaataaacagaatcattagtgaaaaaaaaa

SEQ ID NO: 278 - DNA, 2524 bp, Homo sapiens
cccgcccctggctagccgcgcccgcccccgcgctcctgcttcctcccctctttccctccccgcctcccaggcgcgcacccctcccctcgcgcccctcccgcgccctacatccaccgcccggcggagggggctcagtccgcagccgccgccgccaccgccgcgcctcggcctcggtgcaggcagcggccgccgccgccgagacagctgcgcgggcgagcatccccacgcagcaccttggaagttgttttcaaccatatccagcctttgccgaatacatcctatctgccacacatccagcgtgaggtccctccagctacaaggtgggcaccatggcggagaagtttgactgccactactgcagggatcccttgcaggggaagaagtatgtgcaaaaggatggccaccactgctgcctgaaatgctttgacaagttctgtgccaacacctgtgtggaatgccgcaagcccatcggtgcggactccaaggaggtgcactataagaaccgcttctggcatgacacctgcttccgctgtgccaagtgccttcaccccttggccaatgagacctttgtggccaaggacaacaagatcctgtgcaacaagtgcaccactcgggaggactcccccaagtgcaaggggtgcttcaaggccattgtggcaggagatcaaaacgtggagtacaaggggaccgtctggcacaaagactgcttcacctgtagtaactgcaagcaagtcatcgggactggaagcttcttccctaaaggggaggacttctactgcgtgacttgccatgagaccaagtttgccaagcattgcgtgaagtgcaacaaggccatcacatctggaggaatcacttaccaggatcagccctggcatgccgattgctttgtgtgtgttacctgctctaagaagctggctgggcagcgtttcaccgctgtggaggaccagtattactgcgtggattgctacaagaactttgtggccaagaagtgtgctggatgcaagaaccccatcactgggtttggtaaaggctccagtgtggtggcctatgaaggacaatcctggcacgactactgcttccactgcaaaaaatgctccgtgaatctggccaacaagcgctttgttttccaccaggagcaagtgtattgtcccgactgtgccaaaaagctgtaaactgacaggggctcctgtcctgtaaaatggcatttgaatctcgttctttgtgtccttactttctgccctataccatcaataggggaagagtggtccttcccttctttaaagttctccttccgtcttttctcccattttacagtattactcaaataagggcacacagtgatcatattagcatttagcaaaaagcaaccctgcagcaaagtgaatttctgtccggctgcaatttaaaaatgaaaacttaggtagattgactcttctgcatgtttctcatagagcagaaaagtgctaatcatttagccacttagtgatgtaagcaagaagcataggagataaaacccccactgagatgcctctcatgcctcagctgggacccaccgtgtagacacacgacatgcaagagttgcagcggctgctccaactcactgctcaccctcttctgtgagcaggaaaagaaccctactgacatgcatggtttaacttcctcatcagaactctgcccttccttctgttcttttgtgctttcaaataactaacacgaacttccagaaaattaacatttgaacttagctgtaattctaaactgacctttccccgtactaacgtttggtttccccgtgtggcatgttttctgagcgttcctactttaaagcatggaacatgcaggtgatttgggaagtgtagaaagacctgagaaaacgagcctgtttcagaggaacatcgtcacaacgaatacttctggaagcttaacaaaactaaccctgctgtcctttttattgtttttaattaatatttttgttttaattgatagcaaaatagtttatgggtttggaaacttgcatgaaaatattttagccccctcagatgttcctgcagtgctgaaattcatcctacggaagtaaccgcaaaactctagagggggagttgagcaggcgccagggctgtcatcaacatggatatgacatttcacaacagtgactagttgaatcccttgtaacgtagtagttgtctgctctttgtccatgtgttaatgaggactgcaaagtcccttctgttgtgattcctaggacttttcctcaagaggaaatctggatttccacctaccgcttacctgaaatgcaggatcacctacttactgtattctacattattatatgacatagtataatgagacaatatcaaaagtaaacatgtaatgacaatacatactaacattcttgtaggagtggttagagaagctgatgcctcatttctacattctgtcattagctattatcatctaacgtttcagtgtatccttacagaaataaagcagcatatgaataacctgcaaaaaaaaaaaaaaaaaa

SEQ ID NO: 279 - DNA, 1735 bp, Homo sapiens
agggtacgggccgggaccgccgcagcccggggcgggggcacggcaaccgcgaggcctgggggcgcccgccccccgcgccccacgcccggtgccagcgagccgaggcgtgcatctccttatatggtcaaatgacacggcggggtttctcgagggcgggagctgcgcagcgctccactcggccggcagcggagccgcagccaccagccgcccgcgccctccagccccgtccgggagtccccggcccgctgcggtgccgtgagtacctccaaccccctgcgccccggagggaggccgaggggcttagccaccagggctcggaagtgggggccgaatccggtgcgagacccaaggagaggggagcagagccggagttggggagactggttgctgaaaagccaggagtcaaaatgactgagcgctttgactgccaccattgcaacgaatctctctttggcaagaagtacatcctgcgggaggagagcccctactgcgtggtgtgctttgagaccctgttcgccaacacctgcgaggagtgtgggaagcccatcggctgtgactgcaaggacttgtcttacaaggaccggcactggcatgaagcctgtttccactgctcgcagtgcagaaactcactggtggacaagccctttgctgccaaggaggaccagctgctctgtacagactgctattccaacgagtactcatccaagtgccaggaatgcaagaagaccatcatgccaggtacccgcaagatggagtacaagggcagcagctggcatgagacctgcttcatctgccaccgctgccagcagccaattggaaccaagagtttcatccccaaagacaatcagaatttctgtgtgccctgctatgagaaacaacatgccatgcagtgcgttcagtgcaaaaagcccatcaccacgggaggggtcacttaccgggagcagccctggcacaaggagtgcttcgtgtgcaccgcctgcaggaagcagctgtctgggcagcgcttcacagctcgcgatgactttgcctactgcctgaactgcttctgtgacttgtatgccaagaagtgtgctgggtgcaccaaccccatcagcggacttggtggcacaaaatacatctcctttgaggaacggcagtggcataacgactgctttaactgtaagaagtgctccctctcactggtggggcgtggcttcctcacagagagggacgacatcctgtgccccgactgtgggaaagacatctgaattcaacacagagaagttgctgcttgtgatctcacacacagatttttatgttttctttctcacccaggcaatcttgccttctggtttcttccagccacattgagactttcttctagtgcttttcagtgatactcacgtttgcttaaaccctttagtgctttgtgatagttcagtcccagggaaagagaaaactcgccctaggccctaggtgggaagatggtttgaaatttttgtaatcgagtaaggcacacccaaatgtaaaaatccttttgaatgatgcctttataaatctttctctcactgtctatttaagtgcaattaacatatgtcacgaacttgaaagttttctaaactcaataaggtaatgaccagttgttatttacagctctgtaacctcccgttgcgtcaagtctaaaccaagattatgtgacttgcaataaagttattcagaacagaaaaaaaaaaaaaaaaaaaaaaaaaaaaaaaaa

SEQ ID NO: 280 - DNA, 2135 bp, Homo sapiens
aggaagcaggcagagcggggaaggctgagtccacactgcaagtccagagagcagggaactaccttgagtattctactcaaacttatgtctcagagttccccaatttcccaagaagggagagatagaggccacaatccagggggccatctcttaaggtaccaataattttgcagcccagtaggagtcatgtacacggtataagacttggaggaaatgcagggacccttctgttttctcctgcaaagttgaaaaagctgcatgcagttggaagggatcttcagatggtgctggtgactttctgttccttttggagttgacatgcatgtggattggaggaaaaataatcaacatatattctcctttcgtactgtttaaatcacaggaagaagcggctttaagacaaagatcaaaccaaaatgacaactgctcacttttactgtcaatactgcacagcatcacttcttgggaagaaatatgtactaaaggatgacagtccatactgtgttacatgttatgatcgtgtattttctaactattgcgaggaatgcaaaaaaccaattgaatctgattctaaggatctttgttacaaagaccggcactggcatgaaggatgcttcaagtgcaccaaatgcaatcactctttggtggaaaagccttttgctgccaaggatgagcgcctgctgtgcacggagtgctattctaacgagtgctcctccaagtgcttccactgcaagaggaccatcatgcctggttcccgcaaaatggaatttaagggaaactactggcatgaaacctgttttgtgtgtgagaattgccgacaacctatagggacaaagcctttgatctccaaagagagtggcaattattgtgtgccatgttttgagaaggagtttgctcactactgcaacttttgtaagaaggtgataacttcaggtgggataacattttgtgaccagctatggcataaagagtgttttctgtgtagtggctgtaggaaagatctctgtgaagaacagttcatgtccagagacgactatccattctgcgtggactgctacaaccatctttatgccaacaagtgtgtagcctgttccaaacccattagtggtctcacaggtgccaagtttatctgctttcaagacagccagtggcatagcgaatgctttaactgcgggaaatgctctgtctccttggtgggtaaaggcttcctgacccagaacaaggaaatcttctgccaaaaatgtggctccggaatggacactgacatctaggagacagtccttgcccacctaaaatccattttgccttcgttgtcactaaagccagaactcagttgcggtcttatttttgacttaagttttagaaaatattcatgtagtttagagtggaaaagtttttgcacacattttgatcgaactatattctaagcacacaaaaagcacagtagaacagaaatgaatatatgctaaatcacaaagacaactctccttgcaaaatactgcactctgctgttagaagcagaggaaaatatctcttcataatcaaatatatgacatatacctaggagctgtggatgtaattactgaagaatgaggtttttcatacctgaagagtaaaagaaaaactaagagatcaaactgagaggtatacatgaggctagtgtttgcattcctggttatatgtaatgtgataaattagctatgaatggtaaaagaacaaaactgatcagagtaaattcattagcaattatcacatttaagaattgttatcatttaaaaatcatcctttttttcacacatactgactgtagaattaaaaaacaaagctacaatttgccctcatacacactgcttccacagcttgctagttctgtgtttactcaatggaatatgagaactgaggacattatggctctcataatctgcataggtataaagaggatcatttctacctagggatagccaaagcatgggtttcaacacgttttgtattaaatatattttcaaagtccacagtgatttttctaaacgcttacagattccatgaaataaaagtctattctttcaagtggagctaaccaggataatctttgtccccaaaggcaaacctttaaaataaatagatcattaaatctt

SEQ ID NO: 281 - DNA, 5499 bp, Homo sapiens
tctgcccgccttctggctccccgggagcccagactggtcggagcccgagcggtggcagcgcggggagccccacgcgccgaagggagcggacccgacaggacggccctagaggaggtgctgccgccacagtagcagggaccggagtctcgagccgcggcctcccggaccgtgctgcccaggccagctcagggacagccgggagtacgaaagccccaccctctggggcaccccgggagcggaggcgggagcggggacgcgagcaacctctccccctgttggagagaaaagacccttaccactcgggtgagggaaagaagagacccctggaggggacgcctctctcctgcctagaggcgaggaagacccctgtactggccggggaggagacccccagaagtggaaagaagggagctttccgtagggaagcagagtgagaccaccctagcgcgcccccgcccctccaaacacacactctcaacagttcaggactttggaggcaaagagagacggggctgtgcctgtggagtaggcaccctcggcccaccactattcacaggagacaggagtccttacgttcagaagccactccagggaaagaagaggaatcggctttcagccttctggagaggggaagacctccccctcaacttcctcgtgcctagacagtggaacggggtggagcccctccgctcctatctccagcagacagaaagagccctccacctcagaaagatccagtttgggggggaggggaactcccccaagggggaggagacaactcctggttgggagaggctcctcccctcctcccccgggtaacaagcagggtgtggggggtgtgccaccttccccaagtaggacctccttctcctccccctccccctcctccaaccttgactcctcatcctcaggggacccagttcccctcaccaacttgggaggctcagcctcgtccaggaagagccactgaggatgagagccgtcacctgcctctgaagaggggaatccctccaaccccaaactccagtaccaggtggttccctccctttgccggaggaaccttggagacagaacccagaagtaccatggcttctgacctagagagtagcctcacctccatagactggctcccccagctgaccctccgagctaccattgagaagcttggaagtgcctcccaggctgggcctcccgggagcagccgcaagtgttcaccagggtcacccacagatcctaatgccaccctgagcaaagacgaggcagcagtgcaccaggacggcaagccacgatacagctatgccactctcatcacctatgccatcaactcctctccagccaagaagatgaccctcagcgagatttaccgctggatctgtgataacttcccctattacaagaatgctggcattggttggaagaattcaatacggcacaacctttctctcaacaagtgtttccggaaggtgcccagacctcgggatgaccctgggaagggttcctattggacaattgacacctgccctgacatttcccgaaagagaagacaccctccagatgatgatctgtcccaagactcaccagaacaggaggcaagcaagagcccacggggaggcgttgcagggagtggagaagcctcactgcctcctgaggggaatccgcagatgtcacttcagagccccacatctatagccagctacagccagggcacaggatctgtggatggtggagcagtggcagcaggggcttcaggccgagaaagtgctgagggtccccctcccctctataacaccaaccatgactttaaattctcctactcagagatcaactttcaggatctaagctggtccttccgcaacctctataagtccatgctggagaagtcctcttcctcctctcagcacggcttttcttctctcctgggggacatcccaccctcgaacaactactacatgtatcagcagcagcagccaccgccacctcaacagcagcagcagcagcagcagccgccacagccacctccccagcagtcccagccacagcagcagcaggcacctgcccagggcccctcagctgtagggggtgctcctccactgcacaccccaagcacagatggttgtaccccaccagggggaaagcaagctggggcggaaggctatgggcctccccctgtaatggccatgcatccacccccgctgcagcatggaggctaccaccctcatcagcaccatccccactcccaccctgcccagcagccaccacctccacagccacaggcacaaggccaggctcccatcaacaacactggctttgcctttccttctgactggtgctctaatattgactctttaaaggaaagcttcaagatggtgaatcggctcaattggtccagcattgagcagtcacaattctcagaactgatggagagtctacgacaggcagagcagaagaactggaccctcgaccagcatcacattgccaatctgtgtgactccctcaaccacttccttactcagactggtcacgtgccccctcaagggggtacccaccgcccaccagcccctgcccgtattgctgactcctgtgccctcaccagtggcaaacaggagtcagccatgagccaagtgaactcttatgggcacccacaagctccccacctctaccctggcccatcaccaatgtacccaatccccacccaggactcagcaggatacaatcgcccagcacaccatatggtccctcggccatcagtgccacctcctggtgccaatgaggagatccctgatgacttcgactgggacttgatcacttagtgcatcacagagtgtggacatcagcccagggccgcgtggtgaaatctggcagtggggaaagagcaaccccagcccgtcccttccccccgtctgtatatagacatatatcctctttttgttctttctctgtcagagaagccactgcaagatgctgccgaagataaccctctctttcctgcctcattcttctctcttccttcctgttttttcctagttcttttattattattcttatattattattattattattggttatatactgtccatagtctcctgtccctacatcatggatcatgtccaccttttgctaatttaaaatcatcaggctggaagatgaagccatgatagctacagagaaaggttttagactccagtttacctttctcttggagaaactcaatgctaatcccaccttttggccctaaattgttttttgttcccatcagtttcaggccaggactggagaggccacattaccaagtagaaagggtctgaaacattacttggcagccaagaatttggaggttttaaaatggtgctaattctgtcctctgaggtcttccttgtccctttataccttcaatccttacttctgccagtctgtatttcctatcaagggtgaaagtgatgatggtggtgcaggagggtgacaataaaatcctagtggaattggagaccattggaagggatggaatataagtcagtgtgaaactgagtatacactgccatgttacatcagtgtccattggcttgttttgagcctgttctctaagaagataggattggttttagcccaaactctgcttctatggtagggcatgaggacaactattcagcatggttttagcttcttggagatgattccaacttaactattttggctttttaaacataattttctctgaaaattaattgtggctcttatttgcatttacgaatgatcttcccatccctttttcccattcagcaaatattagtttgtcctcctttaattgtttgcccaaatcttccacccatcttttttcttccctcattttctgggattctcaagaaagaaaaagtaacccattatcactctgagtttcgtcgtgccctgagacatgatgggaatctcattcccacctctcatagcagagccaaacctttagtgttggtggtaggaggatggggagaggaaaaaagagctggcaaagaaatggatagggaatattttagttctttaaatatataggcagatgcttctcttggaatccagatcatctggctgaagcttttgcaagtaggctttgaggggtgaaggagattggtggaggagagtaaataatctagaggcaagagttcagtgagggccaagggggacccccagaaaaaggtatggagctaactcatctcttttacaaggggtggccatgacttactgttgcaaagtactcagtgtatatttaatgttgattgttgaattttagttacgagagggaagaacaattttacttctgtccttatttcacttgctgaaaagctgtgggacaaaatgtatggaatagacaaggccactttctttgtgatttctgcttttcatgcatattattttatttacccataatttccaagaggtttggcgttccgctctcctgcttttttctttcatccacccctttcctttttttggaagggggttatatatgagagttcattgaagaagtccagtgaggctgaagtaaaggggcaagatagggcagttaactaaagagcactttatttctttgaagcctttctaagaaagaaatgggggtgcgagtggcttgaatctcccatgatgttggagggcacttagtggggttgaagtatgacataatatttcccattggggaaaggagaatttctcttagagggtggcaaaatgcctttgcccagtgtccctattttaggcatcttttccttccttattccttccagtcagggtgtgtcctatacaaaacttcccatcagttctcctcaatattccccatttgtaaatgatcacttctcttttctaaacccttttcctgttcagatccatacaggatttgcaagggtaggatcatacatgcaaatgccccttgttcatctgtgtcttctgcaaactagtctcatgaagaattctggcgtgcagccagggtagctgaagtttgggtctgggactggagattggccattaggcctcctgagattccagctcccttccaccaagcccagtcttgctacgtggcacagggcaaacctgactccctttgggcctcagtttcccctccccttcatgaaatgaaaagaatactactttttcttgttggtctagcattgctggacacaaagtgtagtcattattgttgtattgggtgatgtgtgcaaaactgcagaagctcactgcctataagaggaaataagagagaaagtggaggagagggacaaaaggagtaattatttggtatagatccacccatcccaacctttctctcctcagtccctgctcctcatgtttctggtttggtgagtcctttgtgccaccacccataatgctttgcattgctgcatcctgggaagggggtatatggtctcacaagttgttgtcattgtttttttgcatgctttcttaataaaaaaaaaaaaagaatgtttacagttttatcttaaaaaaaaaaaaaaaaaa

SEQ ID NO: 282 - DNA, 333 bp, Homo sapiens
cctggcgcccccacaactgagccaaccaagcctccctacagctacatcgcccttattgctatggccatccagagctcaccggggcagcgggccaccctcagtggcatctaccgctacatcatgggccgattcgccttctaccgccacaaccggcccggctggcagaacagcatccgccacaatctgtcactcaacgagtgctttgtcaaggtgccccgcgatgaccgcaagccaggcaagggcagctactggacgctggaccctgactgccacgacatgtttgagcacggcagcttcctacgccgccgccgccgcttcacccggcagacaggt

SEQ ID NO: 283 - DNA, 3993 bp, Homo sapiens
agaagagagaggagagctcgaggcgagagagagagagagagagagagagagagagagagagagagagagagagagataggacttcctccccgattcgcaaagtgaagtcacttcccaaaattagctgaaaaaaaagtttcatccggttaactgtctctttcgctccgctacaacaacaaacgtgcacaggggagtgagggcagggcgctcgcagggggcacgcagggagggcccagggcgccagggaggccgcgccgggctaatccgaaggggctgcgaggtcaggctgtaaccgggtcaatgtgtggaatattggggggctcggctgcagacttggccaaatggacgggactattaaggaggctctgtcggtggtgagcgacgaccagtccctctttgactcagcgtacggagcggcagcccatctccccaaggccgacatgactgcctcggggagtcctgactacgggcagccccacaagatcaaccccctcccaccacagcaggagtggatcaatcagccagtgagggtcaacgtcaagcgggagtatgaccacatgaatggatccagggagtctccggtggactgcagcgttagcaaatgcagcaagctggtgggcggaggcgagtccaaccccatgaactacaacagctatatggacgagaagaatggcccccctcctcccaacatgaccaccaacgagaggagagtcatcgtccccgcagaccccacactgtggacacaggagcatgtgaggcaatggctggagtgggccataaaggagtacagcttgatggagatcgacacatcctttttccagaacatggatggcaaggaactgtgtaaaatgaacaaggaggacttcctccgcgccaccaccctctacaacacggaagtgctgttgtcacacctcagttacctcagggaaagttcactgctggcctataatacaacctcccacaccgaccaatcctcacgattgagtgtcaaagaagacccttcttatgactcagtcagaagaggagcttggggcaataacatgaattctggcctcaacaaaagtcctccccttggaggggcacaaacgatcagtaagaatacagagcaacggccccagccagatccgtatcagatcctgggcccgaccagcagtcgcctagccaaccctggaagcgggcagatccagctgtggcaattcctcctggagctgctctccgacagcgccaacgccagctgtatcacctgggaggggaccaacggggagttcaaaatgacggaccccgatgaggtggccaggcgctggggcgagcggaaaagcaagcccaacatgaattacgacaagctgagccgggccctccgttattactatgataaaaacattatgaccaaagtgcacggcaaaagatatgcttacaaatttgacttccacggcattgcccaggctctgcagccacatccgaccgagtcgtccatgtacaagtacccttctgacatctcctacatgccttcctaccatgcccaccagcagaaggtgaactttgtccctccccatccatcctccatgcctgtcacttcctccagcttctttggagccgcatcacaatactggacctcccccacggggggaatctaccccaaccccaacgtcccccgccatcctaacacccacgtgccttcacacttaggcagctactactagaagcttactcatcagtggccttctagctgaagcccatcctgcacacttactggatgctttggactcaacaggacatatgtggccttgaagggaagacaaaactggatgttctttcttgttggatagaacctttgtatttgttctttaaaaacattttttttaatgttggtaacttttgcttcctctacctgaacaaagagatgaataattccatgggccagtatgccagtttgaattctcagtctcctagcatcttgtgagttgcatattaagattactggaatggttaagtcatggttctgagaaagaagctgtacgttttctttatgtttttatgaccaaagcagtttcttgtcaatacacggggttcagtatgacacagaatcatggacttaacccgtcatgttctggtttgagatttagtgacaaatagaggtgggaagcttataatctaattttaggaggaccaaattcagtggatggcaactggaacattgattgtaaggccagtgaagttttcacccaactggaatttgatggaaagaaggtttgtgtgtttaagacgccaagggcattgcagaatccctctcagtggacagtatgcactcagctgaccactctctctagaaatagtcaagatatgaactaagaaattttaatgcaaatacatacattcctgaaagacggggaattaaattactaatttttttttttttttaaatgatgacagtggtcccagaacttggaaaagttgtagggatttctaaactcaagcagattcgcaagtgctgtgcgcttgtcagaccatcagaccagggccaaccaatcagaaggcaacttactgtataaattatgcagagttattttcctatatctcacagtattaaaaataaataattaaaaattaagaataaataaacgagttgacctcggtcacaaaagcagttttactatcgaatcaatcgctgttattttttttaatgtaatttgtacatcttttttcaatctgtacatttgggctgtctgtatgtttttatagctggtttttaaaaagcataatatgcctatagctgaaaaggaaacagggctgtttaagtcactgacttatgagaaagcaaagcactggtacagttatttaacaggcatacacaagcagggaaaagataatccatttagatctttaatgctttggaaatgcgtgtaacagtactgcaataatcacagctctgggaaaaacaacgaaactttcccttgtggagaggagggattttcctgctctatataagcaacatatttttagacattaaaatatatataattttgcaggtaattgttgacttttttaactatattaagtgttaagctgacaactgtcaaagaagaccatgttgtaaaataatttgactaaataaatggttccttctctcagtgctgaggacagttttcttatttaccgcccccgttaggtcaaagggttttccctggggaactttcctatttacttcttgcactatcaagaatttttcgaatgtacctactgcagtacagcagaaggtaaaaaatcagtgtggtttttcattgttgttgatgatgtttgtagtgtttttgtgtgtgttatttaaatcttcctccagcctaaaagggttttataaaacagcagctaaggccatggataaacctgtatgtaaggactggagcaaagcgagctggtctatccagactggtctgtgagatttaactctgcagcctcccctgggcacttcagacccagacggccaccttctgccactccagcaaagaataagcgccctgcttccttcaggtctcagaccaggactttatggctcatgcagatttttaaggtcatttttcttcccaaggaagaaacttgcctccagttccttcactgttaggtagcttattttcattttctctattttacaatgaaaagagtgagacctgggaagtccttgatttgcaaggaattagactcacagcattggtaaccctagaaccttcttagggtaacactaagtaccttctagacaacatgtctacctaaatgaaatgggatgtgtttcggaacatttgtctccagtttttttttaatcttgcaccctgccatttaaaaagatgtgtaaagcacatattctcaacatatgcacattgatttataaatcatatatacaaactgttacattattcttcatattagaaaacaaatacaaaatagaacattttaaatggtgatataaaaataaattgaaactgaaattctaaaaaaaaaaaaaaa

SEQ ID NO: 284 - DNA, 13746 bp, Homo sapiens
cgccgcctgtgcagccgctgccgccgccgccgccgccgccgccgccgccgccgccgccgccgccgctgccgccccggctgccgcgccgcgccgctgcctctgccccggccgcccccgccgccgctgccgccgccggcccgcagccagccaggcgggcggcccagcccgcctgagcccgcagcggctgccgccgcagcgtcgggtcgctgggtgcgcgggctaccgcggaccgagcggacccgagtgggcgaccaggcgcttgcccgcccagtgccactgccgccgcttcctcgccggagcacaggaccagacacctccagcgcccgctgctgctgccgatgcggcccggacacttttagctgggcgggagggctggagagccgggggccgccgagaaccgccagcgagctgtgccgagagccgcgccgacccgctgcgatcagggacaggcgcccgcccgccgccgccgcctggccgctatggatctattcgactttttcagagactgggacttggagcagcagtgtcactatgaacaagaccgtagtgcacttaaaaaaagggaatgggagcggaggaatcaagaagtccagcaagaagacgatctcttttcttcaggctttgatctttttggggagccatacaaggtagctgaatatacaaacaaaggtgatgcacttgccaaccgagtccagaacacgcttggaaactatgatgaaatgaagaatttgctaactaaccattctaatcagaatcacctagtgggaattccaaagaattctgtgccccagaatcccaacaacaaaaatgaaccaagcttttttccagaacaaaagaacagaataattccacctcaccaggataatacccatccttcagcaccaatgcctccaccttctgttgtgatactgaattcaactctaatacacagcaacagaaaatcaaaacctgagtggtcacgtgatagtcataaccctagcactgtactggcaagccaggccagtggtcagccaaacaagatgcagactttgacacaggaccagtctcaagccaaactggaagacttctttgtctacccagctgaacagccccagattggagaagttgaagagtcaaacccatctgcaaaggaagacagtaaccctaattctagtggagaagatgctttcaaagaaatctttcaatccaattcaccggaagaatctgaattcgccgtgcaagcgcctgggtctcccctagtggcttcctctttattagctcctagcagtggcctttcagttcaaaacttcccaccagggctttactgcaaaacaagcatggggcagcaaaagccaactgcatacgtcagacccatggatggccaggaccaggcaccggacatctcaccaacactgaaaccttcaattgaatttgagaacagctttgggaatctgtcatttggaacactcttggatggaaaacccagtgcagccagttcaaagactaaactgccaaagttcaccatcctccaaacaagtgaagtaagccttcccagtgatccaagctgtgttgaagaaatcttgcgggagatgacccattcctggcctactcctctcacttccatgcatactgctggacactctgagcagagcaccttttccatcccaggacaggaatcgcagcatctgaccccaggattcaccttacaaaagtggaatgacccaaccaccagagcttctacaaagtcagtgtctttcaaatcgatgcttgaggatgacctgaagctgagcagtgatgaagatgaccttgagcctgtgaagaccttgaccactcagtgcactgccactgagctctaccaggctgttgaaaaggcaaaacctaggaataatcctgtgaacccacccttggccactccccagcccccacctgcagtgcaagccagcgggggttctggcagctccagcgaatcggagagcagctctgagtcggattcagacactgaaagtagcaccactgacagcgaatctaatgaggcacctcgtgtggcaactccagagcctgagccaccctcaaccaacaagtggcaactggataaatggcttaacaaagtgacatcccagaacaagtcttttatttgtggccaaaatgaaacacccatggagactatttctctgcctcctccaatcatccaaccaatggaagtccagatgaaagtgaagacgaatgccagtcaggtcccagctgaacccaaagaaaggcctctcctcagtctcattagggagaaagcccgtccacggcccactcagaaaattccagaaacaaaggctttgaagcataagttgtcaacaactagtgagacagtgtctcaaaggacaattgggaaaaaacagcccaaaaaagttgagaagaacaccagcactgacgagtttacctggcccaaaccaaatattaccagcagcactcccaaagaaaaagaaagtgtggagcttcatgacccaccaagaggccgcaacaaagccactgcccacaaaccagcccctaggaaagaaccaagacctaacatccctttggctcccgagaagaagaagtacagagggcctggcaagattgtgccaaagtctcgggaattcattgaaacagattcatctacatctgactccaacacagatcaggaagagaccctgcaaatcaaagtcctgcctccgtgcattatttctggaggtaatactgccaaatccaaggaaatctgtggtgccagcctgaccctcagcaccttaatgagtagcagtggcagcaacaacaacttatccatcagtaatgaagagccaacattttcacctattcctgtcatgcaaactgaaatcctgtcccctctgcgagatcatgagaacctgaaaaacctctgggtgaagattgaccttgacttactctctagagtacctggccacagctcactccatgcagcacctgccaagccagaccacaaggagactgccacaaaacccaagcgtcagacagctgtcacagctgtggagaaaccagcccctaagggcaaacgtaagcacaagccaatagaagttgcagagaagatccctgagaagaagcagcgcctggaggaggccacaactatctgcttgctccctccttgcatctcaccagccccaccccacaagcctcccaacactagagaaaataattcatccaggagagcaaatagaagaaaggaagaaaaactatttcctcctccactttccccactgccagaggaccctccacgccgcagaaatgtcagtggcaataatggtccctttggtcaagacaaaaacatcgccatgactggacaaatcacatctaccaaacctaagagaactgaaggcaaattctgtgctactttcaaagggatatcggtaaatgagggagacactccaaaaaaggcatcctctgccaccatcactgtcaccaatactgctattgccactgctactgtcactgctactgccattgtcaccaccactgtcacagctactgccaccgccacggccaccaccacaactactaccactaccatttccaccatcacctctaccatcactactggcctcatggatagcagtcacctggagatgacgtcctgggcggctctgccccttctatccagcagcagcactaatgtccggagacccaagctcacttttgatgactcggttcacaatgctgattattacatgcaagaagctaagaagctgaagcacaaagctgatgcactgttcgagaaatttggcaaagctgtgaattatgctgatgccgccctctccttcactgaatgtggcaatgccatggaacgcgaccctctggaagcaaagtccccatacaccatgtactctgagactgtggagctcctcaggtatgcaatgaggctgaagaactttgcaagtcccttggcttcggatggggacaaaaagctagcagtactatgctaccgatgtttatcactcctctatttgagaatgtttaagctgaagaaggaccatgctatgaagtactccagatcactgatggaatattttaagcaaaatgcttcaaaagtcgcacagataccctctccatgggtaagcaatggaaagaacactccatccccagtgtctctcaacaacgtctcccccatcaacgcaatggggaactgtaacaatggcccagtcaccattccccagcgcattcaccacatggctgccagccacgtcaacatcactagcaatgtgttacggggctatgaacactgggatatggccgacaaactgacaagagaaaacaaagaattctttggtgatctggacacgctgatggggcctctgacccagcacagcagcatgaccaatcttgtccgctacgttcgccaaggactgtgttggctgcgcatcgatgcccacttgttgtagtgggtgttctcagatctctagcatcacgacccatcactctacctctaccagcgcactgatggtcactggtggaactccactcactggggaacgttctctttggttatgtttgtttttatgcttcttttgttatctgtaaaaaacagaagtcattgtaagttgacactacaacttaagggcagtgtacgttttattacttagtcattttttttcttttagcatttgatatgcatttctcagattccaccatctttttgtgctttatggaatgacagtccctacaatattgttttaagcccacactacccaaaacaaagaatgggaagcacttgtgataaagacaggctcctgagaaatgcaacaagtggtcttacatatacatgagaacttagacacaagggaccatcccccaaactctactcttatacccagaaaagaacatatttcagaatctgtcaaacttttgtgtatcccacagattcaatcttcaggtgagaattttcattgtcaaaacccactggttagatgttgtagcaacatcataaaatcaagagtatcaagaaaataaatgagcatagcaatgctactcttaaaaagatgctatgccacacaaccagaggactttcttgttagcatccctttcctgattccctattttgttaattttaatgataagaagaaagggtgacatttattttgacaagttttaggcatcagctggcatcagtgtttttcaactccattatttgaagtgtaaatcctcacctggggttctctgtgtgcaaagctgtccttttgaagaacagtttggttgatgcatgccttagtagccaaaatgctacactctagacttacaagtgggagttaagagaggtctggaaagtgtccaacaaggaattcacacctctgcctcctttgcaacaacaacatttacacagttggtaagtgggtccataactggcaggatttttaaattgtattttgctcaaatctatgggaacaaaagtcaaggtatcactacctagaagtaatgatatacagttttcttcctagtggcttgaaaatctggacttcctcaattattattcacattttctctcttataggttttctgttttctactttcttttttctcttatctgtgtttccctttcctttgtttggctcattaacttttgactgaattacaattactccttttattaaagtccatattattgtgaatcatttccatgaaaatttctaagaaaactccaaactctctaaatagtagctaacttttatttttttaaaatgagtcgtggggtagtgcttcaccttgagatgctttgaaagagccctaaacattgggaaccattcacctaatttggagacatttctcactggttgtgactacccccttatgatccttcacattcattttatgtccctaaacatcacaatgtaaatatcatttttgatgttccagctcaccagaagattcttacacttggggtaaacactatccatgcattacttactggtaattacctgctggtatataattccatgtagcctttaatatgctgggttatcaaattctgttcactgagttatgaccagataaataatagatatgcacatgaaagatgcaaacttgtgtgattattaaagccagccatgcaggtccatgatagaaacagcaggtgatgactctgcactctcattgtcaaggttagatatatccccagttgcaaaacagccagacttgagctgtgctctggtcatctttgagtttaaggccttttgttgtataaggctgtggaagttgtactccaatggctgaagccatgttgttaatatggctgatgggagcatccctgcagctgaacccagcactttttatgctcccactgtggttgagctttatgtttacagtctcagcaacaacacttatgcatccaaacactcacaaatgaaacctgaaagaatcttttctgagcctcttaaaagaggaaaatgatgataacattaaagactctgaacacccaaggttggtgtcacatataaaaattaagctgatgactttgcagtgactcaagttgtctctttatcatggtttaccaggtagagtgcctggctattactatataatgaagcccactggcttgacttgtaagttcaacctaaaccacaatcctagaccatcatggatttaggagtagattcttcttgaaatcccacatccagaaactagacattagaatgttgaggcagtttcccagagaaacaagcatattgcctcatggatgaaagacttgtagttctagtttcagtgacttgttatatctacttacatacaacagggaggcaagaggattctctgtcatctctggtgactgagtgtaaaatatgtgccaagtctgcagcacagtgaccaaatctgacaatcgagctctggatcaccacttgattatgtagtagactcatttataaagcagcttaggaactaattaaacatggaggatgaattaccttcctatcccttgagataagacatctttcagtttcatgattaaggattgttgctgttttatagttactctgttcatcacagtgtaaatggtgatgcgtgtcgtaggtgtgcagctatttgagggactaagggatggagatattctgtcaaatgaatctcttcagtataccagtttgtgggagggatatgagacatgtggatggcagtgagagatcgtgcctctagatcttgatggaggcttggtgagacacacttaaataagcacgtggaggttagaatagagggcagagtaaaaggaagctccatctgagcaagtacaccaaatgatctcagccctgcaacttgacccaggtagggccaccactacgccttcacttgtcacccaagctccaaccacagagagtttgacaagtttgtgttatgatgttggcttggctttgtatttttaattaactttggatttttagtggttttgtcatataactgtctgagtttggtaggtaggattactttgaaaagggtttactagtgtggtcctccgggtagaatttagctgtaagcatgttgttagccagcctgtagactgttaattacttaataatctcattgggaaaatactagtagttttatatttggatgacataattggaaaagcagattagctgctactacttttaaaagacttaaggtcgggatgcctttttttccatgtaaggaaatgaaaagaccaaaatcttcaggcaaaaagcaagttgcaaaattagaaaccattggctaaaaatgtgttttgttgagtttccaaatggatgaattttcatttggacattacatcactaaattcattagattttgtctgcattggaaagatactcttctagcatatctttcccaaagatatctaatttggattctgtttcatgcaaatttgcatcccggaggttgaagttggagtttgaggttggaaaatatctttgaaggcagaatcagttgagttgtgagggtgaagcctcacatacttctcaacagacatgataaaattcacctgcatgagttggcaggtgggagaaccaaactggatcactgggtaagactactcagtaaagcaatgaactgcttgcttagagaagcatcactatccccattgagaaaaatgtgtggcaagatgatacagctacacagtatcaaatgaatgggtcaattcagcacccccaaatttaattctgtggggaaaaattattgagccagttgtcagtgttctgttacatgactggcagactaaattcttcatcgttgttgttattgttgttgttgtttctcattttcactcgcacggccttattctcataattaaaatctaattcattttctctttagtgttagtagactccaacaacagaagtggcatctgtgtattcataatcagcatttaccctggcaggagactaatcagataggccggtctcagacattaatcctaccatctgatatttttggtgaaggaaaaagtattaattctctttccatcctcctcctcagaaatatagaagccctctttaccaaaatcatcacattttactctgtaatctaccagctaaaagaaaattgcattgtggggagggcagaaagggggtgggggtgggggcgggggggtggggggtggggaagccccacaaagccagattgcagttcttgcccctttttgcgtctgacatgagatgttaaagaattattcatagtgctcacattgggttaggggacactgaactgctttttagatccatgatcagtcatcattcttctaagagattggagctttgctgtttcattaactgtgcagtgtagactaatggtgtttaataaaaatcattcaaaatttcaaactcttttgccagtgacctcaattttgttggctctgtgatttgtatcagactttgaggagggaagggggaagtgaaggaagcctacgtccaggcccctgacaggatgctgcagtagcaagctcaagctcgcctgcctgccagcagttgctggtgagcagcagcatgcagaccagctgtgggaagcctcctgaagaatgccccagctgatgctttcagctgggaatagtttgttcctattggggaactcattgttctccagtctctgcagcaggaagccagctgtcatattcggagggaatttcagatgctttacctttttggttttgtcctgcatcactcatgtggctacgaaagtgtctctgagaatagagcccaatgtggtgacaatgggtagtcaaatgcaccccagatgctcaagccctgttgtggttctgcagtgtttatgaaattgggaggaaggagaccctggacagtaagcaaaattggagacactccaacgaggctaagttaatgccgtgttgcccagaacaagatctagcttctcatttggtcagcctagcatgcaaccagtggtgtgctggtaaaatgtttaacaaccagctcgctgagaatagaaagcacctggtttgcaccatttgccaatttccatggcataaatactaccactttagatgattttaagctaccaactgtgatgtcactgaacacatggttggaaagagatgcacgcagttggctcttgcaagcctgggcaaaaatgcttcaacacgccactggatgcagccagtcagagggttcatatttaatatatgtgttcatgtggacacacacagacacacacacacaaactcacccttacacacacacttcgatgactaaaacaattacatagttttaagatatgaatcaatgtgtgaatgtagaaagcttatgataaggccctagaggtatgggttgccctggaagcctaggttttaagcaggagaatagctgagaagaatgaagccctcctgagctgaaaggagagatggatcaatggagatggttccatcatctccttccatatctcacaggtaaaatgggcactcagaaaaccctcacgattgattttttaaaaagataagtgagtgttttttattttattattattgtcatcattattttgatttacaaatgctatttgtaacttttacatgtaactaggataaagtatttacgggaactctatggagaatagcacaatccagaatttactgtgtttttcttttatgtgacgtggaaactcagtaattctcccaccttcacattgttgttcataagaattttactttagttattagggaatctaagttttttgttaacatttgtttttagttaaaagtatctacttactgttttagctctgaactcaaaccagaatatctctgtatcaattgcatgactattcagaaacaataatccaaaccaaaataattctttttccacccagtacgaagaaaactaagctcagtaacaagaaggcataaactaaagtatataatgaggctttcattaaatacacacacacacacactcacacacacacacatacactttttaaatttttaaattaggcctccacacataaatcattttgaaagtagaatagaaaatctcaaagaattcattctcctggtcctgtgcatcttctgcagttaataagaggtttgtatctggaaagatggaagaacttgttctaaaatcttatttttcaaaaaaaaatttccattttctctctgggcctgtatccatggttgaatgttagccctggaggagatccatgtcttactcgctctttctggcccttctgtcttttgcctctgcaattctttttgtagctggcacgatagcagggactgggggtctatcctttcatggtattgctacaatatttgtccttactggaaaatggtaacatccgggtctgatttaattggcattacacttacacagggactctgagcacccccgtcaccacaccagacagtggaccagttttcacagctacaaagagctagaaatgtgtttaacatcatccagtgcatcccctaattcaaaaccatcctcactaatcaatcatattcacccataaatattacaaatgagattgattccatctcaagacaatttgtcaaatacttaattttcttcctggatgattctacttactggatattttagaaagagaaatgtctgagataaaatccctcacatttactcaatataacaaattactgtttctactcctattctgagtagtgcttctgaagattgtttgctgtagtgttgtctttgataaaatgaatgtcagtagtgagccttttagagataccatgctcagaaatcctctttgggatcagaagatacctaaaattctccccttttgcccacttggttagatgagtgatatattctttggatcctgcaaagaagagattggtttattttcttttctggtggtggtagtggttgtatctgtggctgtgatggttgttgttacttgtctctctctctctctggctctggcttttgctttcctgctagtgttctttctctttccaaacaaatagttaaattaaatgtgagcttctgaattgtacttgttcatactttcaaaacataacagattaataaaaatagatgtgtcctgatttaaaacatgccccctggaaaggcatgctgtattatgaaatcgtgataatataactgcattattacatggcagtataaatattagtctgttgaattcatttgtccaattgtataactttgtggagcagtgttttgacctttgatacataattctggagcaagtggagtggttgcaggcagatgagacagtgttatatcaggatttttcaatcaactttagttggaggcctggcaattacaaacatcttcagatgtttctgtaaccattataaatatgaaaaaaacctcttcaaaaaatttcccatagtacttcagtcaagactttttaggtttatcttttttttttcatttctccttttccttttccattatttttcgatgggggggttgttatcattgactgaagaaatattttgattgcaatggtctctctctctctccccctctctctctctctcctctattctttcctccttccctctgtccatcacccctcattaaaatattgaaatctggagtctttgataaatctgcattagaccaggctatatgctaggaatgaaatctgggcaaatatcgatgggttttcaaagaatgctccatgttcattgggccctttcacaccccacagtgataaatgaaaaggatagaggtagttttttcaaaagagcactttaataatatcctctgagacctaatgcagtttaacaaatgactccacctatttttccagtaggtaaattgactgagacttgcaaaatacccctgagagttgtcaggggtgtcttctgcctggtctatagcgtgtgtgtttgctttgtatctaacaggcacattcacgtctcgtgtactcatatgaagtatttcctaacattcccattagcctgtatataagaatcagaaagataatcccaacatgttgtaaatgaagatgtgactctataacctttctcttcttcctggaaaaaaaaggacattttcatgcatattttaaacagaaattttgtatatttaagtgtcatagaaaatatttattgagtaactgggacacaaatgggaatttaattgtcatcatatgctttgtgtgtggggatgcttaccaacaccatgtcgctggaccattgtggcaagccataactgcacaaagagtacacatcgtcagtgtgtgtgtgtgtgtgtgtgtgcgcgcacacacgtgcgtgtgtgtgtccctgcatgtgcaacatgtctagcttgctgtccttcatgggattttagctttcccttcttgaaaaacattattttacagttccaggaggccctggttacattactatatgaaggcagtgatttgaaatgaaaattcctttcctcttggaagctttggtcataatatcatggttcaattaaacggattccaccggactttgtgatgaaaaaggctctgttaaaatccaattgagtttccaagaggaaattgtagtaggtcaagatgcatgagagggaagatggaggccacctcaactggagaacatgagctgagttgagccctcagtgttgaagttgacttgctccaagctgcagtctaaaaccctggggcccgtgcctggcctatgctccctcccaagtaagtagaggagcagaaccatcaggaacagcctgcctggctcctatgaagaaaacttcctgacgtcctgtccccaaaggaagaccctttccccaagggcaccccaggtggccattaaattgtgatgatcattcagaaagtgcccccttggctttatgagaatccaattagtcttctgaaccaccttttcttgggtgcagatttccaacattcatgctcattgcagatccaccaactgtcactgttcttaacaagcatgctcgtcttgtcagaatttcagtaagttccaatttcctgtacagaccagggtaaactgttctaaaatcaatcaattaatgaaatgttatctggtttttaaaagctggtttcatgtgctttatgtgtataaaactatatctgcctgtgtggctttgcatttcaaatgtgtggcgcacaagcgttttgttggtgctttgttctcagtacagtaactctgtgtacaaacattttaatgtggttttgttgttttccaacaagatgtctctgtaaaaatgatattggctgagctggtgcgttggtttctctcatagaggcattaactatactgccaatgcattgaattatttaaaaatgcaaaataaaatttttatgaaaatctca

SEQ ID NO: 285 - DNA, 2158 bp, Homo sapiens
attcataaaacgcttgttataaaagcagtggctgcggcgcctcgtactccaaccgcatctgcagcgagcatctgagaagccaagactgagccggcggccgcggcgcagcgaacgagcagtgaccgtgctcctacccagctctgctccacagcgcccacctgtctccgcccctcggcccctcgcccggctttgcctaaccgccacgatgatgttctcgggcttcaacgcagactacgaggcgtcatcctcccgctgcagcagcgcgtccccggccggggatagcctctcttactaccactcacccgcagactccttctccagcatgggctcgcctgtcaacgcgcaggacttctgcacggacctggccgtctccagtgccaacttcattcccacggtcactgccatctcgaccagtccggacctgcagtggctggtgcagcccgccctcgtctcctccgtggccccatcgcagaccagagcccctcaccctttcggagtccccgccccctccgctggggcttactccagggctggcgttgtgaagaccatgacaggaggccgagcgcagagcattggcaggaggggcaaggtggaacagttatctccagaagaagaagagaaaaggagaatccgaagggaaaggaataagatggctgcagccaaatgccgcaaccggaggagggagctgactgatacactccaagcggagacagaccaactagaagatgagaagtctgctttgcagaccgagattgccaacctgctgaaggagaaggaaaaactagagttcatcctggcagctcaccgacctgcctgcaagatccctgatgacctgggcttcccagaagagatgtctgtggcttcccttgatctgactgggggcctgccagaggttgccaccccggagtctgaggaggccttcaccctgcctctcctcaatgaccctgagcccaagccctcagtggaacctgtcaagagcatcagcagcatggagctgaagaccgagccctttgatgacttcctgttcccagcatcatccaggcccagtggctctgagacagcccgctccgtgccagacatggacctatctgggtccttctatgcagcagactgggagcctctgcacagtggctccctggggatggggcccatggccacagagctggagcccctgtgcactccggtggtcacctgtactcccagctgcactgcttacacgtcttccttcgtcttcacctaccccgaggctgactccttccccagctgtgcagctgcccaccgcaagggcagcagcagcaatgagccttcctctgactcgctcagctcacccacgctgctggccctgtgagggggcagggaaggggaggcagccggcacccacaagtgccactgcccgagctggtgcattacagagaggagaaacacatcttccctagagggttcctgtagacctagggaggaccttatctgtgcgtgaaacacaccaggctgtgggcctcaaggacttgaaagcatccatgtgtggactcaagtccttacctcttccggagatgtagcaaaacgcatggagtgtgtattgttcccagtgacacttcagagagctggtagttagtagcatgttgagccaggcctgggtctgtgtctcttttctctttctccttagtcttctcatagcattaactaatctattgggttcattattggaattaacctggtgctggatattttcaaattgtatctagtgcagctgattttaacaataactactgtgttcctggcaatagtgtgttctgattagaaatgaccaatattatactaagaaaagatacgactttattttctggtagatagaaataaatagctatatccatgtactgtagtttttcttcaacatcaatgttcattgtaatgttactgatcatgcattgttgaggtggtctgaatgttctgacattaacagttttccatgaaaacgttttattgtgtttttaatttatttattaagatggattctcagatatttatatttttattttatttttttctaccttgaggtcttttgacatgtggaaagtgaatttgaatgaaaaatttaagcattgtttgcttattgttccaagacattgtcaataaaagcatttaagttgaatgcgaccaa

SEQ ID NO: 286 - DNA, 3776 bp, Homo sapiens
cattcataagactcagagctacggccacggcagggacacgcggaaccaagacttggaaacttgattgttgtggttcttcttgggggttatgaaatttcattaatctttttttttccggggagaaagtttttggaaagattcttccagatatttcttcattttcttttggaggaccgacttactttttttggtcttctttattactcccctccccccgtgggacccgccggacgcgtggaggagaccgtagctgaagctgattctgtacagcgggacagcgctttctgcccctgggggagcaacccctccctcgcccctgggtcctacggagcctgcactttcaagaggtacagcggcatcctgtgggggcctgggcaccgcaggaagactgcacagaaactttgccattgttggaacgggacgttgctccttccccgagcttccccggacagcgtactttgaggactcgctcagctcaccggggactcccacggctcaccccggacttgcaccttacttccccaacccggccatagccttggcttcccggcgacctcagcgtggtcacaggggcccccctgtgcccagggaaatgtttcaggctttccccggagactacgactccggctcccggtgcagctcctcaccctctgccgagtctcaatatctgtcttcggtggactccttcggcagtccacccaccgccgccgcctcccaggagtgcgccggtctcggggaaatgcccggttccttcgtgcccacggtcaccgcgatcacaaccagccaggacctccagtggcttgtgcaacccaccctcatctcttccatggcccagtcccaggggcagccactggcctcccagcccccggtcgtcgacccctacgacatgccgggaaccagctactccacaccaggcatgagtggctacagcagtggcggagcgagtggcagtggtgggccttccaccagcggaactaccagtgggcctgggcctgcccgcccagcccgagcccggcctaggagaccccgagaggagacgctcaccccagaggaagaggagaagcgaagggtgcgccgggaacgaaataaactagcagcagctaaatgcaggaaccggcggagggagctgaccgaccgactccaggcggagacagatcagttggaggaagaaaaagcagagctggagtcggagatcgccgagctccaaaaggagaaggaacgtctggagtttgtgctggtggcccacaaaccgggctgcaagatcccctacgaagaggggcccgggccgggcccgctggcggaggtgagagatttgccgggctcagcaccggctaaggaagatggcttcagctggctgctgccgcccccgccaccaccgcccctgcccttccagaccagccaagacgcaccccccaacctgacggcttctctctttacacacagtgaagttcaagtcctcggcgaccccttccccgttgttaacccttcgtacacttcttcgtttgtcctcacctgcccggaggtctccgcgttcgccggcgcccaacgcaccagcggcagtgaccagccttccgatcccctgaactcgccctccctcctcgctctgtgaactctttagacacacaaaacaaacaaacacatgggggagagagacttggaagaggaggaggaggaggagaaggaggagagagaggggaagagacaaagtgggtgtgtggcctccctggctcctccgtctgaccctctgcggccactgcgccactgccatcggacaggaggattccttgtgttttgtcctgcctcttgtttctgtgccccggcgaggccggagagctggtgactttggggacagggggtgggaaggggatggacacccccagctgactgttggctctctgacgtcaacccaagctctggggatgggtggggaggggggcgggtgacgcccaccttcgggcagtcctgtgtgaggattaagggacgggggtgggaggtaggctgtggggtgggctggagtcctctccagagaggctcaacaaggaaaaatgccactccctacccaatgtctcccacacccaccctttttttggggtgcctaggttggtttcccctgcactcccgaccttagcttattgatcccacatttccatggtgtgagatcctctttactctgggcagaagtgagccccccccttaaagggaattcgatgcccccctagaataatctcatccccccacccgacttcttttgaaatgtgaacgtccttccttgactgtctagccactccctcccagaaaaactggctctgattggaatttctggcctcctaaggctccccaccccgaaatcagcccccagccttgtttctgatgacagtgttatcccaagaccctgccccctgccagccgaccctcctggccttcctcgttgggccgctctgatttcaggcagcaggggctgctgtgatgccgtcctgctggagtgatttatactgtgaaatgagttggccagattgtggggtgcagctgggtggggcagcacacctctggggggataatgtccccactcccgaaagcctttcctcggtctcccttccgtccatcccccttcttcctcccctcaacagtgagttagactcaagggggtgacagaaccgagaagggggtgacagtcctccatccacgtggcctctctctctctcctcaggaccctcagccctggcctttttctttaaggtcccccgaccaatccccagcctaggacgccaacttctcccaccccttggcccctcacatcctctccaggaagggagtgaggggctgtgacatttttccggagaagatttcagagctgaggctttggtacccccaaacccccaatatttttggactggcagactcaaggggctggaatctcatgattccatgcccgagtccgcccatccctgaccatggttttggctctcccaccccgccgttccctgcgcttcatctcatgaggatttctttatgaggcaaatttatattttttaatatcggggggtggaccacgccgccctccatccgtgctgcatgaaaaacattccacgtgccccttgtcgcgcgtctcccatcctgatcccagacccattccttagctatttatccctttcctggtttccgaaaggcaattatatctattatgtataagtaaatatattatatatggatgtgtgtgtgtgcgtgcgcgtgagtgtgtgagcgcttctgcagcctcggcctaggtcacgttggccctcaaagcgagccgttgaattggaaactgcttctagaaactctggctcagcctgtctcgggctgacccttttctgatcgtctcggcccctctgattgttcccgatggtctctctccctctgtcttttctcctccgcctgtgtccatctgaccgttttcacttgtctcctttctgactgtccctgccaatgctccagctgtcgtctgactctgggttcgttggggacatgagattttattttttgtgagtgagactgagggatcgtagatttttacaatctgtatctttgacaattctgggtgcgagtgtgagagtgtgagcagggcttgctcctgccaaccacaattcaatgaatccccgacccccctaccccatgctgtacttgtggttctctttttgtattttgcatctgaccccggggggctgggacagattggcaatgggccgtcccctctccccttggttctgcactgttgccaataaaaagctcttaaaaacgca

SEQ ID NO: 287 - DNA, 1668 bp, Homo sapiens
acgggccaaggcggcgcgtctcgggggtggagcctggaggtgaccgcgccgctgcaacgcccccaccccccgcggtcgcagtggttcagcccgagaacttttcattcataaaaagaaaagactccgcacggcgcgggtgagtcagaacccagcagccgtgtaccccgcagagccgccagccccgggcatgttccgagacttcggggaacccggcccgagctccgggaacggcggcgggtacggcggccccgcgcagcccccggccgcagcgcaggcagcccagcagaagttccacctggtgccaagcatcaacaccatgagtggcagtcaggagctgcagtggatggtacagcctcatttcctggggcccagcagttaccccaggcctctgacctaccctcagtacagccccccacaaccccggccaggagtcatccgggccctggggccgcctccaggggtacgtcgaaggccttgtgaacagatcagcccggaggaagaggagcgccgccgagtaaggcgcgagcggaacaagctggctgcggccaagtgcaggaaccggaggaaggaactgaccgacttcctgcaggcggagactgacaaactggaagatgagaaatctgggctgcagcgagagattgaggagctgcagaagcagaaggagcgcctagagctggtgctggaagcccaccgacccatctgcaaaatcccggaaggagccaaggagggggacacaggcagtaccagtggcaccagcagcccaccagccccctgccgccctgtaccttgtatctccctttccccagggcctgtgcttgaacctgaggcactgcacacccccacactcatgaccacaccctccctaactcctttcacccccagcctggtcttcacctaccccagcactcctgagccttgtgcctcagctcatcgcaagagtagcagcagcagcggagacccatcctctgacccccttggctctccaaccctcctcgctttgtgaggcgcctgagccctactccctgcagatgccaccctagccaatgtctcctccccttcccccaccggtccagctggcctggacagtatcccacatccaactccagcaacttcttctccatccctctaatgagactgaccatattgtgcttcacagtagagccagcttggggccaccaaagctgcccactgtttctcttgagctggcctctctagcacaatttgcactaaatcagagacaaaatatttcccatttgtgccagaggaatcctggcagcccagagactttgtagatccttagaggtcctctggagccctaaccccttccagatcactgccacactctccatcaccctcttcctgtgatccacccaaccctatctcctgacagaaggtgccactttacccacctagaacactaactcaccagccccactgccagcagcagcaggtgattggaccaggccattctgccgccccctcctgaaccgcacagctcaggaggcgcccttggcttctgtgatgagctgatctgcggatctcagctttgagaagccttcagctccagggaatccaagcctccacagcgagggcagctgctatttattttcctaaagagagtatttttatacaaacctaccaaaatggaataaaaggcttgaagctgtg

SEQ ID NO: 288 - DNA, 4015 bp, Homo sapiens
cgaacgagcggcgctcggcggggacagaaagagggagagagagagagagagagagggagaggcgcggccgggcgaggcgggcccgtccgggagcgggctccggggaaggggtgcgggtctgggcgccggagcggggagcggggccgcgtccctctcagcgccagctctacttgagccccacgagccgctgtccccctggcgcgctcggggccgcgggacgggcgcacgccgccttctcctagtcaagtatccgagccgccccgaaactcgggcggcgagtcggccacgggaagtttattctccggctccttttctaaaaggaagaaacagaagtttctcccagcggacagcttttctttccgcctttttggccctgtctgaaatcgggggtccccagggctggcaggccaggctcgctgggctcctaatcttttttttaatttccaatttttgattgggccgtgggtccccgctgagctccggctgcgcgcgggggcgggagggcgcgcgcaggggagggaccgagagacgcgccgactttttagagggagggatcgggtggacaactggtcccgcggcgctcgcagagccggaaagaagtgctgtaagggacgctcgggggacgctgttcctgaggtgtcgccgcctccctgtcctcgccctccgcggtgggggagaaacccaggagcgaagcccagagcccgcggcgcggccggcggacgaacgagcgcgcagcagccggtgcgcggccgcggcgagggcgggggaagaaaaacaccctgtttcctctccggcccccaccgcggatcatgtaccaggattatcccgggaactttgacacctcgtcccggggcagcagcggctctcctgcgcacgccgagtcctactccagcggcggcggcggccagcagaaattccgggtagatatgcctggctcaggcagtgcattcatccccaccatcaacgccatcacgaccagccaggacctgcagtggatggtgcagcccacagtgatcacctccatgtccaacccataccctcgctcgcacccctacagccccctgccgggcctggcctctgtccctggacacatggccctcccaagacctggcgtgatcaagaccattggcaccaccgtgggccgcaggaggagagatgagcagctgtctcctgaagaggaggagaagcgtcgcatccggcgggagaggaacaagctggctgcagccaagtgccggaaccgacgccgggagctgacagagaagctgcaggcggagacagaggagctggaggaggagaagtcaggcctgcagaaggagattgctgagctgcagaaggagaaggagaagctggagttcatgttggtggctcacggcccagtgtgcaagattagccccgaggagcgccgatcgcccccagcccctgggctgcagcccatgcgcagtgggggtggctcggtgggcgctgtagtggtgaaacaggagcccctggaagaggacagcccctcgtcctcgtcggcggggctggacaaggcccagcgctctgtcatcaagcccatcagcattgctgggggcttctacggtgaggagcccctgcacacccccatcgtggtgacctccacacctgctgtcactccgggcacctcgaacctcgtcttcacctatcctagcgtcctggagcaggagtcacccgcatctccctccgaatcctgctccaaggctcaccgcagaagcagtagcagcggggaccaatcatcagactccttgaactcccccactctgctggctctgtaacccagtgcacctccctccccagctccggagggggtcctcctcgctcctccttcccagggaccagcaccttcaagcgctccagggccgtgagggcaagagggggacctgccaccagggagcttcctggctctgggggacccaggtgggacttagcagtgagtattggaagacttgggttgatctcttagaagccatgggacctcctccctcattcatcttgcaagcaaatcccatttcttgaaaagccttggagaactcggtttggtagacttggacatctctctggcttctgaagagcctgaagctggcctggaccattcctgtccctttgttaccatactgtctctggagtgatggtgtccttccctgccccaccacgcatgctcagtgccttttggtttcaccttccctcgacttgaccctttcctcccccagcgtcagtttcactccctcttggtttttatcaaatttgccatgacatttcatctgggtggtctgaatattaaagctcttcatttctggagatggggcagcaggtggctcttctgctggggctgacttgtccagaaggggacaaagtgcaatacagagccttccctaccctgacgcctcccagtcatcatctccagaactcccagcggggctccctgagctctcaaggagatgctgccatcactgggaggctcagaggacccttcctgcccaccttcggagacggcttctggaggaacggcttggccagaagacagggtgtgagtgagacagtggggcacaggttgggtttgccaaacgcctaattaccaggccaggaagcatgccaacaaagccacacgggtgtcctagccagcttcccttcacctggtgtcttgagtagggcgtctcctgtaattactgccttgccattctgcccctggacccttctctccggaccagggaggcgtccctccctaggagccacacattatactccaagtccctgccgggctccgcctttcccccaccctggctctcagggtgacgccacccacagagatttaatgagcgtgggcctggaccttccccagatgctgccaggcagcccctccccaagcctcaaagaagcatttgctgaggatggagaggcaggggagggaggcgggaggccgtcactggagtggcgtctgcagcagctgctgccccagcacccgctcagcctgtcctggctgctcacctccccgcagggcaccgggcctttcctgccctctgtggtcatctgccacctgctggatcaagtgctttctcttttacactcccctgtccccaccccagtgcactcttctggcccaggcagcaagcaagctgtgaacagctggcctgagctgtcgctgtggcttgtggctcatgcgccattcctggttgtctgttgaatctttctggctgctggaattggagataggatgttttgcttcccactgcaggagagctgccccctttcacggggttggggaagggtccccctggcctccagcaggagcacagctcagcagggtccctgctgcccacccctctgagccttttctccccagggtatggctcctgctgagtttcttgtccagcagggccttgacaggaatccagggagtagctcctggccagaaccagcctctgcggggcttgtgctctgcaaagactctgctgctggggattcagctctagaggtcacagtatcctcgtttgaaagataattaagatcccccgtggagaaagcagtgacacattcacacagctgttccctcgcatgttatttcatgaacatgacctgttttcgtgcactagacacacagagtggaacagccgtatgcttaaagtacatgggccagtgggactggaagtgacctgtacaagtgatgcagaaaggagggtttcaaagaaaaaggattttgtttaaaatactttaaaaatgttatttcctgcatcccttggctgtgatgcccctctcccgatttcccaggggctctgggagggacccttctaagaagattgggcagttgggtttctggcttgagatgaatccaagcagcagaatgagccaggagtagcaggagatgggcaaagaaaactggggtgcactcagctctcacaggggtaatcatctcaagtggtatttgtagccaagtgggagctattttcttttttgtgcatatagatatttcttaaatgaaaaaaaaaaaaaaaaaaaaaaaaaa

SEQ ID NO: 289 - DNA, 3124 bp, Homo sapiens
taagatccacatcagctcaactgcacttgcctcgcagaggcagcccgctcacttcccgcggaggcgctccccggcgccgcgctccgcggcagccgcctgcccccggcgctgcccccgcccgccgcgccgccgccgccgccgcgcacgccgcgccccgcagctctgggcttcctcttcgcccgggtggcgttgggcccgcgcgggcgctcgggtgactgcagctgctcagctcccctcccccgccccgcgccgcgcggccgcccgtcgcttcgcacagggctggatggttgtattgggcagggtggctccaggatgttaggaactgtgaagatggaagggcatgaaaccagcgactggaacagctactacgcagacacgcaggaggcctactcctccgtcccggtcagcaacatgaactcaggcctgggctccatgaactccatgaacacctacatgaccatgaacaccatgactacgagcggcaacatgaccccggcgtccttcaacatgtcctatgccaacccgggcctaggggccggcctgagtcccggcgcagtagccggcatgccggggggctcggcgggcgccatgaacagcatgactgcggccggcgtgacggccatgggtacggcgctgagcccgagcggcatgggcgccatgggtgcgcagcaggcggcctccatgaatggcctgggcccctacgcggccgccatgaacccgtgcatgagccccatggcgtacgcgccgtccaacctgggccgcagccgcgcgggcggcggcggcgacgccaagacgttcaagcgcagctacccgcacgccaagccgccctactcgtacatctcgctcatcaccatggccatccagcaggcgcccagcaagatgctcacgctgagcgagatctaccagtggatcatggacctcttcccctattaccggcagaaccagcagcgctggcagaactccatccgccactcgctgtccttcaatgactgcttcgtcaaggtggcacgctccccggacaagccgggcaagggctcctactggacgctgcacccggactccggcaacatgttcgagaacggctgctacttgcgccgccagaagcgcttcaagtgcgagaagcagccgggggccggcggcgggggcgggagcggaagcgggggcagcggcgccaagggcggccctgagagccgcaaggacccctctggcgcctctaaccccagcgccgactcgcccctccatcggggtgtgcacgggaagaccggccagctagagggcgcgccggcccccgggcccgccgccagcccccagactctggaccacagtggggcgacggcgacagggggcgcctcggagttgaagactccagcctcctcaactgcgccccccataagctccgggcccggggcgctggcctctgtgcccgcctctcacccggcacacggcttggcaccccacgagtcccagctgcacctgaaaggggacccccactactccttcaaccacccgttctccatcaacaacctcatgtcctcctcggagcagcagcataagctggacttcaaggcatacgaacaggcactgcaatactcgccttacggctctacgttgcccgccagcctgcctctaggcagcgcctcggtgaccaccaggagccccatcgagccctcagccctggagccggcgtactaccaaggtgtgtattccagacccgtcctaaacacttcctagctcccgggactggggggtttgtctggcatagccatgctggtagcaagagagaaaaaatcaacagcaaacaaaaccacacaaaccaaaccgtcaacagcataataaaatcccaacaactatttttatttcatttttcatgcacaacctttcccccagtgcaaaagactgttactttattattgtattcaaaattcattgtgtatattactacaaagacaaccccaaaccaatttttttcctgcgaagtttaatgatccacaagtgtatatatgaaattctcctccttccttgcccccctctctttcttccctctttcccctccagacattctagtttgtggagggttatttaaaaaaacaaaaaaggaagatggtcaagtttgtaaaatatttgtttgtgctttttccccctccttacctgaccccctacgagtttacaggtctgtggcaatactcttaaccataagaattgaaatggtgaagaaacaagtatacactagaggctcttaaaagtattgaaagacaatactgctgttatatagcaagacataaacagattataaacatcagagccatttgcttctcagtttacatttctgatacatgcagatagcagatgtctttaaatgaaatacatgtatattgtgtatggacttaattatgcacatgctcagatgtgtagacatcctccgtatatttacataacatatagaggtaatagataggtgatatacatgatacattctcaagagttgcttgaccgaaagttacaaggaccccaacccctttgtcctctctacccacagatggccctgggaatcaattcctcaggaattgccctcaagaactctgcttcttgctttgcagagtgccatggtcatgtcattctgaggtcacataacacataaaattagtttctatgagtgtataccatttaaagaatttttttttcagtaaaagggaatattacaatgttggaggagagataagttatagggagctggatttcaaaacgtggtccaagattcaaaaatcctattgatagtggccattttaatcattgccatcgtgtgcttgtttcatccagtgttatgcactttccacagttggacatggtgttagtatagccagacgggtttcattattatttctctttgctttctcaatgttaatttattgcatggtttattctttttctttacagctgaaattgctttaaatgatggttaaaattacaaattaaattgttaatttttatcaatgtgattgtaattaaaaatattttgatttaaataacaaaaataataccagattttaagccgtggaaaatgttcttgatcatttgcagttaaggactttaaataaatcaaatgttaacaaaaaaaaaaaaaaaa

SEQ ID NO: 290 - DNA, 2428 bp, Homo sapiens
cccgcccacttccaactaccgcctccggcctgcccagggagagagagggagtggagcccagggagagggagcgcgagagagggagggaggaggggacggtgctttggctgacttttttttaaaagagggtgggggtggggggtgattgctggtcgtttgttgtggctgttaaattttaaactgccatgcactcggcttccagtatgctgggagcggtgaagatggaagggcacgagccgtccgactggagcagctactatgcagagcccgagggctactcctccgtgagcaacatgaacgccggcctggggatgaacggcatgaacacgtacatgagcatgtcggcggccgccatgggcagcggctcgggcaacatgagcgcgggctccatgaacatgtcgtcgtacgtgggcgctggcatgagcccgtccctggcggggatgtcccccggcgcgggcgccatggcgggcatgggcggctcggccggggcggccggcgtggcgggcatggggccgcacttgagtcccagcctgagcccgctcggggggcaggcggccggggccatgggcggcctggccccctacgccaacatgaactccatgagccccatgtacgggcaggcgggcctgagccgcgcccgcgaccccaagacctacaggcgcagctacacgcacgcaaagccgccctactcgtacatctcgctcatcaccatggccatccagcagagccccaacaagatgctgacgctgagcgagatctaccagtggatcatggacctcttccccttctaccggcagaaccagcagcgctggcagaactccatccgccactcgctctccttcaacgactgtttcctgaaggtgccccgctcgcccgacaagcccggcaagggctccttctggaccctgcaccctgactcgggcaacatgttcgagaacggctgctacctgcgccgccagaagcgcttcaagtgcgagaagcagctggcgctgaaggaggccgcaggcgccgccggcagcggcaagaaggcggccgccggagcccaggcctcacaggctcaactcggggaggccgccgggccggcctccgagactccggcgggcaccgagtcgcctcactcgagcgcctccccgtgccaggagcacaagcgagggggcctgggagagctgaaggggacgccggctgcggcgctgagccccccagagccggcgccctctcccgggcagcagcagcaggccgcggcccacctgctgggcccgccccaccacccgggcctgccgcctgaggcccacctgaagccggaacaccactacgccttcaaccacccgttctccatcaacaacctcatgtcctcggagcagcagcaccaccacagccaccaccaccaccaaccccacaaaatggacctcaaggcctacgaacaggtgatgcactaccccggctacggttcccccatgcctggcagcttggccatgggcccggtcacgaacaaaacgggcctggacgcctcgcccctggccgcagatacctcctactaccagggggtgtactcccggcccattatgaactcctcttaagaagacgacggcttcaggcccggctaactctggcaccccggatcgaggacaagtgagagagcaagtgggggtcgagactttggggagacggtgttgcagagacgcaagggagaagaaatccataacacccccaccccaacacccccaagacagcagtcttcttcacccgctgcagccgttccgtcccaaacagagggccacacagataccccacgttctatataaggaggaaaacgggaaagaatataaagttaaaaaaaagcctccggtttccactactgtgtagactcctgcttcttcaagcacctgcagattctgatttttttgttgttgttgttctcctccattgctgttgttgcagggaagtcttacttaaaaaaaaaaaaaaattttgtgagtgactcggtgtaaaaccatgtagttttaacagaaccagagggttgtactattgtttaaaaacaggaaaaaaaataatgtaagggtctgttgtaaatgaccaagaaaaagaaaaaaaaagcattcccaatcttgacacggtgaaatccaggtctcgggtccgattaatttatggtttctgcgtgctttatttatggcttataaatgtgtattctggctgcaagggccagagttccacaaatctatattaaagtgttatacccggttttatcccttgaatcttttcttccagatttttcttttctttacttggcttacaaaatatacaggcttggaaattatttcaagaaggagggagggataccctgtctggttgcaggttgtattttattttggcccagggagtgttgctgttttcccaacattttattaataaaattttcagacataaaaaa

SEQ ID NO: 291 - DNA, 3575 bp, Homo sapiens
gaattcctagactcccgagtcttggaatcttagaattacagggtcgcaggatcgcaggatcgcattctttagatttatggaatcacgttagccccgtcgtccagaatttaaaatctagatatctgaatctcagaatcttgaaagttactgagagccacgaaatcccgtattaaaaggtgcctataatataatccagttaaaaattttaaaatttgaagtttttcctcctttgtaaaaacgaaacagacgaaatctgggcgttttgcttctccattacttgggaagaaggaaaccaggagttttgtttagcgagtgtaaagcccctctcccttcgttcgaccaaccctctaccgcagaaggttgtcaagcaaagcctttgagcgtttccacacaccgggtcgacggagcaaggatctgggctttgctcgctcttccgaagcagctgccaacgcttggccgggcttagctgccctcagctcaccgccacgaagaacgcgactaaaaccctccaagcatgccacccgttaccggccagaacctctcgtcttgggatctcccacactcacctggcaccaccctcccgctctcacccacagccccgcccgcccccccccccccacaccggaaagctgcgtccgggctggagcactggaacccgcgcccaaggggggaatcctatgcgtcaggggcctcggagatcagcacacgcccaccagctatttaacagagtagaaccctgaggccctgcgaggggacaaggacaggccctggatctcccagtgaatggccagggaacgaacccggcgagaggggcgcgcgcaggatctcaggttaaggaccaagttccggctcagggacagcaggaaaggaactcagaaattggacaccatgaagcaaacgtgtgtcccgactgcccgccccttcccccggagacgcccacccggccaccgttctcttcccactcccccattacccacagccctcactcccctgcggaaggggtgcttggctgcctctgggggcttcagagctaccctggtcccgggggattggaggaggaggttacctctcctgcgtcgttctttcaatccgtgcaccactatccatcaaatagagacagatcctgggcctctcaaagacggatgattgggggtggtgattggcctatccctaaatatctaccacgcaaggactcttgagagatccagaccccggtacagtcgagggacctggggcccaaaaagsggaaagcggctacctcttaccacacagttgggaagcgcagtcctaaaggagacgcaggttggagactccgctaagcggagaagccgcagtggggccatggaaagtcaccttccctttcggttctaggaattactcattcgaaagatggggggactggagtgccgagtggctgtggcagccacgattggggtttggaaaccatcctgaaaggcccggggagccagtctcctggaacttctccctccctattcccacaaaaaccaagcgccctctcggccaattctcaccctctcaggacaaaaaagtgagatgagcccgtcctttcacctgcgatccaagcccttggcagaggcctgaaaagtccgaaaactccgagttcgggcggtgaggtctcccgagccggttcctgaactctccgggcctcagtcgatcggggtgggacccccccccccccgcccatctccaagcgccctccccaccctgacgttgtggggctcctaccgggcgccacagctgctcctacctggggaggtgcgccgggccccaggggggcggacaagtcggggggcgggcagggaaccggttccgccccacgcttcgtgtgcccctttaaggaggggaagccggccgagggaggagccggtccagtgtgtgcaggggagcgcctcgccagcggtccgcggggctggagaccacgccgtggagaggaccagcctcaggtcgccccgcctggggccgggtcccacctcactgccccgcctcgcctctctgcccgtggcgttaccgccaccttgcctcgggggcagggcatgggcggccccgccagatcgcccagcgccagtactaactgcctgctctgccttcgagccccgaagcctcttctgcgcgcgcacaacctaggcagtaatcctaaactagcgggcaccacagaccagctgcagccaccccaacccagggatcacttccggacccctcgaccgcccggcaccagcgcgcaagggacccttcagccggagaccagagtccagtccggtcgcgaggccaccgcgctgcccgcctcgagaagcacaacgcgggctgagccgtcggctagcgggtcactcccgagcctctgtctgcaccgcgccagccccagaccacggacgctgagcctccagcgcgcgccagcctgggccgctgggctctccgggacagcccgtgacgatcccctgagctctccgcagaagggccgagcgtccgttccggggacgccaggcccgcccccgccccccgacagcgtggggatccagagcccgggggtgtgggacgcccgcgccatgactgtcgagagggccgtcgtcgcgaagccggaggtgtggtaccgtgaaggaagagcgggcgcgccagcgccccctgcagcgcggaagccgccctacagctacattcggcgtcatgccatggccatcggcagcccgaggctcacgctgggcggcatctacaagttcatcaccgagggcttccccttctacccggacaaccccaaaaagtggcagaacagcatccgccacaacctcacaatcaacgactgcttcctcaagatcccgcgcgaggccggccgccgccgtaagggcaactactgggcgctcgaccccaacgcggaggacatgttcgagagcggcagcttcctgcgccgccgcaaggcttcaagcgtcggactctccacctacccggcttacatgcaggacgcggcggctgccgccgccgccgccgccgccgccgccatcttcccaggggcggtcccgccgcgcgccccccctaacagggctccgtctattcaggctaagcgcgccgccgtcgctggccgcccgcctcatctactacccgcggagtcgcccggccatttccgcgtcttcggcctggttcctgagcggccgctcaagcaagaattggggcccgcaccgtgggggcccggcggctctttcgccttttcctccgatggcgcccccgctaccaccaacggctaccaaccacgacaggcttcaccgggacccgtccggccaaccccctcctatgcggctgcctacgcgggccccgacggaagtacccccagggagaaggcagtgcgatactttgccgatgctgggcgggtcgggggcaccccttgcccccagcgggcggcagcagtggcgggtggagaccacggtggacttctacggcgcacgtcgcccggccagttcggagcgctggagcctgctacaactggcgggcagctcggagggccagtgcaggcgcctaccatgctcgccatgctgccgcttatcccggtgggatagatcggttcgagggaattc

SEQ ID NO: 292 - DNA, 2000 bp, Homo sapiens
gggaaggggtgagtctgggtctgggaaaaactgatccaaaggcagaaagggaggggcgaaatggaggagggtaccgtgaacagagtaagggggctgggagaggaaattagaggggaggcgctggccagcaggcaaggcctgagccctctcccccggcggtggttgggggggggccgtgtccatataaagcgggtcggcggcccctgcggtcccggagccgcgcgggcaggggctgccgcagccgatggcggggcgcagcgacatggatccgcccgccgcgttctctggcttccctgccctgccagcggtcgcgccgtcggggccgccgccgtcgccgctcgcaggagccgagccagggcgggagccagaggaggcggcggctggccgcggagaggcggcccccacgcccgcgcccggcccggggcggcggcggcggcggcccctgcagcgcgggaagccgccctactcgtacatcgcgctcatcgccatggctctggcgcacgccccgggccgccgcctcacgctggccgccatctaccgcttcatcaccgaacgctttgccttctaccgcgacagcccgcgcaagtggcagaacagcatccgccacaatctcacgctcaacgactgcttcgtcaaggtgccccgcgagccgggcaacccgggcaagggcaactactggacgctggaccccgcggccgcagacatgttcgacaacggcagcttcctgcggcgccgcaagcgcttcaagcgcgccgagctgcccgcgcacgcggccgcggcgccagggccgccgctccccttcccctacgcgccctacgcgcccgcgcccggccccgcgctgctggtgccgccgccttctgccggaccgggcccctcgccgcccgcgcgtctgttcagcgtcgacagcctggtgaacctgcagccggagctagcggggctgggcgcccccgagccgccctgctgcgccgcgcccgacgccgcagccgcagccttcccgccctgcgctgccgccgcctccccgccactctactcgcaggtccccgaccgcctggtactgcccgcgacgcgccccggccccggcccgctgcccgctgagcccctcctggccttggccgggccggcagccgctctcggcccgctcagccctggggaggcctacctgaggcagccgggcttcgcgtcggggctggagcgctacctgtgagcctgcgccgcgcgggcaggcacctgtgcgacctgtgccccggacctgcggcgccgccctcgagcgccccatctctaccccccaccctggcttggagcacaccctgcgcctctcgtcgtggcctcctggactcaaactcctgctacatccttctccgtcccccatccctggggaggctcccaccatctcgccactggacagaagcgtcccctttgacctgccagcctctcatttcttctccctccacttgtgagcgcccccagctttgcggcgccccccaccccagcgctgtctgtgggtcccttgccccggagctgactcgcctccagtgagtccataccccaggtttcctggtgagttccaagcctttggaagccagatctgtgatcccaagccgcctcctccaccgactgtacttcatcaaccttctctcatgtttttccgacactcctgggtcagactcctgggttcatgacttacttgctagcgtcccttcattttcccacaagtttgccccccacctccacttacctgtctgccctcagcttcttcctgggagagagcccccctttcacgtagacacacctggctgccttcttcacgccctgaggacacttcttggagatttcagacaggcagcaccagggctcctgactgaaaggggagttggtgggcctttaggtctgccccatcccctggaaaacttaggacttattgggttattattatttttaattaaagctggtttaattaaaaagaaagaaacttttttctggaaaaaaaaaaaaaaaaaaaa

SEQ ID NO: 293 - DNA, 2579 bp, Homo sapiens
gcagagcagcggcggcagcggcggcggcggcagcagccacccgatgtcttcggcgcccgagaagcagcagccaccgcacggcggcggcggcggcggcggcgggggaggcggcgcggccatggaccccgcgtcgtccggcccgtccaaggccaagaagaccaacgccggcatccggcgcccggagaagccgccctattcctacatcgcgctcatcgtcatggccatccagagttcacccaccaagcgcctgacgctgagcgagatctaccagttcctgcagagccgcttccccttcttccggggctcctaccagggctggaagaactccgtgcgccacaacctctcgctcaacgagtgcttcatcaagctacccaagggccttgggcggcccggcaagggccactactggaccatcgacccggccagcgagttcatgttcgaggagggctcctttcggcggcggccgcgcggcttccgaaggaaatgccaggcgctcaagcccatgtacagcatgatgaacgggctcggcttcaaccacctcccggacacctacggcttccagggctcggccggcggcctctcgtgcccgcccaacagcctggcgctggagggcggcctgggcatgatgaacggccacttgccgggcaacgtggacggcatggccctgcccagccactcggtgccccacctgccttccaacggcggccactcgtacatgggcggctgcggcggcgcggcggccggcgagtacccgcaccacgacagctcggtgcccgcctccccgctgctgcccaccggcgccggtggggtcatggagccgcacgccgtctactcgggctcggcggcggcctggccgccctcggcgtccgcggcgctcaacagcggcgcctcttatatcaagcagcagcccctgtccccctgtaaccccgcggccaaccccctgtccggcagcctctccacgcactccctggagcagccgtatctgcaccagaacagccacaacgccccagccgagctgcaaggcatcccgcggtatcactcgcagtcgcccagcatgtgtgaccgaaaggagtttgtcttctctttcaacgccatggcgtcctcttccatgcactcggccggcgggggctcctactaccaccagcaggtcacctaccaagacatcaagccttgcgtgatgtgaggctgccgccgcaggccctcctggtgcaggcaggcgggtcacagggaccctggaccggcacaagaaactgctttcttctcgaggtataaccgtcggcagaagaaaagggttccacctctccccaaccggagtttttggcaaggagtccccaatgcaaagacacagcgctgcggttggcacctccttcctcactccttcaaaattgttaagaaatgttagtggtgggtctgatctgactgcagccatcggtaaataaaagtttttgatcctgttgaacccgcctgagacggtgctgtgcaggggaaagcccccgcacccacacaggaattctgctgaggtcccccctccttccggccaatggcagaagtgggggaaaatttttagaagaaaagcaaacatgtgagaccaatcattatcaaatacttttattttttggttgagtatttatctttttattttttattttttttttgaaagaatgtcttggaatgcgcaagtctccctttagagccgtcttttgcagggagcgggaagtgacaagagctcagatctccctcccgatctccctccccacctccgaagtctcctccgtggaccacaggtggatctttgtgcgaacaacttgcatttcggaagccactgtccgtctttaaacagaaagtcaaaggagccacgaagcaagcggccgtccgggcgtccgcctccgtccccttccatgttcctcctcttccttcgcttcagcctcttctgttatgttttgtcttgaattttatttagactttttcagtgggtatttttctgtctcccaacctctactgtaaactttctggtccgagaacgagccgaacacagcgcgacgcagggactaggacggcccggtgaccgcgcggattcaggattgcggggacgcagaaaggttaaggcacttttaaaaactatagcaaggctcctgtttatttattctactttctttccctaataatcaaaacaccgcgtaggctcctccgtttatcagtattaatggtgtaactttgttggcaatatttgccgtgtagaattttttttagatatccattgtaaatttgaaacaaagaccgatctgtgtaaaaacaaatttccatatgttttatataaatatatatataatatgaaggactaccctccttttttttttttgtattttggctgctagagtgcagcatttgtgacacgtatttgaaatttgaaatttccttctgcactgtataaaaggaccatttgaggatgttttgccttttgtgtattttttcctaaaaaaagaacaaaaataaaaatgtataacatttgtacatggcctttaaaattgtatcaactagaaataaaattgcatgagtattttaaaaaaaaaaaaaaaaaa

SEQ ID NO: 294 - DNA, 2187 bp, Homo sapiens
agcccgggcggcgggctagggcgctcgcagggcttctgggccgaccccgctccggcgcctccgcttcccgcccggggcccgccctcgcggcccggcctcgctcccgggtcccagatgaccaccgagggcgggccgccgccggccccgctccgccgcgcgtgcagcccggtccccggcgcgctccaggccgccctgatgagcccgccgcccgccgccgccgccgccgccgccgccgccccggagaccacctcctcctcctcgtcgtcgtcctccgcctcctgcgcctcgtcctcgtcctcctccaattcggccagcgccccctcggctgcctgcaagagcgcgggcggcggcggcgcgggcgccgggagcgggggcgccaagaaggcgagctcggggctgcggcggcccgagaagccgccctactcgtacatcgcgctcatcgtcatggccatccagagctcgcccagcaagcgcctgacgctcagcgagatctaccagttcctgcaggcgcgcttccccttcttccgcggcgcctaccagggctggaagaactcggtgcgccacaatctctcgctcaacgagtgcttcatcaagctgcctaagggcctcgggcggcccggcaagggccactactggaccatcgacccggccagcgagttcatgttcgaggagggctcgttccgccgccggccgcgcggcttcaggcggaagtgccaggcgctcaagcccatgtaccaccgcgtggtgagcggcttgggcttcggggcgtcgctgctgccccagggcttcgacttccaggcgcccccgtcggcgccgctcggctgccacagccagggcggctacggcggcctcgacatgatgcccgcgggctacgacgccggcgcgggcgcccccagccacgcgcaccctcaccaccaccaccaccaccacgtcccgcacatgtcgcccaacccgggttccacctacatggccagctgcccggtgcccgcgggacccgggggcgtcggtgcggccgggggcggcggcggcggcgactacgggccggacagcagcagcagcccggtaccctcgtccccggccatggcgagcgccatcgaatgccactcgccctacacgagccctgcggcgcactggagctcgcctggcgcctcgccttacctcaagcagccgcctgccctgacgcccagcagcaaccccgccgcctcggcaggcctgcactccagcatgtcctcctactcgctggagcagagctacttgcaccagaacgctcgcgaggacctctcagtgggactgccccgttaccagcatcactctactccagtgtgtgacagaaaagatttcgtcctcaacttcaatgggatttcttctttccatccctcagctagcgggtcgtattatcaccatcaccaccagagcgtctgtcaggatattaagccctgcgtcatgtgaacggaaagaggccaagcgatggccgctctctcctctcccctcctcagagggggcagatagaaactgggacggattcaagtcacatgcacgcggatagcagtaagccacacacctgccacttagccagaatgcccaggatcgcgttggtcactgttatttgcctactgctggaagaaggacaaccgctggcaaggtagcgttccccaatctgaatacctgcaggctcccacatgagggagagggcagactcaggtgggaagatgtgccatgcgtaaggcatcaacgtgtatctgtgggatcttcgttgccttcagtaatcagggtgtgaaaaaagcagacaagttgtgtgtgtgtgtgtgtgtctaagaaaacttgtgtgcttttcaaaaaggcagtgctaagcacaagatttcaagaaagcctcttcttgttgcctagctgagtgggagagtcattttccccagacactacatttggatacaggtgccaaagaacattattaaggaattatttagaaacaatgtgtctagtttaagaaagtggttttcagtattgtgacaatacaacgtttttacaaggttgttttctaccaccatattttaaagatatttttatgaccgtgtatactcacactttgcttgtattttaaaaggaggatatatttgcacttatgtatacttttacagtttgccaaaatattttgttgtaaaattttttttcaataaaatgtatataaca

SEQ ID NO: 295 - DNA, 2600 bp, Homo sapiens
aggggtggttgctgcttttgctacatgacttgccagcgcccgagcctgcggtccaactgcgctgctgccggagcgctcagtgccgccgctgccgcccgcgccccccgcgccccgttcggcacccaccggtcgccgccgcccgccgcgccgctgtcccgctcccgcgccgccgccgccgtttccccccgacgactgggtgatgctggacatgggagataggaaagaggtgaaaatgatccccaagtcctcgttcagcatcaacagcctggtgcccgaggcggtccagaacgacaaccaccacgcgagccacggccaccacaacagccaccacccccagcaccaccaccaccaccaccaccatcaccaccacccgccgccgcccgccccgcaaccgccgccgccgccgcagcagcagcagccgccgccgccgccgcccccggcaccgcagcccccccagacgcggggcgccccggccgccgacgacgacaagggcccccagcagctgctgctcccgccgccgccaccgccaccaccggccgccgccctggacggggctaaagcggacgggctgggcggcaagggcgagccgggcggcgggccgggggagctggcgcccgtcgggccggacgagaaggagaagggcgccggcgccgggggggaggagaagaagggggcgggcgagggcggcaaggacggggaggggggcaaggagggcgagaagaagaacggcaagtacgagaagccgccgttcagctacaacgcgctcatcatgatggccatccggcagagccccgagaagcggctcacgctcaacggcatctacgagttcatcatgaagaacttcccttactaccgcgagaacaagcagggctggcagaactccatccgccacaatctgtccctcaacaagtgcttcgtgaaggtgccgcgccactacgacgacccgggcaagggcaactactggatgctggacccgtcgagcgacgacgtgttcatcggcggcaccacgggcaagctgcggcgccgctccaccacctcgcgggccaagctggccttcaagcgcggtgcgcgcctcacctccaccggcctcaccttcatggaccgcgccggctccctctactggcccatgtcgcccttcctgtccctgcaccacccccgcgccagcagcactttgagttacaacggcaccacgtcggcctaccccagccaccccatgccctacagctccgtgttgactcagaactcgctgggcaacaaccactccttctccaccgccaacggcctgagcgtggaccggctggtcaacggggagatcccgtacgccacgcaccacctcacggccgccgcgctagccgcctcggtgccctgcggcctgtcggtgccctgctctgggacctactccctcaacccctgctccgtcaacctgctcgcgggccagaccagttactttttcccccacgtcccgcacccgtcaatgacttcgcagagcagcacgtccatgagcgccagggccgcgtcctcctccacgtcgccgcaggccccctcgaccctgccctgtgagtctttaagaccctctttgccaagttttacgacgggactgtctgggggactgtctgattatttcacacatcaaaatcaggggtcttcttccaaccctttaatacattaacatccctgggaccagactgtaagtgaacgttttacacacatttgcattgtaaatgataattaaaaaaataagtccaggtattttttattaagcccccccctcccatttctgtacgtttgttcagtctctagggttgtttattattctaacaaggtgtggagtgtcagcgaggtgcaatgtggggagaatacattgtagaatataaggtttggaagtcaaattatagtagaatgtgtatctaaatagtgactgctttgccatttcattcaaacctgacaagtctatctctaagagccgccagatttccatgtgtgcagtattataagttatcatggaactatatggtggacgcagaccttgagaacaacctaaattatggggagaattttaaaatgttaaactgtaatttgtatttaaaaagcattcgtagtaaaggtgcccaagaaattattttggccatttattgttttgtccttttctttaaagaactgtttttttttcttttgtttacttttagaccaaagattgggttctagaaaatgcacttggtatactaagtattaaaacaaacaaaaaggaaagttgtttcagttggcaacactgcccattcaattgaatcagaaggggacaaaattaacgattgccttcagtttgtgttgtgtatattttgatgtatgtggtcactaacaggtcacttttattttttctaaatgtagtgaaatgttaatacctattgtacttataggtaaaccttgcaaatatgtaacctgtgttgcgcaaatgccgcataaatttgagtgattgttaatgttgtcttaaaatttcttgattgtgatactgtggtcatatgcccgtgtttgtcacttacaaaaatgtttactatgaacacacagaaataaaaaataggctaaattcaaaaaaaaaaaaaaaa

SEQ ID NO: 296 - DNA, 2193 bp, Homo sapiens
gttgagtcaatgtgtccccctcttgttcctagggtgcgggcttcatggccttctcctccaggaagctccacctgatcatgtcctgggtggatatccagcccccatagttcagggcctactagcagctgctagatcttgaactccaggagcgccccacgccttgggagcttggcatgggctaaatactcccccatttgttaaatggggtcctgaaacctgaccagggaagacgggataaagtagccatgggtcatcgcagcccctttgaagccgggcctggccacccaaaggcaactcaggggtggagactgaggcctcaggagaagcccccactagaatgctctctgcccctcccttccagattaaccaaaacctgctaattgtggaagccctcggcatgctcccctcccccacagcctcttcctcccttccctcccctcccccttccatccgaatgataaaggccccagcccgcctgccccagcccggcctcaggtcccggccctgccttctacactgccccaccgccctgcaccctccacccggccaggcccctgcccacgctgtctaccgtcccgcatggggccctgcagcggctcccgcctggggcccccagaggcagagtcgccctcccagccccctaagaggaggaagaagaggtacctgcgacatgacaagcccccctacacctacttggccatgatcgccttggtgattcaggccgctccctcccgcagactgaagctggcccagatcatccgtcaggtccaggccgtgttccccttcttcagggaagactacgagggctggaaagactccattcgccacaacctttcctccaaccgatgcttccgcaaggtgcccaaggaccctgcaaagccccaggccaagggcaacttctgggcggtcgacgtgagcctgatcccagctgaggcgctccggctgcagaacaccgccctgtgccggcgctggcagaacggaggtgcgcgtggagccttcgccaaggacctgggcccctacgtgctgcacggccggccataccggccgcccagtcccccgccaccacccagtgagggcttcagcatcaagtccctgctaggagggtccggggagggggcaccctggccggggctagctccacagagcagcccagttcctgcaggcacagggaacagtggggaggaggcggtgcccaccccaccccttccctcttctgagaggcctctgtggcccctctgcccccttcctggccccacgagagtggagggggagactgtgcaggggggagccatcgggccctcaaccctctccccagagcctagggcctggcctctccacttactgcagggcaccgcagttcctgggggacggtccagcgggggacacagggcctccctctgggggcagctgcccacctcctacttgcctatctacactcccaatgtggtaatgcccttggcaccaccacccacctcctgtccccagtgtccgtcaaccagccctgcctactggggggtggcccctgaaacccgagggcccccagggctgctctgcgatctagacgccctcttccaaggggtgccacccaacaaaagcatctacgacgtttgggtcagccaccctcgggacctggcggcccctggcccaggctggctgctctcctggtgcagcctgtgaggctcttaagacaggggccactcctccctcccgctcccacccccaccttgttgacagggagccaaggcgaggcggctgtctgcgaccacagcagcctcgaaacaccaggcagcagccttgctgggagtccacggtgtttattgggccaccccacgcatggccgtggcccagctgggcacaaccctcaccctggtctgtcatgcctgtttttcctacactcagcggcaaagctgcaggagcagggctgagcctggaatagcccttcctagtcccctcttctcagcccactacccatccatcagtcaccagccgtcacctcccctcccgtgctccaggctgggggagggagagcccagtggtggatccagcctgaagtcctgccctctctcatctgtctggaaaggaggtagcacctttttcgggaaacgggttagggagtaaagactgcaccctacatggtcctggtggtgggggggataacagtaaaggaatttgcaacgttttaaaaaaaaaaaa

SEQ ID NO: 297 - DNA, 2296 bp, Homo sapiens
gggtgcaggtgccaggcaggtggctccggccagcccagccccagcatgagctccttcgacctgccggcgccctccccacctcgctgcagcccccagttccccagcatcggccaggagccccccgagatgaacctctactatgagaacttcttccacccacagggcgtgcccagccctcagcggccctccttcgaggggggcggcgagtatggggccacccccaacccctacctctggttcaacgggcccaccatgaccccgccaccctacctgcccggccccaacgccagccccttcctgccccaggcctatggagtgcagaggccgctgctgcccagcgtgtcggggcttggggggagcgacctgggctggctgcccatcccctcgcaggaggagctgatgaagctggtgcggccaccctattcctactcggctctcatcgccatggccatccacggggcacccgacaagcgcctcactctcagccagatctaccagtacgtggccgacaacttccccttctacaacaagagcaaggccggctggcagaactccatccgccacaacctgtcgctcaacgactgcttcaagaaggtgccccgcgacgaggacgacccgggcaaagggaattactggaccctggaccccaactgtgagaaaatgttcgacaatggaaatttccgcaggaaaaggaagagaaaatcagatgtttcctctagcacagcctccttggccttagagaagacagagagcagtctcccggtggacagccccaagaccacggagcctcaggacatcttggatggagcctcaccagggggcaccaccagctccccagagaagcggccctcccctcccccatcaggcgccccttgccttaacagcttcctttcctctatgacagcctatgtgagcggggggagccccacgagccaccccttggtcacaccaggactgagccctgagcccagtgacaagacggggcagaactcactgaccttcaactccttctccccgctcaccaacctcagcaaccacagcggtgggggtgactgggcgaaccccatgcccaccaacatgctcagctatggaggatctgtgctcagccaattcagccctcacttctacaacagtgtcaacaccagtggtgtcctctaccccagggagggcaccgaggtctaggtacagaacagctcctgagccaggtggacatgccagagagaaaagcagtagaggtcctccatgccagccccacggtggtccatgactgcggaactgcccagacataagcaggagcctccgaggaatccaccctctttctagaacactggttaaggcttctgtttatcacacataggcccacacacagactcaccaactttgcaatagaaatactggtgcctgcagagcagcactaacagtggcaggtgctgtactaggctctgtactggccacacttactattgacagtcaccccgtaaggttcacaaaccaccccattgaacagatgaggaactgaggctcaaggaggttaagtaacatttccagggttatataaactagtaaatggcagagctaagagtcaaatccaggtctatgtgatcctcagagattggaggccgggatggagaattggttgagtagccaaggaaggtcagtgtgaaaagcttgctatggcaaatatagcgaaatctctccactgccttctgtccaccaacatttagtgccagcctaggcacaacttgtcctggtccaagtccttattctgcttgccccaacttacctgcagacactccttttgctaccactcaaggaaggaagtcaccagtggccttagtgcaggaaactcagccctggtggccctgcagaacaatgcatctgacatgtgcgatgcatccccatggagagacagcattgctccccagccctccagaaaccttgagcagatccagggatcagtgagaggagtggtgtgtacccctaaatcctcccaccccagcactgcccatctgtaaaatcttgtaaagcccagtttcctgtgtgcatgtcatggaccagtgagctggagatggctgaatcttccaagagaaacaaggttggataagcgcttccttttttttagcccaggagaggtggatgtttgtctgagaaaacaatggcctcaagggaggggccttgggcccaccctcacagggggtctctgtgtgatctcttgggatttctccttgtttttgtgagtacctgggaagtgttgtttgttttcttattttctttttaattaaaaaacaaacaaaca

SEQ ID NO: 298 - DNA, 2666 bp, Homo sapiens
aggagaagcctttggagcggctacttaatgccggtcccggggccgcggtagctcagagaagcgccgtcgggcgggggggcggcaagaggcgctggcagggcccccgagctgggggcagagagccgcagggggtgggagcaacttcttccagaaccttcctctggcccgggctgcgctctgagccaggcaccacatacttattcggaggaggcgcccccggggtcgcgagatggaagcgcgcgtccgggaggccgtgtaacgggagctgcgggactcagcgggccagagagcgcggcgggccacccccggctcagcccgtggatgctgaccgccccctcggagagtccccgcagacatggcggagagctggctgcgcctctcgggagccgggccggcggaggaggccgggccggagggcggcctggaggagcccgacgccctggatgacagcctgaccagcctgcagtggctgcaggaattctccattctcaacgccaaggcccccgccctgcccccggggggcaccgacccccacggctaccaccaggtgccaggttcagcggcgcccgggtcccccctggcggccgaccccgcctgcctggggcagccacacacgccgggcaagcccacgtcgtcgtgcacgtcgcggagcgcgcccccggggctgcaggccccaccccccgacgacgtggactacgccaccaatccgcacgtgaagcctccctactcgtatgccacgctcatctgcatggccatgcaggccagcaaggccaccaagatcaccctgtcggccatctacaagtggatcacggacaacttctgctacttccgccacgcagatcccacctggcagaattcaatccgccacaacctgtctctgaacaagtgcttcatcaaagtgcctcgggagaaggacgaaccaggcaaggggggcttctggcgcattgacccccagtacgcggagcggctactgagcggcgctttcaagaagcggcgactgccccctgtccacatccacccagcctttgcccgccaggccgcgcaggagcccagcgctgtcccccgggccgggccgctgacggtgaataccgaggcccagcagctgctgcgggagttcgaggaggccaccggggaggcgggctggggtgcaggcgagggcaggctggggcataagcgcaaacagccgctgcccaagcgggtggccaaggtcccgcggccccccagcaccctgctgcccaccccggaggagcagggtgagctggaacccctcaaaggcaactttgactgggaggccatcttcgacgccggcactctgggcggggagctgggtgcactggaggccctggagctgagcccgcctctgagccccgcctcacacgtggacgtggacctcaccatccacggccgccacatcgactgccctgccacctgggggccttcggtggagcaggctgccgacagcctggacttcgatgagaccttcctggccacatccttcctgcagcacccctgggacgagagcggcagtggctgcctgcccccggagcccctctttgaggctggggatgccaccctggcctccgacctgcaggactgggccagcgtgggggccttcttgtaagaggccaggccctgccccacctctggacagtgcccaagtcagggtccagaactgccccccaacacaggtccacagacaccccaccacctaggcaggggctgggccagggctccaaggcttgccccagaggccacatggccaccagccccagctgccatcagattcaagcccaggaggctgaaaacgagggcccaggaccagaatcgctgcctcctctccccagccccaccttgtacacacagtgtttcattgctccgcgtcttcccagccccagaaaccggctaaaggaccctgcaccatgagagccgaggcctggaggagcccgggtcaggctggggaggaacagaactgggccctcccagagcacctccgcttcccccctgcttccccaggtctctatccagagagagtccccaggtacaacaaatgctaattagatgacagcaaattaaccccctggaggcttctcctggcagagcctccctggggccggggcaggctgtggatggggcggagcagggcagaagatggactgggggagggggcagagagaggagaccaaaatgaggtggtggcacagggtggggcaaggagatcctctctaaggcctctggggtctttgcctggccccatccctagggggcggggaggggacgtaaatccctaatctttaagcccgacttgaggctgagagcagctggaagtttgggtttggtggtttgggggccggggcagccaagctgtatggggcaggacagacagactaatgtagtgagtgtagctgtagctgaggcttaactgggagggatgccgagcttgctggaactactgggaccaagaagcggggtaccccacgcccctgcctgcactcctcgggggcgtggggcgtgccttgctccacccggactccctgggctgcgtcccacatccaccctcctgccccgtggggcaatttaacctttttcatgaaagttatttacaatgaaaagtttttaaaaataaaatttttaaaaatctaaaaaaaaaaaaaaaaaaaaaaaaaaaa

SEQ ID NO: 299 - DNA, 3207 bp, Homo sapiens
gctaagtcaacatataacagcaaacttacaacaattatttaacatttttaaagccatgaagaagggacagagcacggagcggccggggagagcggcagagccagaggcagaggcacggctggctccccgggagggcccttgcggcgcggggcgcagtgcctaggccgcccgggtctcctgcgttgcggggagcgcagcgcaggctctcgcttgccatgagtcacctcttcgatccccggctgcctgccctggccgcctcgcccatgctgtatctgtacggtcccgagagacccggcctccctctggccttcgcccccgcggctgctctagctgcctcgggccgggccgagaccccgcagaagcctccctacagctacatcgcgctcatcgccatggcgatccaggacgcgcccgagcagagggtcacgctcaacggcatctaccagttcatcatggaccgcttccccttctaccacgacaaccggcagggctggcagaacagcatccgccacaacctctcgctcaacgactgcttcgtcaaggtgccccgcgagaaagggcggccgggcaagggcagctactggacgctggacccccgctgcctggacatgtttgagaacggcaactaccggcgccggaagaggaagcccaagccgggccccggggccccggaggccaagaggccccgcgccgagacgcaccagcgcagcgcggaggcgcagccggaggcggggagcggggcagggggctcgggccccgcaatctcccgcctgcaggcagcgcccgcgggcccctcgcccctcctggacggcccctctccgccggcgcccctccactggccggggaccgcgtccccgaacgaggacgctggtgacgctgcccagggcgcagcggccgtggcggtcggccaggcagcgcgcacaggggacggcccggggtcccctctgcgccccgcctcccgcagctctccgaagagctccgacaagtccaagagcttcagcatagacagcatcctggcgggaaagcagggccagaagccgccttcaggggacgaactcctagggggtgccaagcctgggcccggcggccgtctgggtgcctcgctcctggccgcctcctccagcctccgtccgcctttcaacgcttccctgatgctcgacccgcatgtccagggcggcttttaccagctcgggatccccttcctctcttatttccccctgcaggttcccgacacggtactccacttccagtaaagcaaacaatggcacggttcttctcccggcccagcctgagcctccgctgagcgaaaggccacagctcccaccggcggaggattttaaaatgatctttgcctgggtcggcctgtgggttcagggaagtgttaccaaccattgcgcgcaggtgggcgcgctcgcctgccttctccgaagcaaacttttcccagcaactgggagcagctacggagacttaaaagatccccgcggggtcgtgggcaccgcacgtgggccctgcagggacctccaccgcgggagattccttgacgtttgacctgtctaatggagtgtggtcttcagccgcccaccgcaggtcctgcgagtcccgggcatgcaagggcccgcagaccacccaaggcaggccttacaggtgcagttgaggtcctttcgaccggggacccccgtatgaccgtcgcctgcttcgctgttgccgtgtggctcaggccttggttttgagcccatctgggtggtgggtggtcacagctgggtttgttcctgacttgaagttgtggaggtgccgggggtgaccccgggttttcaggttttctgagagatgtagggcccgatgaggatttatgaccaatgttcagctatagaagctgataaccacccagagcaataacacttttattttaaacagagactttttctcttaatttctttctgggtagtaaaaagaacatgtttcattctttgcataaatacttgactctaagcattgacctttgaaaacgcttgtattaacaatttttattaagaaagtgcactctatataacatcttcttgcattacgatagctcattagccaatacacatgcagctatgtaagccacaacagcagacgtcctatccttttgcttttgtttttaagggatcaaaatatttcaagggataccatgaggaagggtgtgaggggaaggggatatgccttggacaatgtcagagttttgatttccatgttttttcaagatccaggcttggtggtcgctatatttttcagaaacagataatgaaagactacatttaatttaaaaagttgggtgaaacaaccaaaagcagatgcagagagagagagggatgaatgcgggggaagaataaggggacgtgctggtgtccgctggaaggggcctctctgggccccagaggacctgaggtttgatggcaggaatctcccagacactcctggcccccgcaccccctgcagccgcccgctcttccctcccagccctgccaggcaggcctggaggctgatactaaatcaaaaccttaaagaggtgactggcagtctggggaggggagaagaggtctgcaacgaaaatctaattaagaacattgagatgttcacaaccaagttcagcttgcagcttccggggaaatgcaaccgacctctatgccatctctagctgggtaatcttcgaggccctgaaatgcaattttctgaacctctaagtcacttttattttatgtcatgtgataaagacacaagtagtcacgcactattggaaataggttgggagggaggtctttaagatcgcttttaaaatagtttccaggacttgtctaaaaatgatgacaaactttgaatccagagggcctgttggtcaatgtgttggaaaggacatttcaggccggcagagtaattggataattcacaggcatagaggtgacttttggaaaattcattctcctatccatgctgaaccaggcttccacgactgggttctacccaggccagtgggaagactctgggaaacttcaggccagccttgattggaagaacttccaggaggagccattgctgagatccaggctcactgtgattcactgaaaatgtagcgaaagggctgtcactggatattttgctatcccaaactctcagcctctgtgaataaagttgttttttcattaacctctcaaaaaaaaaaaaaaaaaa

SEQ ID NO: 300 - DNA, 2917 bp, Homo sapiens
atcagaacagagcgaggctcctggcgcactagggactccaggaggcagctccgccagagacgcgggtcgtgcttcgggaaaccggggggcggggggaggggaagagcgcagaaaagaaaacccaccaaggcggggactggcctgagcggggaggggcggcgaggccggagcccctctctgttgggcggactccccatggccagaggctgagctccactcccgccggccgctccctaggggaaggggaaggagaggggagagcagcgacaggcctccagcaagcaagcgcgggcggcatccgcagtctccagaagtttgagacttggccgtaagcggactcgtgcgccccaactctttgccgcgccagcgcctggagcggagagcagaggcggcccggccgcggcgcgccggctttgtcatgatggccagctaccccgagcccgaggacgcggcgggggccctgctggccccagagaccggtcgcacagtcaaggagccagaagggccgccgccgagcccaggcaagggcggtgggggtggcggcgggacagccccggagaagccggacccggcgcagaagcccccgtactcgtacgtggcgctcatcgccatggcgatccgcgagagcgcggagaagaggctcacgctgtccggcatctaccagtacatcatcgcgaagttcccgttctacgagaagaataagaagggctggcaaaatagcatccgccacaacctcagcctcaacgagtgcttcatcaaggtgccgcgcgagggcggcggcgagcgcaagggcaactactggacgctggacccggcctgcgaagacatgttcgagaagggcaactaccggcgccgccgccgcatgaagaggcccttccggccgccgcccgcgcacttccagcccggcaaggggctcttcggggccggaggcgccgcaggcgggtgcggcgtggcgggcgccggggccgacggctacggctacctggcgccccccaagtacctgcagtctggcttcctcaacaactcgtggccgctaccgcagcctccctcacccatgccctatgcctcctgccagatggcggcagccgcagcggctgcagcagctgcggctgcagccgcgggccccggtagccctggcgcggccgctgtggtcaaggggctggcgggcccggccgcctcgtacgggccgtacacacgcgtgcagagcatggcgctgccccccggcgtagtgaactcgtacaatggcctgggaggcccgccggccgcacccccgcctccgccgcacccccacccgcatccgcacgcacaccatctgcacgcggccgccgcaccgccgcctgccccaccgcaccacggggccgccgcgccgccgccgggccagctcagccctgccagcccagccaccgccgcgcccccggcgcccgcgcccaccagtgcgccgggcctgcagttcgcttgtgcccggcagcccgagctcgccatgatgcattgctcttactgggaccacgacagcaagaccggcgcgctgcattcgcgcctcgatctctgagagcccaccgcatgccggtgcagacggatgcgaggatgcagggacgcgcgacgccggccccggtcgcagccgacgacgccgccgccagcctgacctcacaccctctgggcccgcctctggagccagcgcccagggtccctctgtgctttttcgctttcctaagctcctgtcgctcctctttgtcccctcagtttatgtcctcctgtgctcacctccctgacctctgtgaccttgcactcccctggcctgaagctgcctctctgcgcgctttctactgggctcgtctctttccggagccccagcgtctcctgcccaaattcaccgcggaaagggcccggggcggaggtgcgaccgggcgtcggcagcgcagacctcttggccttctctcacaggtcggtgcgctcgctctccgcgttccccgcccgactgccgtgcagtccatggctagacgcgccggacaggactgatggcgggaccgcgctgcccgagaaagggacggaccaatacgtgtgtttgctccgcgaaccctcttgaagctgttcagaagccgcttgccgcggggcccactaggcggggcgggggttgggacccagcgggagccggggcagcctggctccacggcctgtactcggtttacaccgcgggcgggcgcggagggaggctgcgtttcctccgctatcagtcccgtcgcttcgggcacctccgggccccggcggctggctaatgttttgtttgaaagatcggtggaactttttaagagagtatttaaaaaaaaaaaaaggaaaaaaaattcaccgggcaaccggggaagtattgtggccttggagtttgctaaatccaaatatgaaaatcaaaagctttagtattcctcatcttctcttctggaagatttgcgttagagtttttgttgggccttcaaaaagctgtgttcagagttaggagaatatatccaataaaagatggtttcgtctaccaattggggaagtttcaccctctccctatctgaagaaaaaaatcaaaaacaaatgtccccggatctttcgatgcaagtcctggaggcagggagatcactgcctgcctggcccacgctgctgggacggctcgtcctccctgctttttgtttttcaaacctcctgcttctcccaccttgggaaggagaaatgtgaaacccggcagcggccgacctaggcggtcttgtggcccggagccggcccggcccgaaaaccatagacctggttgtactgtagcttgttgtttgggggaccaaattttctagagagaactagagcacttttgttgtgtttttttgttttgtttttgttttttgccttgtcgattcccgaataaattttgtgttccttcttttaa

SEQ ID NO: 301 - DNA, 3527 bp, Homo sapiens
actgaaagctccggtgccagaccccacccccggccccggcccgggaccccctcccctcccgggatcccccggggttcccaccccgcccgcaccgccggggacccggccggtccggcgcgagcccccgtccggggccctggctcggcccccaggttggaggagcccggagcccgccttcggagctacggcctaacggcggcggcgactgcagtctggagggtccacacttgtgattctcaatggagagtgaaaacgcagattcataatgaaaactagcccccgtcggccactgattctcaaaagacggaggctgccccttcctgttcaaaatgccccaagtgaaacatcagaggaggaacctaagagatcccctgcccaacaggagtctaatcaagcagaggcctccaaggaagtggcagagtccaactcttgcaagtttccagctgggatcaagattattaaccaccccaccatgcccaacacgcaagtagtggccatccccaacaatgctaatattcacagcatcatcacagcactgactgccaagggaaaagagagtggcagtagtgggcccaacaaattcatcctcatcagctgtgggggagccccaactcagcctccaggactccggcctcaaacccaaaccagctatgatgccaaaaggacagaagtgaccctggagaccttgggaccaaaacctgcagctagggatgtgaatcttcctagaccacctggagccctttgcgagcagaaacgggagacctgtgcagatggtgaggcagcaggctgcactatcaacaatagcctatccaacatccagtggcttcgaaagatgagttctgatggactgggctcccgcagcatcaagcaagagatggaggaaaaggagaattgtcacctggagcagcgacaggttaaggttgaggagccttcgagaccatcagcgtcctggcagaactctgtgtctgagcggccaccctactcttacatggccatgatacaattcgccatcaacagcactgagaggaagcgcatgactttgaaagacatctatacgtggattgaggaccactttccctactttaagcacattgccaagccaggctggaagaactccatccgccacaacctttccctgcacgacatgtttgtccgggagacgtctgccaatggcaaggtctccttctggaccattcaccccagtgccaaccgctacttgacattggaccaggtgtttaagccactggacccagggtctccacaattgcccgagcacttggaatcacagcagaaacgaccgaatccagagctccgccggaacatgaccatcaaaaccgaactccccctgggcgcacggcggaagatgaagccactgctaccacgggtcagctcatacctggtacctatccagttcccggtgaaccagtcactggtgttgcagccctcggtgaaggtgccattgcccctggcggcttccctcatgagctcagagcttgcccgccatagcaagcgagtccgcattgcccccaaggtgctgctagctgaggaggggatagctcctctttcttctgcaggaccagggaaagaggagaaactcctgtttggagaagggttttctcctttgcttccagttcagactatcaaggaggaagaaatccagcctggggaggaaatgccacacttagcgagacccatcaaagtggagagccctcccttggaagagtggccctccccggccccatctttcaaagaggaatcatctcactcctgggaggattcgtcccaatctcccaccccaagacccaagaagtcctacagtgggcttaggtccccaacccggtgtgtctcggaaatgcttgtgattcaacacagggagaggagggagaggagccggtctcggaggaaacagcatctactgcctccctgtgtggatgagccggagctgctcttctcagaggggcccagtacttcccgctgggccgcagagctcccgttcccagcagactcctctgaccctgcctcccagctcagctactcccaggaagtgggaggaccttttaagacacccattaaggaaacgctgcccatctcctccaccccgagcaaatctgtcctccccagaacccctgaatcctggaggctcacgcccccagccaaagtagggggactggatttcagcccagtacaaacctcccagggtgcctctgaccccttgcctgaccccctggggctgatggatctcagcaccactcccttgcaaagtgctcccccccttgaatcaccgcaaaggctcctcagttcagaacccttagacctcatctccgtcccctttggcaactcttctccctcagatatagacgtccccaagccaggctccccggagccacaggtttctggccttgcagccaatcgttctctgacagaaggcctggtcctggacacaatgaatgacagcctcagcaagatcctgctggacatcagctttcctggcctggacgaggacccactgggccctgacaacatcaactggtcccagtttattcctgagctacagtagagccctgcccttgcccctgtgctcaagctgtccaccatcccgggcactccaaggctcagtgcaccccaagcctctgagtgaggacagcaggcagggactgttctgctcctcatagctccctgctgcctgattatgcaaaagtagcagtcacaccctagccactgctgggaccttgtgttccccaagagtatctgattcctctgctgtccctgccaggagctgaagggtgggaacaacaaaggcaatggtgaaaagagattaggaaccccccagcctgtttccattctctgcccagcagtctcttaccttccctgatctttgcagggtggtccgtgtaaatagtataaattctccaaattatcctctaattataaatgtaagcttatttccttagatcattatccagagactgccagaaggtgggtaggatgacctggggtttcaattgacttctgttccttgcttttagttttgatagaagggaagacctgcagtgcacggtttcttccaggctgaggtacctggatcttgggttcttcactgcagggacccagacaagtggatctgcttgccagagtcctttttgcccctccctgccacctccccgtgtttccaagtcagctttcctgcaagaagaaatcctggttaaaaaagtcttttgtattgggtcaggagttgaatttggggtgggaggatggatgcaactgaagcagagtgtgggtgcccagatgtgcgctattagatgtttctctgataatgtccccaatcataccagggagactggcattgacgagaactcaggtggaggcttgagaaggccgaaagggcccctgacctgcctggcttccttagcttgcccctcagctttgcaaagagccaccctaggccccagctgaccgcatgggtgtgagccagcttgagaacactaactactcaataaaagcgaaggtggacaaaaaaaaaaaaaaaa

SEQ ID NO: 302 - DNA, 1344 bp, Homo sapiens
ggggacctgcagtcgctgtcgtggctcacggcggtggatgtgcctcggctgcagcagatggcaagtggccgcgtggacctgggtggcccctgcgtgccacatccacacccaggtgccttggctggggtggccgacctgcatgtgggagccactccaagtccccttctccatggcccagcaggcatggccccccgaggcatgccaggtctgggccccataactggccacagagacagcatgagccagttccccgtggggggccagccctcatctggcctgcaggacccgccgcatctgtactcacctgccacccaaccacagttcccgctccccccgggtgcccagcagtgccctcctgtgggcctctatggccccccatttggggtgcggcccccctacccccagccccacgtggctgtgcattcatctcaagaactgcaccccaaacactaccccaagcccatctactcgtacagctgtctgatcgccatggccctgaagaacagcaagacaggcagcctgcctgtgagcgagatctacagcttcatgaaggagcacttcccctacttcaagacggcccccgacgggtggaagaactcggtgcggcacaacctgtctctgaacaagtgcttcgagaaggtggagaacaagatgagcggctcctcccgcaagggctgcctgtgggctctgaacctggcccgcatcgacaagatggaggaggagatgcacaagtggaagaggaaggacctggctgccatccaccggagtatggccaaccctgaggagttggacaagctgatctccgaccggcctgaaagctgccggcgccccggcaaaccgggggaaccagaggcccccgtgctgactcacgccaccacagtggccgtggcgcatggctgcctggctgtctcccagctcccaccccagccactgatgaccctgtccctgcagtcagtccccctgcaccaccaggtccagccccaggcacatcttgctccagactctccagcaccagcccagaccccgccactgcacgccctgccggacctcagccccagcccgctcccccaccccgccatgggaagggctcctgtagacttcatcaacatcagcaccgacatgaacactgaggtggatgccctcgacccgagcatcatggacttcgctctgcaggggaacctgtgggaggagatgaaggatgagggattcagcttggacacactgggcgcctttgcagactccccgcttggctgtgacctgggggcctcaggcctaacccctgcctcgggtggcagcgaccagtccttcccagacttgcaggtgacgggtctctacacagcgtac

SEQ ID NO: 303 - DNA, 5738 bp, Homo sapiens
gcagccgccacattcaacaggcagcagcgcagcgggcgcgccgctggggagagcaagcggcccgcggcgtccgtccgtccttccgtccgcggccctgtcagctggagcgcggcgcaggctctgccccggcccggcggctctggccggccgtccagtccgtgcggcggaccccgaggagcctcgatgtggatggccccgcgaagttaagttctgggctcgcgcttccactccgccgcgccttcctcccagtttccgtccgctcgccgcaccggcttcgttcccccaaatctcggaccgtcccttcgcgccccctccccgtccgcccccagtgctgcgttctccccctcttggctctcctgcggctgggggaggggcgggggtcaccatggccgaggcgcctcaggtggtggagatcgacccggacttcgagccgctgccccggccgcgctcgtgcacctggccgctgcccaggccggagtttagccagtccaactcggccacctccagcccggcgccgtcgggcagcgcggctgccaaccccgacgccgcggcgggcctgccctcggcctcggctgccgctgtcagcgccgacttcatgagcaacctgagcttgctggaggagagcgaggacttcccgcaggcgcccggctccgtggcggcggcggtggcggcggcggccgccgcggccgccaccggggggctgtgcggggacttccagggcccggaggcgggctgcctgcacccagcgccaccgcagcccccgccgcccgggccgctgtcgcagcacccgccggtgccccccgccgccgctgggccgctcgcggggcagccgcgcaagagcagctcgtcccgccgcaacgcgtggggcaacctgtcctacgccgacctcatcaccaaggccatcgagagctcggcggagaagcggctcacgctgtcgcagatctacgagtggatggtcaagagcgtgccctacttcaaggataagggtgacagcaacagctcggcgggctggaagaattcaattcgtcataatctgtccctacacagcaagttcattcgtgtgcagaatgaaggaactggaaaaagttcttggtggatgctcaatccagagggtggcaagagcgggaaatctcctaggagaagagctgcatccatggacaacaacagtaaatttgctaagagccgaagccgagctgccaagaagaaagcatctctccagtctggccaggagggtgctggggacagccctggatcacagttttccaaatggcctgcaagccctggctctcacagcaatgatgactttgataactggagtacatttcgccctcgaactagctcaaatgctagtactattagtgggagactctcacccattatgaccgaacaggatgatcttggagaaggggatgtgcattctatggtgtacccgccatctgccgcaaagatggcctctactttacccagtctgtctgagataagcaatcccgaaaacatggaaaatcttttggataatctcaaccttctctcatcaccaacatcattaactgtttcgacccagtcctcacctggcaccatgatgcagcagacgccgtgctactcgtttgcgccaccaaacaccagtttgaattcacccagcccaaactaccaaaaatatacatatggccaatccagcatgagccctttgccccagatgcctatacaaacacttcaggacaataagtcgagttatggaggtatgagtcagtataactgtgcgcctggactcttgaaggagttgctgacttctgactctcctccccataatgacattatgacaccagttgatcctggggtagcccagcccaacagccgggttctgggccagaacgtcatgatgggccctaattcggtcatgtcaacctatggcagccaggcatctcataacaaaatgatgaatcccagctcccatacccaccctggacatgctcagcagacatctgcagttaacgggcgtcccctgccccacacggtaagcaccatgccccacacctcgggtatgaaccgcctgacccaagtgaagacacctgtacaagtgcctctgccccaccccatgcagatgagtgccctggggggctactcctccgtgagcagctgcaatggctatggcagaatgggccttctccaccaggagaagctcccaagtgacttggatggcatgttcattgagcgcttagactgtgacatggaatccatcattcggaatgacctcatggatggagatacattggattttaactttgacaatgtgttgcccaaccaaagcttcccacacagtgtcaagacaacgacacatagctgggtgtcaggctgagggttagtgagcaggttacacttaaaagtacttcagattgtctgacagcaggaactgagagaagcagtccaaagatgtctttcaccaactcccttttagttttcttggttaaaaaaaaaaacaaaaaaaaaaaccctccttttttcctttcgtcagacttggcagcaaagacatttttcctgtacaggatgtttgcccaatgtgtgcaggttatgtgctgctgtagataaggactgtgccattggaaatttcattacaatgaagtgccaaactcactacaccatataattgcagaaaagattttcagatcctggtgtgctttcaagttttgtatataagcagtagatacagattgtatttgtgtgtgtttttggtttttctaaatatccaattggtccaaggaaagtttatactctttttgtaatactgtgatgggcctcatgtcttgataagttaaacttttgtttgtactacctgttttctgcggaactgacggatcacaaagaactgaatctccattctgcatctccattgaacagccttggacctgttcacgttgccacagaattcacatgagaaccaagtagcctgttatcaatctgctaaattaatggacttgttaaacttttggaaaaaaaaagattaaatgccagctttgtacaggtcttttctatttttttttgtttattttgttatttgcaaatttgtacaaacatttaaatggttctaatttccagataaatgatttttgatgttattgttgggacttaagaacatttttggaatagatattgaactgtaataatgttttcttaaaactagagtctactttgttacatagtcagcttgtaaattttgtggaaccacaggtatttggggcagcattcataattttcattttgtattctaactggattagtactaattttatacatgcttaactggtttgtacactttgggatgctacttagtgatgtttctgactaatcttaaatcattgtaattagtacttgcatattcaacgtttcaggccctggttgggcaggaaagtgatgtatagttatggacactttgcgtttcttatttaggataacttaatatgtttttatgtatgtattttaaagaaatttcatctgcttctactgaactatgcgtactgcatagcatcaagtcttctctagagacctctgtagtcctgggaggcctcataatgtttgtagatcagaaaagggagatctgcatctaaagcaatggtcctttgtcaaacgagggattttgatccacttcaccattttgagttgagctttagcaaaagtttcccctcataattctttgctcttgtttcagtccaggtggaggttggttttgtagttctgccttgaggaattatgtcaacactcatacttcatctcattctcccttctgccctgcagattagattacttagcacactgtggaagtttaagtggaaggagggaatttaaaaatgggacttgagtggtttgtagaatttgtgttcataagttcagatgggtagcaaatggaatagaacttacttaaaaattggggagatttatttgaaaaccagctgtaagttgtgcattgagattatgttaaaagccttggcttaagaatttgaaaatttctttagcctgtagcaacctaaactgtaattcctatcattatgttttattactttccaattacctgtaactgacagaccaaattaattggctttgtgtcctatttagtccatcagtattttcaagtcatgtggaaagcccaaagtcatcacaatgaagagaacaggtgcacagcactgttcctcttgtgttcttgagaaggatctaatttttctgtatatagcccacatcacacttgctttgtcttgtatgttaattgcatcttcattggcttggtatttcctaaatgtttaacaagaacacaagtgttcctgataagatttcctacagtaagccagctctattgtaagcttcccactgtgatgatcatttttttgaagattcattgaacagccaccactctatcatcctcattttggggcagtccaagacatagctggttttagaaacccaagttcctctaagcacagcctcccgggtatgtaactgaacttggtgccaaagtacttgtgtactaatttctattactacgtactgtcactttcctcccgtgccattactgcatcataatacaaggaacctcagagcccccatttgttcattaaagaggcaactacagccaaaatcactgttaaaatcttactacttcatggagtagctcttaggaaaatatatcttcctcctgagtctgggtaattatacctctcccaagcccccattgtgtgttgaaatcctgtcatgaatccttggtagctctctgagaacagtgaagtccagggaaaggcatctggtctgtctggaaagcaaacattatgtggcctctggtagtttttttcctgtaagaatactgactttctggagtaatgagtatatatcagttattgtacatgattgctttgtgaaatgtgcaaatgatatcacctatgcagccttgtttgatttattttctctggtttgtactgttattaaaagcatattgtattatagagctattcagatattttaaatataaagatgtattgtttccgtaatatagacgtatggaatatatttaggtaatagatgtattacttggaaagttctgctttgacaaactgacaaagtctaaatgagcacatgtatcccagtgagcagtaaatcaatggaacatcccaagaagaggataaggatgcttaaaatggaaatcattctccaacgatatacaaattggacttgttcaactgctggatatatgctaccaataaccccagccccaacttaaaattcttacattcaagctcctaagagttcttaatttataactaattttaaaagagaagtttcttttctggttttagtttgggaataatcattcattaaaaaaaatgtattgtggtttatgcgaacagaccaacctggcattacagttggcctctccttgaggtgggcacagcctggcagtgtggccaggggtggccatgtaagtcccatcaggacgtagtcatgcctcctgcatttcgctacccgagtttagtaacagtgcagattccacgttcttgttccgatactctgagaagtgcctgatgttgatgtacttacagacacaagaacaatctttgctataattgtataaagccataaatgtacataaattatgtttaaatggcttggtgtctttcttttctaattatgcagaataagctctttattaggaattttttgtgaagctattaaatacttgagttaagtcttgtcagccacaa

SEQ ID NO: 304 - DNA, 7341 bp, Homo sapiens
gcgcgaggccgtcgattcgctcgcggctccatcgcggcctggccggggggcggtgtctgctgcgccaggttcgctggccgcacgtcttcaggtcctcctgttcctgggaggcgggcgcggcaggactgggaggtggcggcagcgggcgaggactcgccgaggacggggctccggcccgggataaccaactctccttctctcttctttggtgcttccccaggcggcggcggcggcgcccgggagccggagccttcgcggcgtccacgtccctcccccgctgcaccccgccccggcgcgagaggagagcgcgagagccccagccgcgggcgggcgggcggcgaagatggcagaggcaccggcttccccggccccgctctctccgctcgaagtggagctggacccggagttcgagccccagagccgtccgcgatcctgtacgtggcccctgcaaaggccggagctccaagcgagccctgccaagccctcgggggagacggccgccgactccatgatccccgaggaggaggacgatgaagacgacgaggacggcgggggacgggccggctcggccatggcgatcggcggcggcggcgggagcggcacgctgggctccgggctgctccttgaggactcggcccgggtgctggcacccggagggcaagaccccgggtctgggccagccaccgcggcgggcgggctgagcgggggtacacaggcgctgctgcagcctcagcaaccgctgccaccgccgcagccgggggcggctgggggctccgggcagccgaggaaatgttcgtcgcggcggaacgcctggggaaacctgtcctacgcggacctgatcacccgcgccatcgagagctccccggacaaacggctcactctgtcccagatctacgagtggatggtgcgttgcgtgccctacttcaaggataagggcgacagcaacagctctgccggctggaagaactccatccggcacaacctgtcactgcatagtcgattcatgcgggtccagaatgagggaactggcaagagctcttggtggatcatcaaccctgatggggggaagagcggaaaagccccccggcggcgggctgtctccatggacaatagcaacaagtataccaagagccgtggccgcgcagccaagaagaaggcagccctgcagacagcccccgaatcagctgacgacagtccctcccagctctccaagtggcctggcagccccacgtcacgcagcagtgatgagctggatgcgtggacggacttccgttcacgcaccaattctaacgccagcacagtcagtggccgcctgtcgcccatcatggcaagcacagagttggatgaagtccaggacgatgatgcgcctctctcgcccatgctctacagcagctcagccagcctgtcaccttcagtaagcaagccgtgcacggtggaactgccacggctgactgatatggcaggcaccatgaatctgaatgatgggctgactgaaaacctcatggacgacctgctggataacatcacgctcccgccatcccagccatcgcccactgggggactcatgcagcggagctctagcttcccgtataccaccaagggctcgggcctgggctccccaaccagctcctttaacagcacggtgttcggaccttcatctctgaactccctacgccagtctcccatgcagaccatccaagagaacaagccagctaccttctcttccatgtcacactatggtaaccagacactccaggacctgctcacttcggactcacttagccacagcgatgtcatgatgacacagtcggaccccttgatgtctcaggccagcaccgctgtgtctgcccagaattcccgccggaacgtgatgcttcgcaatgatccgatgatgtcctttgctgcccagcctaaccagggaagtttggtcaatcagaacttgctccaccaccagcaccaaacccagggcgctcttggtggcagccgtgccttgtcgaattctgtcagcaacatgggcttgagtgagtccagcagccttgggtcagccaaacaccagcagcagtctcctgtcagccagtctatgcaaaccctctcggactctctctcaggctcctccttgtactcaactagtgcaaacctgcccgtcatgggccatgagaagttccccagcgacttggacctggacatgttcaatgggagcttggaatgtgacatggagtccattatccgtagtgaactcatggatgctgatgggttggattttaactttgattccctcatctccacacagaatgttgttggtttgaacgtggggaacttcactggtgctaagcaggcctcatctcagagctgggtgccaggctgaaggatcactgaggaaggggaagtgggcaaagcagaccctcaaactgacacaagacctacagagaaaaccctttgccaaatctgctctcagcaagtggacagtgataccgtttacagcttaacacctttgtgaatcccacgccattttcctaacccagcagagactgttaatggccccttaccctgggtgaagcacttacccttggaacagaactctaaaaagtatgcaaaatcttccttgtacagggtggtgagccgcctgccagtggaggacagcacccctcagcaccacccaccctcattcagagcacaccgtgagcccccgtcggccattctgtggtgttttaatattgcgatggtttatgggacgttttaagtgttgttcttgtgtttgttttcctttgactttctgagtttttcacatgcattaacttgcggtatttttctgttaaaatgttaaccgtccttcccctagcaaatttaaaaacagaaagaaaatgttgtaccagttaccattccgggttcgagcatcacaagcttttgagcgcatggaactccataaactaacaaattacataaactaaagggggattttctttcttcttttgtttggtagaaaattatccttttctaaaaactgaacaatggcacaattgtttgctatgtgcacccgtccaggacagaaccgtgcataggcaaaaggagtggagcacagcgtccggcccagtgtgtttccggttctgagtcagggtgatctgtggacgggaccccagcaccaagtctacgggtgccagatcagtagggcctgtgatttcctgtcagtgtcctcagctaatgtgaacagtgttggtctgctggttagaaactagaatattgatattttcaggaaagaaatcagctcagctctccactcattgccaaatgtcactaaagggtttagttttaaggagaaagaaaaggaaaaaaaaaaaaaacaaaaaagtcctgttttgctttgcagaacaaatgaacttacaggtgagcattaagcttgcagtgagaaatgtgcgaagagtaaaaacccaagtcaatgctgaggcagttctaacttcactgttttcctaaatacacatccttgattattttcagccttgctatataatctgatctgctagaagtgtatgagtgagaggcaatagcatacaaactgattttttaaatataagcttaggttgtaattgtacaagtgactcaatggaagtacaaaatagggcagttttaacttttttttctgcttctatggatttcattttgttgtgttttcaaaaagttatggtgctgtataggtgctttctgtttaacctggaaagtgtgattatattcgttaccttctttggtagacggaatagttgggaccacctttggtacataagaaattggtataacgatgctctgattagcacagtatatgcatacttctccaaagtgatatatgaagactcttttctttgcataaaaagcattaggcatataaatgtataaatatattttatcatgtacagtacaaaaatggaaccttatgcatgggccttaggaatacaggctagtatttcagcacagacttccctgcttgagttcttgctgatgcttgcaccgtgacagtgggcaccaacacagacgtgccacccaaccccctgcacacaccaccggccaccaggggcccccttgtgcgccttggctttataactcctctgggggtgatattggtggtgatcacagctcctagcataatgagagttccatttggtattgtcacacgtctcctgcctcgcttgggttgccatgtttgagcgatggccctgttgatttcaccctgccttttactgaatctgtaaattgttgtgcaattgtggttatagtagactgtagcacattgccttttctaaactgctacatgtttataatcttcatttttaaagtatgtgtaatttttttaagtatgtattctattcatatggtctgcttgtcagtgagccagacttgcttactatattcctttataataatgctagccacttcctggattctttagtaatgtgctgtatgcaagaactttccagtagcagtgaaggagggttgcctctccaagcttcctaagggatgctgccctgtgtggggatgcattgcagaggcactagtagcatgggggctagagtggggagcgagatgtaaaagggtggggggataggagaattccagagtgcttccagcattagggtcctgagaacttctgagttcagagaaacatgcaaagtgactaacaaaatagctacttacctttgcagttttacagaccctgggagctgctttgggagtgagaaaggcaaccctccaatgtgtttcaactttaaaatgttgaattcttttcagacatggtatctcatttattctccttttctagcgtttgttgaatttcaggcagaatgtcttacagaatgtcctagaaccagattatcatttaatctgaaacagctgaggaagggacagagaaggtacaagggcaaggcagcacaaaacagatcaggagaatgaagagggaatgctttggttttttgttttgttttgttttttctttttcaagtaactaaaacagcatctacatgtagagtgttgtggagagctgagaccagggtaaagtcaagtgcagcatcagtactgcgagacccaccagcccctggagagggtcagccgagaatctggtagtgaagcctgtctagggtcccggcaccctcaccctcagccacctgcagagaggccagggccccagagactagcctggttctgaagtgggcaggggtgctgccagagccctctgccccttatgttgagaccctgctttcaggacaggccagccgttggccaccatgtcacattctgagtgagtgtcacaggtccctaacaataattttctgatctggagcatatcagcagaatgcttagcctcaaggggcctggcagctgtaatgtttgatttatgatgagaactatccgaggccacccttggcctctaaataagctgctctagggagccgcctactttttgatgagaaattagaagagtacctaatgttgaaaacatgacatgcgctcttgggatctgctgttctctccagggctccagaacctgatacctgttaccaaagctaggaaagagctttatcacaagccttcactgtcctggcatgagaactggctgccaggctcagtgtaccccattaactgtgaatgaatctgagcttggtttcctttattgcttcctctgcaatatgattgctgaaacacattttaaaaattcagaagcttgtcactcctgttaatgggaggatcagtcacacatgtgtagtacaaggcggactttgtgtttgtttttggtgttaatttttagcattgtgtgtgttgcttccccaccctgaggagaggacaccatggcttactactcaggacaagtatgccccgctcagggtgtgatttcaggtggcttccaaacttgtacgcagtttaaagatggtggggacagactttgcctctacctagtgaaccccacttaaagaataaggagcatttgaatctcttggaaaaggccatgaagaataaagcagtcaaaaagaagtcctccatgttggtgccaaggacttgcgaggggaaataaaaatgttatccagcctgaccaacatggagaaaccccgtctccattaaaaatacaaaattagcctggcatggtggcgcatgcctgtaatcccagctactctggaggctgaggcaggagaatcgcttgaacccaggaggcggaggtcgcagtgagccgagatcatgccagtgcactccagcctgggtaacaagagtgaaactccgtgtcaaaaaaaaaaaaaaaatgttactcatcctctctgaaagcaaaaaggaaaccctaacagctctgaactctggttttatttttcttgctgtatttgggtgaacattgtatgattaggcataatgttaaaaaaaaaaatttttttttggtagaaatgcaatcaccagtaaagaggtacgaaaaagctagcctctctcagagaccggggaggcagagtactactagaggaagtgaagttctgatggaatcatgcctgtcaaatgaggtcttgaagcggatgcccaaataaaagagtatattttatctaaatcttaagtgggtaacattttatgcagtttaaatgaatggaatattttcctcttgtttagttgtatctgtttgtatttttctttgatgaatgattggtcatgaggcctcttgccacactccagaaatacgtgtgcggctgcttttaagaactatgtgtctggtcacttatttctctaaaattatctcattgcctggcaatcagtcttctcttgtatacttgtcctagcacattatgtacatgggaaatgtaaacaaatgtgaaggaggaccagaaaaattagttaatatttaaaaaaatgtattgtgcattttggcttcacatgtttaactttttttaagaaaaaagttgcatgaatggaaaaaaaaatctgtatacagtatctgtaaaaactatcttatctgtttcaattccttgctcatatcccatataatctagaactaaatatggtgtgtggccatatttaaacacctgagagtcaagcagttgagactttgatttgaagcacctcatccttctttcaatgcgaacactatcatatggcattcttactgaggattttgtctaaccatatgttgccatgaattaactctgccgcctttcttaaggatcaaaaccagtttgatttgggaatcttcccctttccaaatgaaatagagatgcagtacttaactttccttggtgtttgtagatattgccttgtgtattccacttaaaaccgtaatctagtttgtaaaagagatggtgacgcatgtaaataaagcatcagtgacactct

SEQ ID NO: 305 - DNA, 1446 bp, Homo sapiens
ggcacgagctgcccttccccttcaacctcttgctcaaggcatgattccaacagaactgcagcagctctggaaagaagtgacaagtgctcatactgcagaagaaaccacaggcaacaatcacagcagtttggatctgaccacgacatgtgtctcctcctctgcaccttccaagacctccttaataatgaacccacatgcctctaccaatggacagctctcagtccacactcccaaaagggaaagtttgtcccatgaggagcacccccatagccatcctctctatggacatggtgtatgcaagtggccaggctgtgaagcagtgtgcgaagatttccaatcatttctaaaacatctcaacagtgagcatgcgctggacgatagaagtacagcccaatgtagagtacaaatgcaggttgtacagcagttagagctacagcttgcaaaagacaaagaacgcctgcaagccatgatgacccacctgcatgtgaagtctacagaacccaaagccgcccctcagcccttgaatctggtatcaagtgtcactctctccaagtccgcatcggaggcttctccacagagcttacctcatactccaacgaccccaaccgcccccctgactcccgtcacccaaggcccctctgtcatcacaaccaccagcatgcacacggtgggacccatccgcaggcggtactcagacaaatacaacgtgcccatttcgtcagatattgcgcagaaccaagaattttataagaacgcagaagttagaccaccatttacatatgcatctttaattaggcaggccattctcgaatctccagaaaagcagctaacactaaatgagatctataactggttcacacgaatgtttgcttacttccgacgcaacgcggccacgtggaagaatgcagtgcgtcataatcttagtcttcacaagtgttttgtgcgagtagaaaacgttaaaggggcagtatggacagtggatgaagtagaattccaaaaacgaaggccacaaaagatcagtggtaacccttcccttattaaaaacatgcagagcagccacgcctactgcacacctctcaatgcagctttacaggcttcaatggctgagaatagtatacctctatacactaccgcttccatgggaaatcccactctgggcaacttagccagcgcaatacgggaagagctgaacggggcaatggagcataccaacagcaacgagagtgacagcagtccaggcagatctcctatgcaagccgtgcatcctgtacacgtcaaagaagagcccctcgatccagaggaagctgaagggcccctgtccttagtgacaacagccaaccacagtccagattttgaccatgacagagattacgaagatgaaccagtaaacgaggacatggagtgactatcggggcgggccaaccccgagaatgaagattggaaaaa

SEQ ID NO: 306 - DNA, 3633 bp, Homo sapiens
cttgaacctttgtcacccctcacgttgcacaccaaagacataccctagtgattaaatgctgattttgtgtacgattgtccacggacgccaaaacaatcacagagctgcttgatttgttttaattaccagcacaaaatgccatcagtctgggacgtgatcgggcagaggtgtactcacagtagtgtaaatactgctgtaaatagttgtctgatggtggctttgacagtgagctagcttctgagttttcccttctttttatactgttttctgtgctggcttttttgaatcttcctaatttttcatctctttaacaaactcctatgaagttgaaaccgggaagtttgctctaacatttccagagaaggtattaagtcatgatgcaggaatctgcgacagagacaataagcaacagttcaatgaatcaaaatggaatgagcactctaagcagccaattagatgctggcagcagagatggaagatcaagtggtgacaccagctctgaagtaagcacagtagaactgctgcatctgcaacaacagcaggctctccaggcagcaagacaacttcttttacagcagcaaacaagtggattgaaatctcctaagagcagtgataaacagagaccactgcaggtgcctgtgtcagtggccatgatgactccccaggtgatcacccctcagcaaatgcagcagatccttcagcaacaagtcctgtctcctcagcagctacaagcccttctccaacaacagcaggctgtcatgctgcagcagcaacaactacaagagttttacaagaaacagcaagagcagttacatcttcagcttttgcagcagcagcagcaacagcagcagcagcaacaacagcagcaacaacagcagcagcaacaacaacaacaacagcagcaacaacagcagcagcagcagcaacagcagcagcagcagcaacagcatcctggaaagcaagcgaaagagcagcagcagcagcagcagcagcaacagcaattggcagcccagcagcttgtcttccagcagcagcttctccagatgcaacaactccagcagcagcagcatctgctcagccttcagcgtcagggactcatctccattccacctggccaggcagcacttcctgtccaatcgctgcctcaagctggcttaagtcctgctgagattcagcagttatggaaagaagtgactggagttcacagtatggaagacaatggcattaaacatggagggctagacctcactactaacaattcctcctcgactacctcctccaacacttccaaagcatcaccaccaataactcatcattccatagtgaatggacagtcttcagttctaagtgcaagacgagacagctcgtcacatgaggagactggggcctctcacactctctatggccatggagtttgcaaatggccaggctgtgaaagcatttgtgaagattttggacagtttttaaagcaccttaacaatgaacacgcattggatgaccgaagcactgctcagtgtcgagtgcaaatgcaggtggtgcaacagttagaaatacagctttctaaagaacgcgaacgtcttcaagcaatgatgacccacttgcacatgcgaccctcagagcccaaaccatctcccaaacctctaaatctggtgtctagtgtcaccatgtcgaagaatatgttggagacatccccacagagcttacctcaaacccctaccacaccaacggccccagtcaccccgattacccagggaccctcagtaatcaccccagccagtgtgcccaatgtgggagccatacgaaggcgacattcagacaaatacaacattcccatgtcatcagaaattgccccaaactatgaattttataaaaatgcagatgtcagacctccatttacttatgcaactctcataaggcaggctatcatggagtcatctgacaggcagttaacacttaatgaaatttacagctggtttacacggacatttgcttacttcaggcgtaatgcagcaacttggaagaatgcagtacgtcataatcttagcctgcacaagtgttttgttcgagtagaaaatgttaaaggagcagtatggactgtggatgaagtagaataccagaagcgaaggtcacaaaagataacaggaagtccaaccttagtaaaaaatatacctaccagtttaggctatggagcagctcttaatgccagtttgcaggctgccttggcagagagcagtttacctttgctaagtaatcctggactgataaataatgcatccagtggcctactgcaggccgtccacgaagacctcaatggttctctggatcacattgacagcaatggaaacagtagtccgggctgctcacctcagccgcacatacattcaatccacgtcaaggaagagccagtgattgcagaggatgaagactgcccaatgtccttagtgacaacagctaatcacagtccagaattagaagacgacagagagattgaagaagagcctttatctgaagatctggaatgagaactgacttgtgaaacctcagcgtgaagggacatatcactgaccttcataaccactccacaaccatgaatatttgacaaatttttactgtgactatttattaagcatggataaaggagacagccctaaaggaacttactaagccagccctttgggattcagtaccaacaggcaaattgcttgttttcttcttcttcttcttctttttttttttttttttagaaaaaaagacaaaaactgattttcttgaaaaaaaaaaatgaactgttctttctataatggctttgcccatttaaaaaatgtggctcttaagggttcatgaaatgactgaatatgaggatacatgtcctgtagaaagcaaatgcgcctcatatactgccaaaaatagtgttagtttcattaatgtgaattttccagcattcagtagttgtaatgttagaaacaattgctggtcaagttcaacttgttgctattgtttttaatttgcacaggagtagtatcagaaattagtgtcactgcttgtatctagctgaattttaaacaacagaacattagttttttatgttggtgccaccaactgtaaatgacataagttagttattacaaaacacagtaattagactgttgcaaccatctaaaaccttaggcttccagtctgtgctgttagtgttaagatgtaaagtgcaatcctaagctaacattatctgtgcaagcaccatagaaacatttgcatatctgcatagatcttacaactgtactctttacctccttgtgataaagctttgtctacctgcaaacacagtcaaaggctacagctgcaaaccaaagccaactctaaccatggccaagagctcaaggacagaagcagccacatgctttggtcagccttctgtaacttcaattagtacaaaggaaccttttccatgaactacctgctgttttctgatgacctctgggatcttttcatttagccctaaacaaagaaacaaatatgacaaaaaccacaactaaaaaatgttaattcagtcacagagtaatcttctgaggccaaaagtccatctaaatgcaatgaagatttgctttcattaaagacagaggtgaggacaaaatc

SEQ ID NO: 307 - DNA, 2397 bp, Homo sapiens
gcacacactcatcgaaaaaaatttggattattagaagagagaggtctgcggcttccacaccgtacagcgtggtttttcttctcggtataaaagcaaagttgtttttgatacgtgacagtttcccacaagccaggctgatccttttctgtcagtccacttcaccaagcctgcccttggacaaggacccgatgcccaaccccaggcctggcaagccctcggccccttccttggcccttggcccatccccaggagcctcgcccagctggagggctgcacccaaagcctcagacctgctgggggcccggggcccagggggaaccttccagggccgagatcttcgaggcggggcccatgcctcctcttcttccttgaaccccatgccaccatcgcagctgcagctgcccacactgcccctagtcatggtggcaccctccggggcacggctgggccccttgccccacttacaggcactcctccaggacaggccacatttcatgcaccagctctcaacggtggatgcccacgcccggacccctgtgctgcaggtgcaccccctggagagcccagccatgatcagcctcacaccacccaccaccgccactggggtcttctccctcaaggcccggcctggcctcccacctgggatcaacgtggccagcctggaatgggtgtccagggagccggcactgctctgcaccttcccaaatcccagtgcacccaggaaggacagcaccctttcggctgtgccccagagctcctacccactgctggcaaatggtgtctgcaagtggcccggatgtgagaaggtcttcgaagagccagaggacttcctcaagcactgccaggcggaccatcttctggatgagaagggcagggcacaatgtctcctccagagagagatggtacagtctctggagcagcagctggtgctggagaaggagaagctgagtgccatgcaggcccacctggctgggaaaatggcactgaccaaggcttcatctgtggcatcatccgacaagggctcctgctgcatcgtagctgctggcagccaaggccctgtcgtcccagcctggtctggcccccgggaggcccctgacagcctgtttgctgtccggaggcacctgtggggtagccatggaaacagcacattcccagagttcctccacaacatggactacttcaagttccacaacatgcgaccccctttcacctacgccacgctcatccgctgggccatcctggaggctccagagaagcagcggacactcaatgagatctaccactggttcacacgcatgtttgccttcttcagaaaccatcctgccacctggaagaacgccatccgccacaacctgagtctgcacaagtgctttgtgcgggtggagagcgagaagggggctgtgtggaccgtggatgagctggagttccgcaagaaacggagccagaggcccagcaggtgttccaaccctacacctggcccctgacctcaagatcaaggaaaggaggatggacgaacaggggccaaactggtgggaggcagaggtggtgggggcagggatgataggccctggatgtgcccacagggaccaagaagtgaggtttccactgtcttgcctgccagggcccctgttcccccgctggcagccaccccctcccccatcatatcctttgccccaaggctgctcagaggggccccggtcctggccccagcccccacctccgccccagacacaccccccagtcgagccctgcagccaaacagagccttcacaaccagccacacagagcctgcctcagctgctcgcacagattacttcagggctggaaaagtcacacagacacacaaaatgtcacaatcctgtccctcactcaacacaaaccccaaaacacagagagcctgcctcagtacactcaaacaacctcaaagctgcatcatcacacaatcacacacaagcacagccctgacaacccacacaccccaaggcacgcacccacagccagcctcagggcccacaggggcactgtcaacacaggggtgtgcccagaggcctacacagaagcagcgtcagtaccctcaggatctgaggtcccaacacgtgctcgctcacacacacggcctgttagaattcacctgtgtatctcacgcatatgcacacgcacagccccccagtgggtctcttgagtcccgtgcagacacacacagccacacacactgccttgccaaaaataccccgtgtctcccctgccactcacctcactcccattccctgagccctgatccatgcctcagcttagactgcagaggaactactcatttatttgggatccaaggcccccaacccacagtaccgtccccaataaactgcagccgagctccccacaaaaaaaaaaaaaaaa

SEQ ID NO: 308 - DNA, 5926 bp, Homo sapiens
gccgtccctgcggaccggacagtgcggccggcggccggcggccgggacggagcccccagcccgcgaggagggcgcggcgcaggcggcggcggcgcggcggggaggagcccgggccggaaccagggctgggccgggggcggggacgccggggtccgggagcccgggagccggagcgagctgacgagcgtcgcggaaggaccgggaaggaagagcggagccggagcgagccaagcagcccacaaagtgccatgccccggcggggttgaggcgcgcggcggtcggcccggcgcgctgggaggacgcccgggagctgcgcgacgcggggcggcgcggaagggcagccccggcgggcggcggcgggcccgggctgcgaccggagcgagccccatgccccgcgcgggctgacgggccggagcccgcacggagcggccgggcgggacaggtaccgctagagcgacatgatggtggaatctgcctcggagacaatcaggtcggctccatctggtcagaatggcgtgggcagcctctctgggcaagccgatggcagcagcggcggggccacagggacaactgcaagtggcacgggcagggaagtgaccacgggtgcagacagcaatggtgagatgagtcccgcagagctgctgcacttccagcagcaacaggctctccaagtggcccggcagttcctgctgcagcaggcctcaggcctgagctccccagggaacaatgacagcaaacagtctgcctctgctgtgcaggtgcctgtgtcggtggccatgatgtcgccgcagatgcttaccccgcaacagatgcagcagatcctgtcgcccccgcagctgcaggccttgctccagcagcagcaagccctcatgctccagcagctacaggagtactacaagaagcagcaggagcagctccacctgcagctcctcacccagcagcaggctgggaaaccgcagcccaaagaggcactggggaacaagcagctggccttccagcagcagctcctgcaaatgcaacagttgcagcagcagcacctgctcaacctgcagaggcaggggctggtcagcctgcagcccaaccaagcctcggggcccctccagacccttccgcaagctgtttgcccaacagacctgccccagctgtggaagggcgagggtgcccccgggcagcctgccgaggacagcgtcaagcaggaggggctggacctcactggcacggccgccaccgctacctcgtttgccgctccccccaaggtctcaccccccctctcccaccataccctgcccaacggacagcctactgtgctcacatctcggagagacagctcttcccacgaggagacccccggctcccaccccctgtacggacacggagagtgcaagtggccaggctgtgagaccctgtgtgaagacctgggccagtttatcaaacacctcaacacagagcacgccctggatgaccggagtacagcccagtgccgggtacagatgcaggtggtgcagcagctggagatccagctcgccaaggagagcgagcggctgcaggccatgatggcccacctgcacatgcggccctcggagcccaagcccttcagccagccagtgaccgtctctgcagcagactcattcccagatggtctcgtgcaccccccgacctcggccgcagcccctgtcacccctctacggccccctggcctgggctctgcctccctgcatggtgggggcccagcccgtcggagaagcagtgacaagttctgctcccccatctcctcagagctggcccagaatcatgagttctacaagaacgccgacgtccggccccccttcacctacgcctccctcatccgccaggccatcctggaaacccctgacaggcagctgaccctgaatgagatctataactggttcaccaggatgttcgcctatttccgcagaaacactgccacctggaagaacgccgtgcgccacaacctcagcctgcacaagtgcttcgtccgcgtggagaacgtcaagggtgccgtgtggactgtggacgagcgggagtatcagaagcggagaccgccaaagatgacagggagccccaccctggtgaagaacatgatctctggcctcagctatggagcacttaatgccagctaccaggccgccctggccgagagcagcttccccctcctcaacagccctggcatgctgaaccctggctccgccagcagcctgctgcccctcagccacgatgacgtgggtgcccccgtggagccgctgcccagcaacggcagcagcagccctcctcgcctctccccgccccagtacagccaccaggtgcaggtgaaggaggagccagcagaggcagaggaagacaggcagcccgggcctcccctgggcgcccctaaccccagcgcctcggggcctccggaagacagggacctggaggaggagctgccgggagaagaactgtcctaagggcctgtagtgaccggcagggctggggtgagacccctcccttccagaatccaggccccatctcccccaactccacagcccctcccgagcctcaaggcaagtccaggactcagaccggggaggcccgggccagcagctcccagtgtgacctgacaaaaacacgtaggggcagggacggtccccacccccagggacacaacccctggtcttggaccagtagaggacacggagggttcagacccctcctcagaccctccccacatctgaaactgcctccccccaaccaccagcagcagcagggccctcctcccccaccagctctccccacagggcccctcagcatcatggagacccgcaggcggggcttagccacccctcaaacccagggccccctggcacctggctctggccgtgttttctggccagaggcccccactttcctaactcgtgctcccttccgccttcttttccgtactgtgaagaaagaactctccaccccagctcccaccctgccctggcctgggtggaggaactgtgcctccatccccagaagaaacagccccctctgctgctggggtgggactgtctgtgtgccctgtgggggtccgtgtgagcaggcccacctggctccagacccgcccccaacctgagacagaaccaggctgagccaggcctccacccccacccccgtttgctgggggctcctccagccgcccccatgggaagaggcctggtaccgcctcacccacagaggtctgtgccaggtgcgcttctgcaggtggagccaagctctccctgaggccagaggcggggcctgggccgggagcccaggggaaggccaggctggaccccggctccacacccacatccagcctgcaggcctctctgcagtcctctcaccctccctcagctccccttcctctgcagtcaccctcagctccccttccttgcccgcctctccccccgccgccccaccagttaaacggatgaccaaagacctttcttatgccggaagcaaaaaccaaaactttttgttggctttttcctttgtcgcctccccagcacctgccctcccagtctcccaccccggccccaggctggaagccctccctccacttaagttattgttttaaaccaaagtttacagtgtctgttggtggccaagaccttctctctccacccctcctccatccaccctgaggaccctggggctcagtggaggcagggccctgcccccctcccttccgctcctgcccagcctgggggaaggagaaaggaggggagaaagcgggctctcaccccctcaggagtgggcacgggagcccttctccctgaccctgggctgcttcctgggggctctccagacccctctctaggaccaagtcacccgtcgtgctgggagtgtggattctagcaaaagagctggaaaaaagtcagactctccacagaccccctatgggggacccccaactcaaggccaaggactgggcgtatcggatgctcataacacccctggcctggcccctttactgagaagactccttggatatttcccaagaaccccccacatacacccctcacaagccacccctcctgagaggcagggggccctccgccccctccccatgtattccccacctgtgttccgtttgaccagcacagaaatattaaacgtcctctattcaccgggccctgtgtgtgtcaccgaggtgcgggaggggaggagcattaaagctgaaagatcgctctgctcggggagcctgggcagagcagcagcaacgtgagggtcgctgtggtggtggtttctgtgagtggatggaatgagcagccctgcaggggcgctgggcatgtgccctcactgtggacagggcccacccacctccggttcccctgtgcctcctgtcccttccacgcttaaacagggttctctgtcattttcctgttttcttccagagtcccaatcctttgccctagttctttcactagtttgaaatccaagttcttgccagagtgttggagcaaggcagctgatttgctgcagggatggagaggaccaccgccgcagggttcttttacctgtgccaccagctctggagacatccacacccattcccaggtgtccttccaggcccattgtccacgtcttcaagggggctgcctggataggcgtgtgtgtgtgtagtgcccaggtgtggtggtggcatcctgaagcagtaggaccattagtgtgcgtgcacacccacgtggcacactgtgtggtgaccatggtcatcatagtgggctcacggcggaaacgggatcattcaacctatacaaaggggaccctggataggctgcaaggaaagaggccaagggccaagctgctaagccaaagatggcccctgacacctcccccagccccagcacaccagcctgcacctcttatcccgtgttaagtcctggttccccacctgctgcccctcctcaacacagagcccctcccgccgcctcagacccctgtgcacatccccagggcctcagccgtctcattggtctttattttttattttttttaagatggagtttcgctcttattgcccagactggagtgcagtgatgctatctcggctcactgcaacctttgcctcccaggttcaagtgattctcctgcctcagcctcccaagtagctgggattacaggcgtgcaccaccacgccgggctaaatttttttgtatttttagtagagacggggtttctctatgttggtcaggctgatctcgaactcccgacctcaggtgatccgccagcctcagcctcccaaagtgctgggattacaggcgtgagccactgcacccggctctcactggtcttacgccaccttctggacactccctccttgagggcagaaaggagtcccaggcctgtccctagggacaaggcccagggaagagtgtatttggggagcaggggaggggagggtgttgagaaagctgaactggagtcaatcacccttcccacaaatcaccaaactgctggaactctccagccaaatgctgggagaaggacctggagggtgagtctttgctgacctctctctactctcaggcatgtcttttgtccttttcgtccatctatttctgtctgtcgctcactcgccccgctttctctgtctcaccttcatccactctgcaggcctgctccaccacagccctaatcctctggacgcttgtgtagggcctggggtgaattccctgtcccccatggtacctcgagaggggctggggagctcagcttggtctcagagtctccccaccagatactgtttaaaaaagtagcactgatgtgttttgtaatctgcccctcccagccctccgtggaggctgccagggccttgtacggtaaacctagctgcatgtaatctgtggacaatggcattctctacaatgcaataaaaacaattacccatgaaaaaaaaaaaaaaaaa

SEQ ID NO: 309 - DNA, 2338 bp, Homo sapiens
ctcaacgtcgaaccgaaggcgacacccacccaactcctccctctccgccccatagtccacccaacacttgcagcccctccagagaaaaagcccagcggaagaggactccggaaaagtgactatctcggaagaccagggtagagctcccgggagaaaaaggcgaagatccccggccccggatcgccatccccttccctggcaccagcttctctaggctgcgcgaaggaagagggtacgacgccggggagggactgggtgcgcgggcatgaagttggaggtgttcgtccctcgcgcggcccacggggacaagcagggcagtgacctggagggcgcgggcggcagcgacgcgccgtccccgctgtcggcggcgggagacgactccctgggctcagatggggactgcgcggccaacagcccggccgcgggcggcggcgccagagatacgcagggcgacggcgaacagagtgcgggaggcgggccgggcgcggaggaggcgatcccggcagcagctgctgcagcggtggtggcggagggcgcggaggccggggcggcggggccaggcgcgggcggcgcggggagcggcgagggtgcacgcagcaagccatatacgcggcggcccaagcccccctactcgtacatcgcgctcatcgccatggccatccgcgactcggcgggcgggcgcttgacgctggcggagatcaacgagtacctcatgggcaagttcccctttttccgcggcagctacacgggctggcgcaactccgtgcgccacaacctttcgctcaacgactgcttcgtcaaggtgctgcgcgacccctcgcggccctggggcaaggacaactactggatgctcaaccccaacagcgagtacaccttcgccgacggggtcttccgccgccgccgcaagcgcctcagccaccgcgcgccggtccccgcgcccgggctgcggcccgaggaggccccgggcctccccgccgccccgccgcccgcgcccgccgccccggcctcgccccgcatgcgctcgcccgcccgccaggaggagcgcgccagccccgcgggcaagttctccagctccttcgccatcgacagcatcctgcgcaagcccttccgcagccgccgcctcagggacacggcccccgggacgacgcttcagtggggcgccgcgccctgcccgccgctgcccgcgttccccgcgctcctccccgcggcgccctgcagggccctgctgccgctctgcgcgtacggcgcgggcgagccggcgcggctgggcgcgcgcgaggccgaggtgccaccgaccgcgccgcccctcctgcttgcacctctcccggcggcggcccccgccaagccactccgaggcccggcggccggcggcgcgcacctgtactgccccctgcggctgcccgcagccctgcaggcggcctcagtccgccgccctggcccgcacctgccgtacccggtggagacgctcctagcctgagtagcgccgcggggcccgggaacgccgagtgcgcgccgtcggggaggcgggaacgcgggcccgcgcgcggactttgcactttgaatccagaggaagatgaatttttaaaatctccatcaaacgtgccttaaagctaaagcattttgacaggagtatttaaacttagtccaggatattttcctttgtgttttataactttacagaggaccaaagcaattcttgttttagtttctttgcgaagcctgctcctccttcccttcataaggactttttttgtctttctttaacgcccaggcttcgtcttatttctactgtttttgtcgcaacttccattgatttatgtcccttccctcccccctaagtacatcagggaacctttccacactataaatgatatgactactgtttggggtttctgggcccccatccgtgtacgtatgtggcatttccaggtatgactgagtgtgagagacatgtcagaggctcttcagtgatttcttgctattgaccgatgcttcactgtgccaaaagagaaaaaaaatgttgggttttgtaattaaattatttatatatttttgaaacccgaattgaaaatgttgcaggcaacgggctacagctttattagtggttctctaactgtggtctccttgggccaagcaatttctttaaaggaaaagttgattatgtatgtggggtgccaggaccactgccttgaaagcaagtgtgatttttatttttaatattattttatttgtgtctgtgtacatattcatgtataaattttatgaaacccaagcatagtgcttattttttaataaaacaactgacttaacacattgtgaaaaaaaaaaaaaaaaaaaa

SEQ ID NO: 310 - DNA, 5009 bp, Homo sapiens
ccggcccggcccgcccggcccagccgctcctgctgggcgccccaaccgggtccggcccgggggggcgggggccgcggccgccgaggatggggaaatccaacagcaagttgaagcccgaagttgtggaggagctgaccaggaagacctactttaccgagaaggaggtccagcagtggtacaaaggcttcatcaaggactgccccagtgggcagctggatgcggcaggcttccagaagatctacaagcaattcttcccgttcggagaccccaccaagtttgccacatttgttttcaacgtctttgatgaaaacaaggacgggcgaattgagttctccgagttcatccaggcgctgtcggtgacctcacggggaaccctggatgagaagctacggtgggccttcaagctctacgacttggacaatgatggctacatcaccaggaatgagatgctggacattgtggatgccatttaccagatggtggggaataccgtggagctcccagaggaggagaacactcctgagaagagggtggaccggatctttgccatgatggataagaatgccgacgggaagctgaccctgcaggagttccaggagggttccaaggcagacccgtccattgtgcaggcgctgtccctctacgacgggctggtatagtcccaggctggagctggatgcctgggaaccactcacctccttctgtgccatgaggccacctcagccctgacaccaaccccgtgcgtccacccagccttcttccgcatccacacacagccggctgcccttgacccgggaggccccggctctcctctcccctgtcctgcacccatcccccgcctgaagccaccggctccaattgccagcaacctctgcttgtccggaaaacgacaacacgaaatggaaaaggctacagccctctgcataaaccaaggacttggctgcctcgcaggcagcctccgttcctcccgctctcttgcgcgtgtgcttttgttttttattttgaacagacgttttaaaagaaaaaaaaacaactaccttctgtcctagaagacacagactgacagatggggtgaaggcctggggacctcagagaactctgccttgccctcgtccctcgtccttcggcagccggagaggctgtgggtgggccgagggtgtctaggggttctgcctggtcaacgttatttgtcgtcccatcttttggcagcaaaaccacctgcgtggctaggatgattaattatgaggatgatgattttttttgtgataacagtattgtgctttttgtggggaaagtgaggtttttttttatatacatatataattgatatctttaatttattggttgttaactgttgctgctgcctggtgtgtcctcagctcccagggctgcgggcccaccgtttacatgtgcacgccctgacccacctgcccacgccgacttgggaggatggtggcctgcagcggccaagaagccaaaaaaaattttttttttttcagatactgtgcttgatttttggagaggggagaggtggaaattcctaaatggctaatgcactgttccctccagcccgaatgcctcctgccaaaccccttttccctgctgcctctgtccccgcatccttgttctcccctgggtccgtaacattttttccgaggatgaacaggggacatctttaggtttctcaactcttgctttggtgtttgccgcagcatggaaaacagggcgcctaaggctgggagctggaagaaggggcattgggtacccaggcagagtcaggagaggtggtctttgaagtaagttagcagaaatcaaggggacccccgcctccttgggctggggaggggatttcaagatagttcatgactctctcccgctctgccttccctccttcctatctgctttttccagtaaactgcatggtgtccttccctggccttctcttggctcaaaggctgggagggagggaaggagagaagagttccaggcaatcccatcaatatagtccctacacctggggctgcggcccacatgtcttcacggaggcttccagcggtgcctgccactgaggcaggtgcggccccaggaccatcaccaggaatgcgaggccaccctggaccagaggtaggagcccaaggtccggcccttgctctttgattgtgggcagcctcctgccctctctgggtctcagttgccccatctgcagagcgaggaggcccgggctggttggtcttgaaggcccttttccatgccgacatcatgtcactctaggcctggggttcagtttcctgtggctggtgatgctgtggttaagtttgcttgaccccagcagcccgagggactgtctgagtcacagcacagcccctattgcgtggctgctggtgtgtggggtcagttccagcagatgaatgtgtcatgtggcacaccttgtcccttcccgcagcatttcctggttccccccagacccttgagcgctctttgggacccagaaggagtccttgcacagggaaggcttgaggtgagaagccgcttcccagactgtcagggccaggcctgggtctagaattcttgctgctgctttgcagagtcaacagcccatcagcccatgttttagaggggacactttggtcctcggttcccaccctcagcaagcaggcctccagcccgaggaaggcctctgccgtagtgacgttgccgtgtggggctgcgtggctgttccccttggctggagcattcagccaaccccagcgtcccccctgaggcgttcattggcagccccctaggactgcacgctggccccacggtaaccccccctcccccaccaacatcctgcagggatggggtcagtggttccaccttcacaggccactttgaagggtggattctttgaggcccctgccagtcggctccctgctcagctgctggcccgggcgacctgggactcagcaccaacggctgaagtttctcagctgggctctgacctggggtctggggcagggaacgaacatggtggctttgggctgagaggatgagggaggtctttcccaggtcaaattactttcctttggcctctgcctgaggctcgatttgcctctctggtccaatgggactgacactgttgtacaacctgacctgtggctgagggtgtctgggcttaagcatgtggaccccttcggtgtgtccggccttcctccatcgtcctgccctttggccttttggtttgaagccacaggtgtggcttctggccttagcagatggtatgcttgcggaccgcagcccagcatgccggtgggcccacagcccgagccagcccagagctgccggaagggccgcccttcccggccctggcggggtgctggacactggccattttcactagagtttgcctggcagggaccgatctctgccccctcctctccccaggcctctggctgcagtgatgccgcagaatcctgagccaggtgcctcctgagcagcccgtgcgcctctccacagcggcgtttgccacccaatgcggctcgcttcagatgctctgatgcagagggcacgcccatagtccctctgcagagcctcgcactggggccagggcaggcaccagccccaggcggccagtcggccacggcctgtcctcttcctcgtagcgtctgctcctcactttgtgttgatggtgacttaggagaatgttccgattttccatgatctaagcaggccacgtttaaaataacatcaaggcaagcgtacgtgtcaccctctgtactgacatctcttcccctgaaatgcttttcagtttgacagcccgtttcctagacaagtgcacctggggtttcaggaactttgtgttttttcggagggggttggtggggaggtcgggatgcctgggatcccttcctggagaggcaggctgtctctggaaaaagcctccattgcccacccgccaggcggaaagtcaccctgttcccagcgcggtttcagcatttaattttaagggagctaaggaagcgcggcgcgccccctggtggtggtaagccgccaacgcacctgggggctgcaaccccaccggacgggtggtccggagggaggctggagcggggaggcgaggagggggctgtgagtcctcagaggccctgggccaccacatttctggcagcgtttcccagacacccctctgctaggccatccctggatagcaagtgaattaacttaagggcactgtgatgggaagccttgcccccctcttttttttttttttttaatatctgcggaataaacccaatggttaatttttgaatgaataaaaggcttttgttgaataaacagctggtcccatcttctgtcttggcatcttagcatccaggctcaggctctgccccttctccaggatggggtagccccgagtcgccctccccagtctgcacattccctgttgtccctgttcctgcagtggctcccggccccagggaggcccacctcactcccagcctgactcggtggctggcttccttcaggactttgcgcaagtcagttctgctcattgggtctcaatttccccatcccttggatgggagcaagagtctctgctgggcctgcctcgcaggggcctggtgagacccaaatgtgagtgtcatcatcaaagcccctcacagaagtggaggacggtgcccaagagtagcggtttggactgctgctgcctcccacccggagcctgccacttgggggagaaattggtataatgcttgcaaaaacaaacaaacaaaaggcaatgtcttctggttgtggttatttcctttcctgcttgcctccccagccccctttgagtctctttttggggtgccgtcctgtctgaacctgccggtgtgtgtctctggggccagggtcagggcgaggcccaggggtggacaggggccgtgtagcatgccccagcctccccaagctcctgctgtatgtcgtccatgtcacgccaattaaacacgcttcctggacttgtcctcgccaaaaaaaaaaaaaaaaaa

SEQ ID NO: 311 - DNA, 2884 bp, Homo sapiens
agcttcgacggccgccattttctttctttcttagctgttagctgagaggaagtctctgaacaggcggcagcggctcttatagtgcaaccatggcagactattcaacagtgcctcccccctcttctggctcagctggtggcggtggtggcggcggtggtggtggaggagttaacgacgctttcaaagatgcactgcagagagcccggcagattgcagcaaaaattggaggtgatgcagggacatcactgaattcaaatgactatggttatgggggacaaaaaagacctttagaagatggagatcaaccagatgctaagaaagttgctcctcaaaatgactcttttggaacacagttaccaccgatgcatcagcagcaaagcagatctgtaatgacagaagaatacaaagttccagatggaatggttggattcataattggcagaggaggtgaacagatctcacgcatacaacaggaatctggatgcaaaatacagatagctcctgacagtggtggccttccagaaaggtcctgtatgttaactggaacacctgaatctgtccagtcagcaaaacggttactggaccagattgttgaaaaaggaagaccagctcctggcttccatcatggcgatggaccgggaaatgcagttcaagaaatcatgattccagctagcaaggcaggattagtcattggaaaagggggagaaactattaaacagcttcaggaacgggctggagttaaaatggttatgattcaagacgggccgcagaacactggtgctgacaaacctcttaggattacaggagacccatataaagttcaacaagccaaggaaatggtgttagagttaattcgtgatcaaggcggtttcagagaagttcggaatgagtatgggtcaagaataggaggaaatgaagggatagatgtccccattccaagatttgctgttggcattgtaataggaagaaatggagagatgatcaaaaaaatacaaaatgatgctggtgttcgcattcagtttaagccagatgatgggacaacacccgaaaggatagcacaaataacaggacctccagaccgatgtcaacatgctgcagaaattattacagaccttcttcgaagtgttcaggctggtaatcctggtggacctggacctggtggtcgaggaagaggtagaggtcaaggcaactggaacatgggaccacctggtggactacaggaatttaattttattgtgccaactgggaaaactggattaataataggaaaaggaggtgaaaccataaaaagcataagccagcagtctggtgcaagaatagaacttcagagaaatcctccaccaaatgcagatcctaatatgaagttatttacaattcgtggcactccacaacagatagactatgctcggcaactcatagaagaaaagattggtggcccagtaaatcctttagggccacctgtaccccatgggccccatggtgtcccaggcccccatggacctcctgggcctccagggcctggaactccaatgggaccatacaaccctgcaccttataatcctggaccaccaggcccggctcctcatggtcctccagccccatatgctccccagggatggggaaatgcatatccacactggcagcagcaggctcctcctgatccagctaaggcaggaacggatccaaattcagcagcttgggctgcttattacgctcactattatcaacagcaagcacagccaccaccagcagcccctgcaggtgcaccaactacaactcaaactaatggacaaggagatcagcagaatccagccccagctggacaggttgattataccaaggcttgggaagagtactacaagaaaatgggtcaggcagttcctgctccgactggggctcctccaggtggtcagccagattatagtgcagcctgggctgagtattatagacaacaagcagcctattatgcccagacaagtccccagggaatgccacagcatcctccagcacctcagggccaataataagaagtggacaatacagtatttgcttcattgtgtgggggaaaaaaacctttgttaaatatatggatgcagacgacttgatgaagatcttaattttgtttttggtttaaaatagtgtttccttttttttttttttttttgaaaatgtacaaaatatctatcactactgataggaggttaatatttctgtgtagaaatgaaaattggtttgtttttagtatttagtgtagatgtacacattccagcaaatgtatttgcaattatgtggttgatgctttgtgatataaatgtactttttcaatgtatactttcacttttaaaatgcctgttttgtgctttacaataaatgatatgaaacctcctgtgtcggtaagttggatatgtgggtatttaaaggattcataatttcttagcaatgataaattaagatacatatacacaaatatataagctttccccatgaaatattgagtttttaaacactggcatgtttttccccccttgcagtatagtggtagattggaggatcttttccatttattgtattggctctttcagcacaagtaatcctgatatcttcattttttttccttctgtttgattaaaaactgcatgtgtgtacaatgatcttttggcatacttccattgcattaacagtgaaatttccttttatacatgaccactgtttcagacctgtactgctgctataacagttaacctttctgttcttaatttgataatacttgatttccaagactgtttcggcataactaattttaaacagttttcagatagtgaatatgagtagtctaataagaacagtttttttccatgtgaagcaactctttcaatgtatataa

SEQ ID NO: 312 - DNA, 2336 bp, Homo sapiens
ggcgatttcaactctcgaatgggaggaggcagtatagaggtatctgtgcctaggtttgctgtggggattgtaataggaagaaacggggaaatgatcaaaaagatccagaatgatgctggtgtgaggattcagtttaaaccagatgatgggattagtccagaaagagctgcccaggtcatgggccctccggatcggtgtcagcatgcagcgcatatcatcagcgagctgattcttacagcccaggaaagagacggctttggaggcctggcagcagccagaggaagaggtcgtggccgtggcgactggagcgtgggagcccctggtggcgtccaggagataacatacacggtgccagccgataagtgtggcctcgtcataggcaaagggggtgagaacatcaaaagcatcaaccagcagtcaggggcgcacgtggagcttcagaggaacccccctcccaacagcgaccccaacctgcggagattcaccatcaggggggttccccagcagatcgaggtggccaggcagctcatagatgagaaagttggcgggaccaatctcggagcacctggagccttcggacagagtccattcagccagccacctgccccacctcatcaaaatacctttcctccaaggagctccgggtgcttcccaaacatggctgccaaggtgaatgggaacccccacagcacccctgtgagtggtcctccggcctttctgacccagggctggggcagcacctaccaggcgtggcagcagcccacacagcaggtcccaagccagcagagccagccgcagagcagccagcccaactacagcaaggcctgggaagactattacaaaaaaacagagtcacgccgccagcgctgctcctcaggccagctccccaccagactacacaatggcctgggcagaatattacagacagcaggtcgctttctacggacagacgttagggcaggcgcaggcccacagccaggagcagtaggacagcgtcctcgtggccaactctcccctcaaaatcattgtcaaagaaaacctatttgtaacagaggtttttacatttgcaaaccttttgatgaagaactgttgttttgttctgtgaaacactatatttagattaacggaatttttctaaaaatcaggaaaattagttactaaaaattgctgatcatttttgtttcattatttttgttatttcaaatgtataagctctgggattctttttggagcaatacctacaaagtcaggcaccagaatgtgcctcagagctgtgacatttcaacatgatggttttggtttggtttggttttgtgtcctttttatttgcagttttttctgttgcaacagaaagtggcttggaagtcttaggtggtatgtaacaaattctttttaaaaattttaaagcagtatttaagtattcttaaatgtgtaaattcatttaatgttttacttctaatttcttgtatcttggctgtctggttttattgcatttttaaaaaaactgaactattatgtattgtaatgaatgatgtgaattctgaactgagacagataattgtattgctgtccaacaggggttgggaggggcattttgtagggtttgtataatttctagagttcgaaaggggtaatataaaaatgtgctcgtgtgtttagcctacgtttttctcatgcctccattaccagttgcaattgtgtatctaagacctccaagcttgtttttaaaacaaaacaaaaaacctttctctattatctcagaaatataaatactgttatttttaatattaagaaattcaatataacttttaacacacactgtggaacattaaaccgtataaaaatgtagttataactatttttaattccaaggtgttgtttgcttttttcttttaaatattttcttaatattttgtcagattaactagatgaataaataaatctagtattaaccgcattatgaattaaataattttgatttaatgaaagggataatatgatttccagtgtttactgtagtgtatcttgtacagataacatgtatttttaaaggaaaaaaaacggaattgaagctattttttcttgcatttctaattgacctgagggacattccgtttgaaatgtactgaagttacagtttctggttttttctccttatttttcttataatgcttgaaatgtctaactattaaaaaagacaattggaaaatgttatgcatggggtttttaagaaaacaaagtgttctttttatttgactgacaattcattttacactctatataataaaatctccacaaggcatcttgtgggcaaagtcaaaaaaaaaaaaaaaaaa

SEQ ID NO: 313 - DNA, 5182 bp, Homo sapiens
cgaccggacgggtctaggtgagacagaagccaaacaggaggaggaagtggagggtaagtgcttccgggtcccctggcacagcctccgccatcttttcttcgcctaatttgacccgttctttttcccctccttgaaaccttgctctgtacgcatgcgctctttgagtggcctttcccctagttcaagctcccctccgagtcagcgtcctgttcgttagggttatcgaagtgtataaaggtgcagggaaagtgagactgtgtaaaacaaagcggattggggcgttgtgcttccttgtacctcgtgagcctccgttgccttgggcggtcgttttgcgcaccctgccgggagttgtagtcctggacccgaaggtgcctgggaggcgggaggggggttggggcttctcagcgccgattccgcgggaagggccctgggacctcacacttctagtcgcgggagctgcaggtcttacccggagagacgctgcacgtggagccctcgccgctgccgttctcagccggctctggagtgcgggcgggggcgacagggccgattccggagtgggactgatcctttgaaatactccagccatgactaaaagagaagcagaggagctgatagaaattgagattgatggaacagagaaagcagagtgcacagaagaaagcattgtagaacaaacctacgcgccagctgaatgtgtaagccaggccatagacatcaatgaaccaataggcaatttaaagaaactgctagaaccaagactacagtgttctttggatgctcatgaaatttgtctgcaagatatccagctggatccagaacgaagtttatttgaccaaggagtaaaaacagatggaactgtacagcttagtgtacaggtaatttcttaccaaggaattgaaccaaagttaaacatccttgaaattgttaaacctgcggacactgttgaggttgttattgatccagatgcccaccatgctgaatcagaagcacatcttgttgaagaagctcaagtgataactcttgatggcacaaaacacatcacaaccatttcagatgaaacttcagaacaagtgacaagatgggctgctgcactggaaggctataggaaagaacaagaacgccttgggataccctatgatcccatacagtggtccacagaccaagtcctgcattgggtggtttgggtaatgaaggaattcagcatgaccgatatagacctcaccacactcaacatttcggggagagaattatgtagtctcaaccaagaagatttttttcagcgggttcctcggggagaaattctctggagtcatctggaacttctccgaaaatatgtattggcaagtcaagaacaacagatgaatgaaatagttacaattgatcaacctgtgcaaattattccagcatcagtgcaatctgctacacctactaccattaaagttataaatagtagtgcgaaagcagccaaagtacaaagagcgccgaggatttcaggagaagatagaagctcacctgggaacagaacaggaaacaatggccaaatccaactatggcagtttttgctagaacttcttactgataaggacgctcgagactgcatttcttgggttggtgatgaaggtgaatttaagctaaatcagcctgaactggttgcacagaaatggggacagcgtaaaaataagcctacgatgaactatgagaaactcagtcgtgcattaagatattattacgatggggacatgatttgtaaagttcaaggcaagagatttgtgtacaagtttgtctgtgacttgaagactcttattggatacagtgcagcggagttgaaccgtttggtcacagaatgtgaacagaagaaacttgcaaagatgcagctccatggaattgcccagccagtcacagcagtagctctggctactgcttctctgcaaacggaaaaggataattgagccccaggacattctgagactccaaagtctttcttaaaatgtttagagcaagtatagctcttacctttattactgaatttgaatcttcttttatttctaggctgtacagtctgatgcatgatttttttataaatatttcatactcttgtgaatttggatctttttactttgagcatatattttagaatatgtgtatgttaaaggatctccacaatgtctgcagtgtgaaggcaggttcattgtggaatagtttaacagtcaggaaggctaaactggtcagtattaatgtgtagccctaccaaaaatagccagtagtatctgaaaatgaaaaataaatgaagtatctctaggaaacagtctggcttaactatttttgaaaatataactgtttcccctctctgctgctttagatgttgctttacatagaaccagaaaatggaatttctcagctaaagcatgtgtgcctgtttcatctaatcaagcagagctaaaatgttcataccgaataaatttatattaataaattactaaactaagagtatcaggttatttatatatttgcaagcaaaggacagtaagaagttgactggcaaaagagcagtgctgaaggaggagatccaggtttaaatctggcttattaactcaagccaattttaaggattttctgtatagattactcatgtcagaccaagaatttaaattattttgagagaggcatttaattctaataaaccagctgttataaaaattataaaatgatctctgtttttcctgtcagagatttaaaaaactgaaaaggtatacctcaacccaaaaataaaggtttgttttggtttgttatggcttccttttttaaaaaattaccctgtagtgccagtttattatgcaaagcagcttatattcctttgtttctgataaaatgaagactttaaatcagtcagtagtactttacctttcaaggcattagtaaattacttgcaaatagttttaaaaggaaaatacgacctttgttataggcagtcttctctttaagacaatacttttccacttgttttccttttccatattatatatgtgtattcatatagctgtatacatattcagttgatcattttataaacatatgaaggcataaagatatacagaagaaaaattattaaacaactcattttaagattcaaattaactaattcctgcatatatgacattccttacataagcgaacactaaacaaaaatggctagaaatgtctttttctttcttttctctctttgttgtttaaggtattaagcacgaattattacatgagactggcagatagctattaatcctcttacagatttgagaaagttgattctcaaatatttatgcaccttctccttcattgttttctttaaatctgtcctcttaaaaagcttcttaagagctcagttaatgcttttgacttaactaggagaaaaaggcatgataatacaggcaagatggcattgttagcaattctggtagtggtttggaatgaatcctaagaggcagggatcttaaggacaaggaagagaagagagagagggagggatctttgatctctttctctggtaatcttaatgcataattttactaaaacatgttctcaattcattcatattattaagctcttcctgcagttgatatctgagcagagtaagatttgtatttccatttttacttttttgaaagagaatatatggacagattattagtacaatttgggcactgtggttttaagaatatctgagtaaaataacaatatgaaataataaacagaagctctaacgtcaggtaacaaatagacagcaagaaaggttttgcaccatcctcttacggcctagagagttgacaagttgcttgtagttttaaaaaaataataaagtatacccttctggtatatcatcaagagcttaagaatcttggctttcatatttaaaatgcttttggggagacatatattaaaattttagccaagatgatagacatgtctcaattatatatgtgtgtgtatgtttttaaagctaaaaacattacttttagatccctagaatgaaaatttttttctcatctatgcaattcccatatggtttttttttaaatcatattttattcattttctccctttagcaattttcattttatttctcataatttgaacagagacagttctcatacatgatcagatgctttttttttcttcttaccatcatttatgcatgacataggtaatgtgactaatttctccagttgattcaagaaactcattactttgcctcaaattatatgtaaaatatttgttttacttaggttacagttatcagaaaggtagtttttttcttctattaaaatataacattgtgaaagaaaataaaatttatgctattctttgctttgtttttataaatgaatttttcatagaatttacagtatattcaaaggaagaaagataaaattattggtcatcatttgtaccttagaagtacaagaatttaagtaaaagaaatgttcatttttgttttaaaatttgttttccatgtgaagtttttattgagccaactttcatacatatcttgctagcctaaagtctaaatatttgtgttggcatcagaaaaacaaatgaggcagaattgctatgtgtggttgatcttcagataaattgactgatcacagttatttttgtatcagtctatgttattaggaaaaattgtttagttgttttctcccctgattaatggtgatattcaagtatgatacaaaaagaattgtaccaccaaatatttttgtgaggtctgctgttttccatattcattttatgctactgcctttaagaaagaactagtgtatccttgaaatagcacaaaaatgttttaaaattcataattgcaaaacaaatctgtgactaacttaatgtcttcagatctaaagggtgtaaaaatattgatacttcaatatttcacttgctgccaggaaaaacaaaattctcaatcttttgtaaatgggaggaggacttttgcatacatttttactctttaaataacgacaacgacacttatactgtcataataacaattatgtatttctttgtggttttaattttttttgtaattttacataaaacagttattttctatttttacgcagataaatatttgtgcataaaatgtaaaaatagtaaaatgagaaaaataaaactattatacagtaaa

SEQ ID NO: 314 - DNA, 3069 bp, Homo sapiens
gctttctttgtgtggctgaagcgctagaaatggcatattttctttcccttcgttaaaaaatcagaccctctttcccctctctccccgcgggaacacagctagggagtgggtaggagcaggatctgccgacgagggcagaggcggaaaatcctcgggcgatgagctgaagagggccgggtccgggagggatgctgggagcttgactcactcgcacaccatgtgtccctccgcgcgcagcacgggggacttttcggtggggattttgggcgccgaccagacgcggcattttcggaaaatagcgccctgtgcagctgaagcgctttgtgtgtagcggggccgcgtcagcccggccgggtacgaggcgcctcgggtccccgcaccacctcctgctgccttcccgtcgccgctcccgaagcttttccagatgtccctggtagatttgggaaagaagcttttagaagcggcacgagcaggtcaagatgatgaagttcgtattttgatggcaaatggagctccctttactacagactggctgggaacttctccacttcatctagcagcacagtatggtcattattccaccacagaggtactgctgcgagctggtgtgagcagagatgccagaaccaaagtggaccgaacaccattacatatggcagcttctgagggccatgccagcatagtagaggttttacttaagcatggtgctgatgtcaatgcaaaggacatgttaaagatgacagctctccattgggccacagaacacaatcatcaagaggtggtggaacttttaatcaaatatggtgctgatgtacacacgcaaagtaaattttgtaaaactgcatttgatatttcaatagacaatggaaatgaagatttagcagagatattacagattgctatgcagaaccaaatcaacacaaacccagagagtcctgacactgtgacaatacatgctgcaacaccacagtttatcattggacctggaggggtggtgaacctaacaggtctggtatcttcagaaaattcatccaaggcaacagatgaaacgggtgtatctgctgttcagtttggaaactcttctacatcagtattagctacattagctgccttagctgaagcatctgctccattgtccaattcttcagaaactccagtagtggccacagaagaagtagttactgcagaatctgtggatggtgccattcagcaagtagttagttcagggggtcagcaagtcatcacaatagttacagatggaattcagcttggaaatttgcactctattccaaccagtggaattggtcagcccatcattgtgaccatgccagatggacaacaagtattaacagtaccagcaacagacattgctgaagaaactgttataagtgaagaaccaccagctaagagacaatgtatcgaaataattgaaaaccgggtggaatctgcagaaatagaagagagagaagctcttcagaaacagctggatgaagcaaatcgagaagcacaaaaatatcgacagcagctcctaaagaaagaacaggaagcagaggcctacagacagaagttggaagctatgactcgtcttcagactaataaagaagctgtttaattgaaatgaacatgtagtttgattttacttttggtcaagaaagaatacaatcttgaactgtacacaacaaaggtacagccatgggaatacagaatgatagaagagactacagatggataattggacttaagccatgagctctgagttcttgtaacataaaactttactttagaagttgtgaaatgtatttaaaactgaattctgtaaatagtttttttttttttacagttccaaatgagttgataaagattgttgaagagatccaaaaccagaataagccactgtttttgtgaattctttttgattttagtacaaaccttaatttctcagaaacggaacagttttaagggtgatcgttgttggttaggccaaatgttgtgtaataattatggtggactgatgctggaattactcctgtaggtataaacctctgtatgaagagaagatttctcccaggaaatctttgtacagctttaagttgtgtcagattctctgaaaacattttttagaaagcaaaatttttatatttgttcaatttcagctatacccaagtagatttacatgtatatgaagcaaatatttttaaaaatttctgtttgtacatattctgcatgttttataatttcaaaatgcatcacttacataggtatttctcccacagaaatgatgaaagtgaccagaaaaaaacaaaaacaaaacccctttactctgtaggtcattgaaacgaagtaagctggcagctggttttattggaatgacagtgttctcggaaggagcagcctacaagataacttgaatttgccaattctgcaaaatctgtgcttttttgaaaatttaagagtggggacgtgaaactgtattctgtgccttccatcatgatttccacatgaaagcactttaaggcactgattttaagataatgtttttggaaaacccaatgcatatgggtttctgaaatattttatggacttatttctccccaggaaatgattcttacggaaaaaaattgcttttgtatgtagaacaggaactttttgtattacagtgatgcaatagacatgtctaatgtaacttctacttttccttttgaaagctcagtgtctgtgctatgacttgctctcatcacaatattgttgaattccacaatgtatggacattaaacactggcagactgttcactttttcttttttttttttggtaaaatattacttcaaacccctttttcttgctttatttttcagtgttttattgctttatgaactgtttaaccctgaaatccctctaggttatctatactgtataaaaaagcaattacccttaaaactgtactctggcctacttttctattttgcaattaaatatctttttcacatatgttcattgtagacttatgtttttatcacatcttattaacacattaaaaatgttatcctactgcaaaaaaaaaaaaaaaaaa

SEQ ID NO: 315 - DNA, 1622 bp, Homo sapiens
gctttctttgtgtggctgaagcgctagaaatggcatattttctttcccttcgttaaaaaatcagaccctctttcccctctctccccgcgggaacacagctagggagtgggtaggagcaggatctgccgacgagggcagaggcggaaaatcctcgggcgatgagctgaagagggccgggtccgggagggatgctgggagcttgactcactcgcacaccatgtgtccctccgcgcgcagcacgggggacttttcggtggggattttgggcgccgaccagacgcggcattttcggaaaatagcgccctgtgcagctgaagcgctttgtgtgtagcggggccgcgtcagcccggccgggtacgaggcgcctcgggtccccgcaccacctcctgctgccttcccgtcgccgctcccgaagcttttccagatgtccctggtagatttgggaaagaagcttttagaagcggcacgagcaggtcaagatgatgaagttcgtattttgatggcaaatggagctccctttactacagactggctgggaacttctccacttcatctagcagcacagtatggtcattattccaccacagaggtactgctgcgagctggtgtgagcagagatgccagaaccaaagtggaccgaacaccattacatatggcagcttctgagggccatgccagcatagtagaggttttacttaagcatggtgctgatgtcaatgcaaaggacatgttaaagatgacagctctccattgggccacagaacacaatcatcaagaggtggtggaacttttaatcaaatatggtgctgatgtacacacgcaaagtaaattttgtaaaactgcatttgatatttcaatagacaatggaaatgaagatttagcagagatattacagattgctatgcagaaccaaatcaacacaaacccagagagtcctgacactgtgacaatacatgctgcaacaccacagtttatcattggacctggaggggtggtgaacctaacagatgaaacgggtgtatctgctgttcagtttggaaactcttctacatcagtattagctacattagctgccttagctgaagcatctgctccattgtccaattcttcagaaactccagtagtggccacagaagaagtagttactgcagaatctgtggatggtgccattcagcaagtagttagttcagggggtcagcaagtcatcacaatagttacagatggaattcagcttggaaatttgcactctattccaaccagtggaattggtcagcccatcattgtgaccatgccagatggacaacaagtattaacagtaccagcaacagacattgctgaagaaactgttataagtgaagaaccaccagctaagagacaatgtatcgaaataattgaaaaccgggtggaatctgcagaaatagaagtaaggagtcttttacccggtgtgctttgccgcagtcatccaaaataaattcaattttttttgtcttttatatttattactgacagtattgttttgatacagaatgaaagtgcgtagtattttcattttgtttatttttgccttatacatatagcaagccctcaataaataaatattgaatgaatgaaaaaaaaaaaaa

SEQ ID NO: 316 - DNA, 1404 bp, Homo sapiens
cggcgttctccacctgcgcgggcctgaatggccttcaggagcacagtcggcctgaggagttgacggttactcaccgccgtgagcccaagtaactcgccctccttcggctagaaaccctccgcctgggcccgcgcgacaggagcgcggtctctgaggggagcggcgaccccgccagccccggtctctttccctggcggcggcggcttcttccgtgggacaatatgttcaagagaatggccgaatttgggcctgactccggcgggagagtaaagggtgttactatcgttaaaccaatagtttacggtaatgttgctcggtattttggaaagaaaagagaagaagatgggcacactcatcagtggacagtatatgtgaaaccatatagaaatgaggatatgtcagcatatgtgaagaaaatccagtttaaattacatgaaagctatggcaatcctttaagagttgttactaaacctccatatgaaattactgaaacaggatggggtgaattcgaaataatcatcaaaatatttttcattgaccctaatgaaagacctgtaaccctgtatcatttgctaaagctgtttcaatcagacaccaatgcaatgctggggaaaaagacagtggtttcagagttctatgatgaaatgatatttcaagacccaacagcaatgatgcaacaattattgacaacatctcgtcagctaacattaggagcctataagcatgaaacagaatttgcagagcttgaagtgaaaaccagagaaaaattagaagctgctaagaaaaaaacaagctttgagattgcagagcttaaggagagattaaaagcaagtcgtgaaactataaattgtttaaaaaatgaaatcagaaaacttgaagaagatgaccaagcaaaagacatataaacagttctcatgagaacttggtagtaagctaaactgaaaataaggtgggcttcactggagaaatggacttactgcaaatgctgtgatgtttcttagaggaacttcatatacagctgttgaccatgaatttcttagcaataggaatttgtactatttaagcaatctttaatggaaaatatgtgtgtaagaatggatgctatataggtattttaccaacccattttaagaaaattctatgatattaagcacagtttttaaaaatgtttattgtagtatatgtatagcttattacccttttgacaggcatcaaaatttcattataaagtattacttgtacaaattttgtacttctttagtggctagaattagtgaagaaacttaatgtgtatatttaatttcttcaagttcttacctgcccccatccttttttgtatatgatgtgtccagtaagtattcaataaatgtagtttacagatcctaaaaaaaaaaaaaaaaaaaa

SEQ ID NO: 317 - DNA, 4182 bp, Homo sapiens
gggtcctgtgcgcgtgcgcagcgaacagctgtcacctagtgcggaacaagtctcccaaatttcccaaatctccctgggccggaggccactgtcttctcttcctcctccaccgagtcgtgctctcgccccaacccgcgcgccagacactgccctaaccatcatggaggtggccgaggtggaaagtcctctgaaccccagctgtaagataatgaccttcagaccctccatggaggagttccgggagttcaacaaataccttgcatacatggagtctaaaggagcccatcgtgcgggtcttgcaaaggtgattcctcctaaggagtggaagccaagacagtgctatgatgacattgataatttgctcattccagcaccaattcagcagatggtcacagggcagtcaggactgttcactcagtacaacatccagaaaaaagcgatgactgtgaaggagttcaggcagctggccaacagtggcaaatattgtactccaagatacttggattacgaagatttggagcgcaagtactggaagaacttaacttttgtggcacctatctatggtgcagatattaatgggagcatatatgatgagggtgtggatgaatggaacatagctcgcctcaatacagtcttggatgtggttgaagaagagtgtggcatttctattgagggtgtaaataccccatatctctattttggcatgtggaagaccacgtttgcatggcacaccgaagacatggacctctatagcattaattatctccactttggagagcccaagtcttggtatgctatacctccggagcatggaaaacgacttgaaagactagctcaaggttttttcccaagcagctcccaagggtgtgatgcatttcttcgccacaagatgacattgatttctccatcagtattgaagaaatatggtattccctttgacaagataacccaggaggctggagaattcatgatcactttcccatatggctaccatgctggttttaatcatggtttcaactgtgcagaatctacaaattttgctactgtcagatggattgactatggaaaagttgccaaattgtgcacttgcaggaaagacatggtgaagatttcaatggatatctttgtgaggaaatttcagccagacagatatcagctttggaaacaaggaaaggatatatacaccattgatcacacgaagcctactccagcatccacccctgaagtaaaagcatggctgcagaggaggaggaaagtaagaaaagcatcccgaagcttccagtgtgctaggtctacctctaaaaggcctaaggctgatgaggaagaggaagtgtcagatgaagtcgatggggcagaggtccctaaccccgactcagtcacagatgacctcaaggtcagtgaaaagtcagaagcagcagtgaagctgaggaacacagaagcatcttcagaagaagagtcatctgctagcaggatgcaggtggagcagaatttatcagatcatatcaaactctcaggaaacagctgcttaagtacatctgtaacagaagacataaaaactgaggatgacaaagcttatgcatatagaagtgtaccttctatatccagtgaggctgatgattccattccattgtctactggctatgagaagcccgagaaatcagacccatccgagctttcatggccaaagtcacctgagtcatgctcatcagtggcagagagtaatggtgtgttaacagagggagaagagagtgatgtggagagccatgggaatggccttgaacctggggaaatcccagcggtccccagtggagagagaaatagcttcaaagtccccagtatagcagagggagagaacaaaacctctaagagttggcgccatccacttagcaggcctccagcaagatctccgatgactcttgtgaagcagcaggcgccaagtgatgaagaattgcctgaggttctgtccattgaggaggaagtggaagaaacagagtcttgggcgaaacctctcatccacctttggcagacgaagtcccctaacttcgcagctgagcaagagtataatgcaacagtggccaggatgaagccacactgtgccatctgcactctgctcatgccgtaccacaagccagatagcagcaatgaagaaaatgatgctagatgggagacaaaattagatgaagtcgttacatcggagggaaagactaagcccctcataccagagatgtgttttatttatagtgaagaaaatatagaatattctccacccaatgccttccttgaagaggatggaacaagtctccttatttcctgtgcaaagtgctgcgtacgggttcatgcaagttgttatggtattccttctcatgagatctgtgatggatggctgtgtgcccggtgcaaaagaaatgcgtggacagcagaatgctgtctctgcaatttgagaggaggtgctcttaagcaaacgaagaacaataagtgggcccatgtcatgtgcgccgttgcggtcccagaagttcgattcactaatgtcccagaaaggacacaaatagatgtaggcagaatacctttacagaggttaaaattgaaatgcatcttctgcagacaccgggttaagagggtctctggagcctgcatccagtgttcctacggtcgctgcccggcctccttccatgtcacttgtgcccatgctgctggggtactgatggagcctgatgattggccttatgtggtgaacattacatgctttcgacataaggtcaaccccaacgtgaagtccaaggcttgcgagaaggtcatttccgtgggtcaaacggtcatcacgaagcatcggaacacccggtattacagttgcagagtgatggctgtgacatcgcagaccttctatgaggtcatgtttgatgatggctcctttagcagagacacatttcctgaggatatcgtgagccgagactgtctgaagctgggcccacctgctgagggagaagtcgtccaagtcaagtggcccgatggcaaactctatggagcaaaatattttggatcaaatattgcccacatgtaccaggttgagtttgaagatggatcccagatagcaatgaagagagaggacatctacactttagatgaagagttacccaagagagtgaaagctcgatttgtaagtgctggcagatgccacttggggacctgccaagtgaattccttgtcctcacctcatgtttcccaagcccagcaggaaacatacttgggcttttggattaattctaaaaaaagccaatgcaacattttccttagtggaacctattgaatgcaaacttcaaattcaaccaaaatcggggaaattaatgcatgtgctttacttttcttctaatgaagtcacatgatgcttctttgtgttgacatttattggtgcacaaaaatacttactgaatgtgtgctctgtgtaaaacaccaggagcaaacaaagataccatcaaggcatttgcaatcttgttagtagaagcaacattaaaagtattcaggagtagatcaaaggggactcggcataattgaatgtctgtctattcttttataggtttttcatggattgactaccttctgtctcagaaagttactgatgtttgtgtcagttcatcattaagctaaactctgactttcataataaaagggataaacaaagcctaaatgctagttgtgggaatactaaagcagttttttaaaaaggaaatagtagtttcatgccctcacataccattaaaagatgaacaaacatggacaaatattcaaaactgcagtcattgaaaaatataattcacaataatttagacttcatattattgtatcataaaatattcagtggaccctgaaatgaagtcagttttattcatttagaattatatctattgtgtctgtgaaatgataaatcctaaatagagaaatttgaatggatggggtttttctgactaaaatgaaattttttttctgaataattcagtttagtgagtgcttatgatatacttgtctgcagtgatagagtcactatagattatttggttattttggaaaaaccaagggttttcttaaatcagggatgtccaatctttttgcatccctgggccatacttgaagaagaagaattgtctttggcctcacataaactacactaacaatagctgatgagctacc

SEQ ID NO: 318 - DNA, 1501 bp, Homo sapiens
gacaccccctgggatcacactgagcttgccacatccccaaggcggccgaaccctccgcaaccaccagcccaggttaatccccagaggctccatggagttccctggcctggggtccctggggacctcagagcccctcccccagtttgtggatcctgctctggtgtcctccacaccagaatcaggggttttcttcccctctgggcctgagggcttggatgcagcagcttcctccactgccccgagcacagccaccgctgcagctgcggcactggcctactacagggacgctgaggcctacagacactccccagtctttcaggtgtacccattgctcaactgtatggaggggatcccagggggctcaccatatgccggctgggcctacggcaagacggggctctaccctgcctcaactgtgtgtcccacccgcgaggactctcctccccaggccgtggaagatctggatggaaaaggcagcaccagcttcctggagactttgaagacagagcggctgagcccagacctcctgaccctgggacctgcactgccttcatcactccctgtccccaatagtgcttatgggggccctgacttttccagtaccttcttttctcccaccgggagccccctcaattcagcagcctattcctctcccaagcttcgtggaactctccccctgcctccctgtgaggccagggagtgtgtgaactgcggagcaacagccactccactgtggcggagggacaggacaggccactacctatgcaacgcctgcggcctctatcacaagatgaatgggcagaacaggcccctcatccggcccaagaagcgcctgattgtcagtaaacgggcaggtactcagtgcaccaactgccagacgaccaccacgacactgtggcggagaaatgccagtggggatcccgtgtgcaatgcctgcggcctctactacaagctacaccaggtgaaccggccactgaccatgcggaaggatggtattcagactcgaaaccgcaaggcatctggaaaagggaaaaagaaacggggctccagtctgggaggcacaggagcagccgaaggaccagctggtggctttatggtggtggctgggggcagcggtagcgggaattgtggggaggtggcttcaggcctgacactgggccccccaggtactgcccatctctaccaaggcctgggccctgtggtgctgtcagggcctgttagccacctcatgcctttccctggacccctactgggctcacccacgggctccttccccacaggccccatgccccccaccaccagcactactgtggtggctccgctcagctcatgagggcacagagcatggcctccagaggaggggtggtgtccttctcctcttgtagccagaattctggacaacccaagtctctgggccccaggcaccccctggcttgaaccttcaaagcttttgtaaaataaaaccaccaaagtcctgaaaaaaaaaaaaaaaaaaaaaaaa

SEQ ID NO: 319 - DNA, 2729 bp, Homo sapiens
tcgagatccattgtgctctaaagggagtcggcagctggcgccagggcggccggaggatgccgaggggccggagccgggcgggcccgagcgcgaggcgcactctacccccagctcctaccctgtaagccccgccagcctccggacgtgctgtccctgggcccgtcgccctcggggctcccgccggaactccttcactctcagaggccgagtccctcccctccccacggctgcgtgtggccgttgccgtctgcacccagaccctgagccgcccgcgccggccatggaggtggcgccggagcagcccggctggatggcgcacccggccgtgctgaatgcgcacgaccccgactcacaccacccgggcctggcgcacaactacatggaacccgcgcacgtgctgcctccagacgaggtggacgtcttcttcaatcacctcgactcgcagggcaacccctactatgccaaccccgctcacgcgcgggcggccgtctcctacagccccgcgcacgcccgcctgaccgggagccagatgtgccgcccacacttgttgcacagcccgggtttgccctggctggacgggggcaaagcagccctctctgccgctgcggcccaccaccacaacccctggaccgtgagccccttctccaagacgccactgcacccctcagctgctggaggccctggaggcccactctctgtgtacccaggggctgggggtgggagcgggggaggcagcgggagctcagtggcctccctcacccctacagcagcccactctggctcccaccttttcggcttcccacccacgccacccaaagaagtgtctcctgaccctagcaccacgggggctgcgtctccagcctcatcttccgcggggggtagtgcagcccgaggagaggacaaggacggcgtcaagtaccaggtgtcactgacggagagcatgaagatggaaagtggcagtcccctgcgcccaggcctagctactatgggcacccagcctgctacacaccaccccatccccacctacccctcctatgtgccggcggctgcccacgactacagcagcggactcttccaccccggaggcttcctggggggaccggcctccagcttcacccctaagcagcgcagcaaggctcgttcctgttcagaaggccgggagtgtgtcaactgtggggccacagccacccctctctggcggcgggacggcaccggccactacctgtgcaatgcctgtggcctctaccacaagatgaatgggcagaaccgaccactcatcaagcccaagcgaagactgtcggccgccagaagagccggcacctgttgtgcaaattgtcagacgacaaccaccaccttatggcgccgaaacgccaacggggaccctgtctgcaacgcctgtggcctctactacaagctgcacaatgttaacaggccactgaccatgaagaaggaagggatccagactcggaaccggaagatgtccaacaagtccaagaagagcaagaaaggggcggagtgcttcgaggagctgtcaaagtgcatgcaggagaagtcatcccccttcagtgcagctgccctggctggacacatggctcctgtgggccacctcccgcccttcagccactccggacacatcctgcccactccgacgcccatccacccctcctccagcctctccttcggccacccccacccgtccagcatggtgaccgccatgggctagggaacagatggacgtcgaggaccgggcactcccggatgggtggaccaaacccttagcagcccagcatttcccgaagccgacaccactcctgcctgcccggctcggcccagcaccccctctcctggagggcgcccagcagcctgccagcagttactgtgaatgttccccaccgctgagaggctgcctccgcacctgaccgctgcccaggtggggtttcctgcatggacagttgtttggagaacaacaaggacaactttatgtagagaaaaggaggggacgggacagacgaaggcaaccatttttagaaggaaaaaggattaggcaaaaataatttattttgctcttgtttctaacaaggacttggagacttggtggtctgagctgtcccaagtcctccggttcttcctcgggattggcgggtccacttgccagggctctgggggcagatttgtggggacctcagcctgcaccctcttctcctctggcttccctctctgaaatagccgaactccaggctgggctgagccaaagccagagtggccacggccagggagggtgagctggtgcctgctttgacgggccaggcctggagggagagacaatcacgggcggtcctgcacagattcccaggccagggctgggtcacaggaaggaaacaacattttcttgaaaggggaaacgtctcccagatcgctcccttggctttgaggccgaagctgctgtgactgtgtccccttactgagcgcaagcacagcctgtcttgtcaggtggaccctgtaaatacatccttttttctgctaacccttcaaccccctcgcctcctactctgagacaaaagaaaaaatattaaaaaaatgcataggcttaactcgctgatgagttaattgttttatttttaaactcttttggggtccagttgattgtacgtagccacaggagccctgctatgaaaggaataaaacctaaggttgggagctttgcaattctttttgggaaaaggggcctt

SEQ ID NO: 320 - DNA, 3067 bp, Homo sapiens
ggcgccgtcttgatactttcagaaagaatgcattccctgtaaaaaaaaaaaaaaaatactgagagagggagagagagagagaagaagagagagagacggagggagagcgagacagagcgagcaacgcaatctgaccgagcaggtcgtacgccgccgcctcctcctcctctctgctcttcgctacccaggtgacccgaggagggactccgcctccgagcggctgaggaccccggtgcagaggagcctggctcgcagaattgcagagtcgtcgcccctttttacaacctggtcccgttttattctgccgtacccagtttttggatttttgtcttccccttcttctctttgctaaacgacccctccaagataatttttaaaaaaccttctcctttgctcacctttgcttcccagccttcccatccccccaccgaaagcaaatcattcaacgacccccgaccctccgacggcaggagccccccgacctcccaggcggaccgccctccctccccgcgcgcgggttccgggcccggcgagagggcgcgagcacagccgaggccatggaggtgacggcggaccagccgcgctgggtgagccaccaccaccccgccgtgctcaacgggcagcacccggacacgcaccacccgggcctcagccactcctacatggacgcggcgcagtacccgctgccggaggaggtggatgtgctttttaacatcgacggtcaaggcaaccacgtcccgccctactacggaaactcggtcagggccacggtgcagaggtaccctccgacccaccacgggagccaggtgtgccgcccgcctctgcttcatggatccctaccctggctggacggcggcaaagccctgggcagccaccacaccgcctccccctggaatctcagccccttctccaagacgtccatccaccacggctccccggggcccctctccgtctaccccccggcctcgtcctcctccttgtcggggggccacgccagcccgcacctcttcaccttcccgcccaccccgccgaaggacgtctccccggacccatcgctgtccaccccaggctcggccggctcggcccggcaggacgagaaagagtgcctcaagtaccaggtgcccctgcccgacagcatgaagctggagtcgtcccactcccgtggcagcatgaccgccctgggtggagcctcctcgtcgacccaccaccccatcaccacctacccgccctacgtgcccgagtacagctccggactcttcccccccagcagcctgctgggcggctcccccaccggcttcggatgcaagtccaggcccaaggcccggtccagcacaggcagggagtgtgtgaactgtggggcaacctcgaccccactgtggcggcgagatggcacgggacactacctgtgcaacgcctgcgggctctatcacaaaatgaacggacagaaccggcccctcattaagcccaagcgaaggctgtctgcagccaggagagcagggacgtcctgtgcgaactgtcagaccaccacaaccacactctggaggaggaatgccaatggggaccctgtctgcaatgcctgtgggctctactacaagcttcacaatattaacagacccctgactatgaagaaggaaggcatccagaccagaaaccgaaaaatgtctagcaaatccaaaaagtgcaaaaaagtgcatgactcactggaggacttccccaagaacagctcgtttaacccggccgccctctccagacacatgtcctccctgagccacatctcgcccttcagccactccagccacatgctgaccacgcccacgccgatgcacccgccatccagcctgtcctttggaccacaccacccctccagcatggtcaccgccatgggttagagccctgctcgatgctcacagggcccccagcgagagtccctgcagtccctttcgacttgcatttttgcaggagcagtatcatgaagcctaaacgcgatggatatatgtttttgaaggcagaaagcaaaattatgtttgccactttgcaaaggagctcactgtggtgtctgtgttccaaccactgaatctggaccccatctgtgaataagccattctgactcatatcccctatttaacagggtctctagtgctgtgaaaaaaaaaatgctgaacattgcatataacttatattgtaagaaatactgtacaatgactttattgcatctgggtagctgtaaggcatgaaggatgccaagaagtttaaggaatatgggagaaatagtgtggaaattaagaagaaactaggtctgatattcaaatggacaaactgccagttttgtttcctttcactggccacagttgtttgatgcattaaaagaaaataaaaaaaagaaaaaagagaaaagaaaaaaaaagaaaaaagttgtaggcgaatcatttgttcaaagctgttggcctctgcaaaggaaataccagttctgggcaatcagtgttaccgttcaccagttgccgttgagggtttcagagagcctttttctaggcctacatgctttgtgaacaagtccctgtaattgttgtttgtatgtataattcaaagcaccaaaataagaaaagatgtagatttatttcatcatattatacagaccgaactgttgtataaatttatttactgctagtcttaagaactgctttctttcgtttgtttgtttcaatattttccttctctctcaatttttggttgaataaactagattacattcagttggcctaaggtggttgtgctcggagggtttcttgtttcttttccattttgtttttggatgatatttattaaatagcttctaagagtccggcggcatctgtcttgtccctattcctgcagcctgtgctgagggtagcagtgtatgagctaccagcgtgcatgtcagcgaccctggcccgacaggccacgtcctgcaatcggcccggctgcctcttcgccctgtcgtgttctgtgttagtgatcactgcctttaatacagtctgttggaataatattataagcataataataaagtgaaaatattttaaaactacaa

SEQ ID NO: 321 - DNA, 3419 bp, Homo sapiens
ttggaggcggccggcgcaggggccgcgagaggcttcgtcgccgctgcagctccgggggctcccaggggagcgtgcgcggaacctccaggcccagcaggaccccggctgcggcgaggaggaaggagccagcctagcagcttctgcgcctgtggccgcgggtgtcctggaggcctctcggtgtgacgagtgggggacccgaaggctcgtgcgccacctccaggcctggacgctgccctccgtcttctgcccccaataggtgcgccggaccttcaggccctggggtgaattcagctgctcctacatcagcttccggaaccaccaaaaattcaaattgggattttccggagtaaacaagagcctagagccctttgctcaatgctggatttaatacgtatatatttttaagcgagttggttttttcccctttgatttttgatcttcgcgacagttcctcccacgcatattatcgttgttgccgtcgttttctctccccgcgtggctccttgacctgcgagggagagagaggacaccgaagccgggagctcgcagggaccatgtatcagagcttggccatggccgccaaccacgggccgccccccggtgcctacgaggcgggcggccccggcgccttcatgcacggcgcgggcgccgcgtcctcgccagtctacgtgcccacaccgcgggtgccctcctccgtgctgggcctgtcctacctccagggcggaggcgcgggctctgcgtccggaggcgcctcgggcggcagctccggtggggccgcgtctggtgcggggcccgggacccagcagggcagcccgggatggagccaggcgggagccgacggagccgcttacaccccgccgccggtgtcgccgcgcttctccttcccggggaccaccgggtccctggcggccgccgccgccgctgccgcggcccgggaagctgcggcctacagcagtggcggcggagcggcgggtgcgggcctggcgggccgcgagcagtacgggcgcgccggcttcgcgggctcctactccagcccctacccggcttacatggccgacgtgggcgcgtcctgggccgcagccgccgccgcctccgccggccccttcgacagcccggtcctgcacagcctgcccggccgggccaacccggccgcccgacaccccaatctcgatatgtttgacgacttctcagaaggcagagagtgtgtcaactgtggggctatgtccaccccgctctggaggcgagatgggacgggtcactatctgtgcaacgcctgcggcctctaccacaagatgaacggcatcaaccggccgctcatcaagcctcagcgccggctgtccgcctcccgccgagtgggcctctcctgtgccaactgccagaccaccaccaccacgctgtggcgccgcaatgcggagggcgagcctgtgtgcaatgcctgcggcctctacatgaagctccacggggtccccaggcctcttgcaatgcggaaagaggggatccaaaccagaaaacggaagcccaagaacctgaataaatctaagacaccagcagctccttcaggcagtgagagccttcctcccgccagcggtgcttccagcaactccagcaacgccaccaccagcagcagcgaggagatgcgtcccatcaagacggagcctggcctgtcatctcactacgggcacagcagctccgtgtcccagacgttctcagtcagtgcgatgtctggccatgggccctccatccaccctgtcctctcggccctgaagctctccccacaaggctatgcgtctcccgtcagccagtctccacagaccagctccaagcaggactcttggaacagcctggtcttggccgacagtcacggggacataatcactgcgtaatcttccctcttccctcctcaaattcctgcacggacctgggacttggaggatagcaaagaaggaggccctgggctcccaggggccggcctcctctgcctggtaatgactccagaacaacaactgggaagaaacttgaagtcgacaatctggttaggggaagcgggtgttggattttctcagatgcctttacacgctgatgggactggagggagcccacccttcagcacgagcacactgcatctctcctgtgagttggagacttctttcccaagatgtccttgtcccctgcgttccccactgtggcctagaccgtgggttttgcattgtgtttctagcaccgaggatctgagaacaagcggagggccgggccctgggacccctgctccagcccgaatgacggcatctgtttgccatgtacctggatgcgacgggcccctggggacaggcccttgccccatccatccgcttgaggcatggcaccgccctgcatccctaataccaaatctgactccaaaattgtggggtgtgacatacaagtgactgaacacttcctggggagctacaggggcacttaacccaccacagcacagcctcatcaaaatgcagctggcaacttctcccccaggtgccttccccctgctgccggcctttgctccttcacttccaacatctctcaaaataaaaatccctcttcccgctctgagcgattcagctctgcccgcagcttgtacatgtctctcccctggcaaaacaagagctgggtagtttagccaaacggcaccccctcgagttcactgcagacccttcgttcaccgtgtcacacatagaggggttctgagtaagaacaaaacgttctgctgctcaagccagtctggcaagcactcagcccagcctcgaggtccttctggggagagtgtaagtggacagagtcctggtcagggggcaggagtgtcccaagggctggcccacctgctgtctgtctgctcctcctagcccttggtcagatggcagccagagtccctcaggacctgcagcctcgccccggcagaagtcttttgtccaggaggcaaaaagccagagattctgcaacacgaattcgaagcaaacaaacacaacacaacagaattcctggaaagaagacgactgctaagacacggcaggggggcctggagggagcctccgactctgagctgctccgggatctgccgcgttctcctctgcacattgctgtttctgcccctgatgctggagctcaaggagactccttcctctttctcagcagagctgtagctgactgtggcattactacgcctccccacacgcccagacccctcactccaaaatcctactggctgtagcagagaatacctttgaaccaagattctgttttaatcatcatttacattgttttcttccaaaggccccctcgtataccctccctaacccacaaacctgttaacattgtcttaaggtgaaatggctggaaaatcagtatttaactaataaatttatctgtattcctcttaaaaaaaaaaa

SEQ ID NO: 322 - DNA, 2595 bp, Homo sapiens
ccaccgccaccgccgtgccctgccgccctccctgcccgctggtcaagaccacgcctgggaggatgtaccagagcctggcgctggccgcgagcccccgccaggccgcctacgccgactcgggctccttcctgcacgctccgggcgccggctctccgatgtttgtgccgccggcgcgcgtcccctcgatgctgtcctacctgtccgggtgtgagccgagcccgcagccccccgagctcgctgcgcgccccggctgggcgcagacagccaccgcggattcgtcggccttcggcccgggcagtccgcaccccccagccgcgcacccgcccggggccaccgccttccctttcgcgcacagcccctcggggcccggcagcggcggcagcgcggggggccgagacggcagtgcctaccagggcgcgctgttgcctcgagaacagttcgcggccccgcttgggcggccggtggggacctcgtactccgccacctacccggcctacgtgagccccgacgtggcccagtcctggactgccgggcccttcgatggcagcgtcctgcacggcctcccaggccgcaggcccaccttcgtgtccgacttcttggaggagttcccgggtgagggtcgtgagtgtgtcaactgcggggccctgtccacaccgctgtggcgccgagacggcaccggccactacctgtgcaatgcctgcggcctctaccacaagatgaatggcgtcaaccggccgctcgttcggcctcagaagcgcctgtcctcgtcccgccgcgccggcctctgctgcaccaactgccacacgaccaacaccacgctgtggcggcggaactcggagggggagcccgtgtgcaatgcctgcggcctctacatgaagctgcacggggtgccgcggcctctggctatgaagaaggaaagcatccagacacggaagcggaagccaaagaccatcgccaaggccaggggctcctcaggatccacaaggaatgcctcggcctccccatctgctgtcgccagcactgacagctcagcagccacttcgaaagccaagcccagcctggcgtccccagtgtgccctgggcccagcatggccccccaggcctctggccaggaggatgactctcttgcccccggccacttggagttcaagttcgagcctgaggactttgccttcccctccacggccccaagcccccaggctggcctcaggggggctctgcgccaagaggcctggtgtgcgctggccttggcctaggtccccaggccagcccatgtcaggggaacagcctggaacagaccacccactgagtcacctccgtgcctgctttgctccagcacagcagagaccagcaggccccccaacccagagactgggtctgctggagtctccacacagtggtggggaggccttctggacagacggcagtcgggccccagagcaagaaggctggtgagggaagggctcagcttcccaccccacgtacagcaagggactccccaggtgcggcccaaggctccggaccacactggccccctgcggcggaggccaacgcagggcaccaccaccaccaacttgaattccgtcatcaatgctcaccgtcaatatgtttacaagttgtagcagttgggggaaaacagtcaacctcccagtgtaaaaccaagattcccagtgaagcacctgaggccaagcaggggagaggaatgaggggagcagctggacatgggcctcctgaggcctcggggctgtccttcattgcccacatggatagacggagctgtggtgcagagaacttttcccgcaacaggtgcaggactgccagggatcggagtgcgggccgcgcacggtgccaggattccgccgaggggaagccgctcacattgcagtcatcacagacttacgcacttgtttggacagtttttccagaggggatgggaaagggccttgttctagctgaatctgtgtatcatgaccatttctgacaggcagaatgaattgtctggtagccctgtcctgacccatccaagcgctgttggggctggtggtgacgtggtcacatgtcctggcatatctggggccacgcagtttagtctcttgtcccaggagaattgttagtgacccctctttctcttgcaagccccctccacactgggttggatgataccttaatgagtgacgctggcgagaggcaccctacccgacgcagctgtgaatggccggtgatgtatgtcaggaggccacagggagcagaggagcggggcaggcagccacagggccctgcggggagcacatcctcgcctccgtccggctgctgcccttcaacaacaagccctgatttttccagcaatgccagaaacctggattttaagtcttccaatttgattcaaaaatatttttaacattgtgagccagctagacccccagtgcaccaccccatattgaaaaacagttgtctggcatcagcttcaggagcgggtccggtcattctgaaactgtccctccagaggttcttccagccccacttctatgcgatgtcatcttttctaaaagagacaaatgaagccacagggaaagtgaaataaagccttgaacctca

SEQ ID NO: 323 - DNA, 3494 bp, Homo sapiens
ggcacccttcggcgagcgctgtttgtttagggctcggtgagtccaatcaggagcccaggctgcagttttccggcagagcagtaagaggcgcctcctctctcctttttattcaccagcagcgcggcgcagaccccggactcgcgctcgcccgctggcgccctcggcttctctccgcgcctgggagcaccctccgccgcggccgttctccatgcgcagcgcccgcccgaggagctagacgtcagcttggagcggcgccggaccgtggatggccttgactgacggcggctggtgcttgccgaagcgcttcggggccgcgggtgcggacgccagcgactccagagcctttccagcgcgggagccctccacgccgccttcccccatctcttcctcgtcctcctcctgctcccggggcggagagcggggccccggcggcgccagcaactgcgggacgcctcagctcgacacggaggcggcggccggacccccggcccgctcgctgctgctcagttcctacgcttcgcatcccttcggggctccccacggaccttcggcgcctggggtcgcgggccccgggggcaacctgtcgagctgggaggacttgctgctgttcactgacctcgaccaagccgcgaccgccagcaagctgctgtggtccagccgcggcgccaagctgagccccttcgcacccgagcagccggaggagatgtaccagaccctcgccgctctctccagccagggtccggccgcctacgacggcgcgcccggcggcttcgtgcactctgcggccgcggcggcagcagccgcggcggcggccagctccccggtctacgtgcccaccacccgcgtgggttccatgctgcccggcctaccgtaccacctgcaggggtcgggcagtgggccagccaaccacgcgggcggcgcgggcgcgcaccccggctggcctcaggcctcggccgacagccctccatacggcagcggaggcggcgcggctggcggcggggccgcggggcctggcggcgctggctcagccgcggcgcacgtctcggcgcgcttcccctactctcccagcccgcccatggccaacggcgccgcgcgggagccgggaggctacgcggcggcgggcagtgggggcgcgggaggcgtgagcggcggcggcagtagcctggcggccatgggcggccgcgagccccagtacagctcgctgtcggccgcgcggccgctgaacgggacgtaccaccaccaccaccaccaccaccaccaccatccgagcccctactcgccctacgtgggggcgccactgacgcctgcctggcccgccggacccttcgagaccccggtgctgcacagcctgcagagccgcgccggagccccgctcccggtgccccggggtcccagtgcagacctgctggaggacctgtccgagagccgcgagtgcgtgaactgcggctccatccagacgccgctgtggcggcgggacggcaccggccactacctgtgcaacgcctgcgggctctacagcaagatgaacggcctcagccggcccctcatcaagccgcagaagcgcgtgccttcatcacggcggcttggattgtcctgtgccaactgtcacaccacaactaccaccttatggcgcagaaacgccgagggtgaacccgtgtgcaatgcttgtggactctacatgaaactccatggggtgcccagaccacttgctatgaaaaaagagggaattcaaaccaggaaacgaaaacctaagaacataaataaatcaaagacttgctctggtaatagcaataattccattcccatgactccaacttccacctcttctaactcagatgattgcagcaaaaatacttcccccacaacacaacctacagcctcaggggcgggtgccccggtgatgactggtgcgggagagagcaccaatcccgagaacagcgagctcaagtattcgggtcaagatgggctctacataggcgtcagtctcgcctcgccggccgaagtcacgtcctccgtgcgaccggattcctggtgcgccctggccctggcctgagcccacgccgccaggaggcagggagggctccgccgcgggcctcactccactcgtgtctgcttttgtgcagcggtccagacagtggcgactgcgctgacagaacgtgattctcgtgcctttattttgaaagagatgtttttcccaagaggcttgctgaaagagtgagagaagatggaagggaagggccagtgcaactgggcgcttgggccactccagccagcccgcctccggggcggaccctgctccacttccagaagccaggactaggacctgggccttgcctgctatggaatattgagagagattttttaaaaaagattttgcattttgtccaaaatcatgtgcttcttctgatcaattttggttgttccagaatttcttcataccttttccacatccagatttcatgtgcgttcatggagaagatcacttgaggccatttggtacacatctctggaggctgagtcggttcatgaggtctcttatcaaaaatattactcagtttgcaagactgcattgtaactttaacatacactgtgactgacgtttctcaaagttcatattgtgtggctgatctgaagtcagtcggaatttgtaaacagggtagcaaacaagatatttttcttccatgtatacaataatttttttaaaaagtgcaatttgcgttgcagcaatcagtgttaaatcatttgcataagatttaacagcattttttataatgaatgtaaacattttaacttaatggtacttaaaataatttaaaagaaaaatgttaacttagacattcttatgcttcttttacaactacatcccattttatatttccaattgttaaagaaaaatatttcaagaacaaatcttctctcaggaaaattgcctttctctatttgttaagaatttttatacaagaacaccaatataccccctttattttactgtggaatatgtgctggaaaaattgcaacaacactttactacctaacggatagcatttgtaaatactctaggtatctgtaaacactctgatgaagtctgtatagtgtgactaacccacaggcaggttggtttacattaatttttttttttgaatgggatgtcctatggaaacctatttcaccagagttttaaaaataaaaagggtattgttttgtcttctgtacagtgagttccttcccttttcaaagctttctttttatgctgtatgtgactatagatattcatataaaacaagtgcacgtgaagtttgcaaaatgctttaaggccttcctttcaaagcatagtccttttggagccgttttgtaccttttataccttggcttatttgaagttgacacatggggttagttactactctccatgtgcattggggacagtttttataagtgggaaggactcagtattattatatttgagatgataagcattttgtttgggaacaatg

SEQ ID NO: 324 - DNA, 1348 bp, Homo sapiens
attcgcactagtccagctgctctgaggtgtatatcatcgcgtactgcctgtctctagtcgagaagctggagtgtggtgcgaatgagatgggggtggtgggaagttgaggggatcattgtccacacacttattgcctcccagagttttccgtagtgaaatctgtgctggttaatacctttcttcccatttctttgttttccctaaacctcttcccattccatatcctggacataccatccttctgcctcctgtccctccccatcttctcctctccatggctactcttttttcctgctcttgtctcccaaccccccatttctggcatggttccatgggcctccattggctctcaactctctttctgctctcctcccatcatgcttcttgctcctcacagcagaggaagtgtacagccatagatgaggagaagctgaggcatcagcagagcccagcaggcagcgacaggaggagagggactcaggcgtgacagcggatgacggtttccctggacagttctgcagggggcccaggggctcttctgggacctaaaccgaagctaaagggaagcctggggactggagctgaggagggggcaccggtgacagcaggggtcacagctcctggggggaaaagccgacggcgccgcacagcatttaccagcgagcagcttttggaattggagaaggaatttcattgtaagaaatacctgagcttgacagagcgctctcagatcgcccacgccctcaagctcagtgaggtgcaggtcaagatctggtttcagaatcgacgggccaagtggaagcgcatcaaagctggcaatgtgagcagccgttctggggagcccgtaagaaaccccaagattgttgtccccatacctgtgcatgtcaacaggtttgctgtgcggagccagcaccaacaaatggagcagggggcccggccctgaatgggcacccaagaacttaggaaggcgagggatctgtacctgagcctgctctgagactgtcagggttctgtggaccagaggggctgcaactgtgattctgccttgagaggggctagttgggaattaacctagccctgggtgtgctcttcccagactcatcaagaacctgagatgtgaagcacttgggcctgagcctgttccagagacctcaggactagggcctcaaggttaaagggggctggggttctattgctgagggagctgttgggactgaggtggactcctggggagggggtgggttctaagatgcctaagggcctgaaggttctgtggcaaatgccctggaaccagcttctgatgggtggagggaacaggcgatacctagccaagtagatcgcagctcct

SEQ ID NO: 325 - DNA, 1335 bp, Homo sapiens
gacttttcgcctctcgctggcctctaccgagcgcgtctatgagcgcagcgttcccgccgtcgctgatgatgatgcagcgcccgctggggagtagcaccgccttcagcatagactcgctgatcggcagcccgccgcagcccagccccggccatttcgtctacaccggctaccccatgttcatgccctaccggccggtagtgctgccgccgccgccgccgccgccgcccgcgctgccccaggccgcgctgcagccagcgctgccgcccgcacaccctcaccaccagatccccagcctgcccacaggcttctgctccagcctggcgcagggcatggcgctcacctctacgctcatggccacgctccccggcggcttctccgcgtcgccccagcaccaggaggcggcagcggcccgcaagttcgcgccgcagccgctgcccggcggcggtaacttcgacaaggcggaggcgctgcaggctgacgcggaggacggcaaaggcttcctggccaaagagggctcgctgctcgccttctccgcggccgagacggtgcaggcttcgctcgtcggggctgtccgagggcaagggaaagacgagtcaaaggtggaagacgacccgaagggcaaggaggagagcttctcgctggagagcgatgtggactacagctcggatgacaatctgactggccaggcagctcacaaggaggaagacccgggccacgcgctggaggagaccccgccgagcagcggcgccgcgggcagcaccacgtctacgggcaagaaccggcggcggcggactgccttcaccagcgagcagctgctggagctagagaaggagttccactgcaaaaagtacctctccttgaccgagcgctcgcagatcgcccacgccctcaaactcagcgaggtgcaggtgaaaatctggttccagaaccgacgggccaagtggaaacgggtgaaggcaggcaatgccaattccaagacaggggagccctcccggaaccctaagatcgtcgtccccatccctgtccacgtcagcaggttcgctatcagaagtcagcatcagcagctagaacaggcccggccctgagggtccagaagggccagggcctggcacccacctggagaagcccccgcacccgagggaacccatggtggactccactgtgtttgaagcaacaaagtcacagcccagctgtggccatcccaagcaaattgagaatatattcactaaatgggcttaaaagactgcttttgaaggggcttacagccacaccagaagacacgctaaatatttattatactatcctactttgtacataaatatctctatagactgg

SEQ ID NO: 326 - DNA, 2802 bp, Homo sapiens
gagggtgcgcccaccggtcccgccgggcgcccgcgggacgcgccgccagggccctctccgccgggggctcggcgctcgcccacctcttccaaatttaaccattacctaaatccgaagggaaatgagcaaacctctcggattgggtgtcaaggtctcctccgggctggggctgagcaagccctcggagtgaccgtgggtgacagcggctccagggactcttggggcgcagtggggaaagtgccggaccaccatgccgcgctcatttctcgtcaaaagcaagaaggctcacagctaccaccagccgcgctccccaggaccagactattccctccgtttagagaatgtaccggcgcctagccgagcagacagcacttcaaatgcaggcggggcgaaggcggagccccgggaccgtttgtcccccgaatcgcagctgaccgaagccccagacagagcctccgcatccccagacagctgcgaaggcagcgtctgcgaacggagctcggagtttgaggacttctggaggcccccgtcaccctccgcgtctccagcctcggagaagtcaatgtgcccatcgctggacgaagcccagcccttccccctgcctttcaaaccgtactcatggagcggcctggcgggttctgacctgcggcacctggtgcagagctaccgaccgtgtggggccctggagcgtggcgctggcctgggcctcttctgcgaacccgccccggagcctggccacccggccgcgctgtacggcccgaagcgggctgccggcggcgcgggggccggggcgccagggagctgcagcgcaggggccggtgccaccgctggccctggcctagggctctacggcgacttcgggtctgcggcagccgggctgtatgagaggcccacggcagcggcgggcttgctgtaccccgagcgtggccacgggctgcacgcagacaagggcgctggcgtcaaggtggagtcggagctgctgtgcacccgcctgctgctgggcggcggctcctacaagtgcatcaagtgcagcaaggtgttctccacgccgcacgggctcgaggtgcacgtgcgcaggtcccacagcggtaccagaccctttgcctgcgagatgtgcggcaagaccttcgggcacgcggtgagcctggagcagcacaaagccgtgcactcgcaggaacggagctttgactgtaagatctgtgggaagagcttcaagaggtcatccacactgtccacacacctgcttatccactcagacactcggccctacccctgtcagtactgtggcaagaggttccaccagaagtcagacatgaagaaacacactttcatccacactggtgagaagcctcacaagtgccaggtgtgcggcaaggcattcagccagagctccaacctcatcacccacagccgcaaacacacaggcttcaagcccttcggctgcgacctctgtgggaagggtttccagaggaaggtggacctccgaaggcaccgggagacgcagcatgggctcaaatgagcaccctggctggctgcaagcagcagctacacaacactacagagggcagcctccctgcttgccaccactctgctccctgcttgcctccactcccttctgactttccagaccccaggtccagtctgcagatcctaccaggttgctcctccttcgccttacctcctggagctgccagaagaaatgaggtaccttttcaaagtgcagccgagagtgagaaccaagtgactctctaggcttcggacacaaataggctcctctacacctgaagacaaaggcaaagtcaaatggggaccagaataaatcttagaccccacagtccttcccatttccagccctaatctacagacaggaatgcccttcaggtttcttccctcccccctcttgacctaccccagatatttgtgtggaagaggaggaatcaccatttacaaggtggacaaatgctaatatttttatctagaaagaagagtgagtgttaacttttatttttttccttctggggggtctgttgactcctttcttttgggtgctgcctataaatcttggaggaatcatttctcctcctcaaaaactgattcagaaactgacttggggaaggaatttaatactttgaagtcatgagatgcaccatcgaggctacccccaagaagaagcagaagagaagttggtaatgagaggggattagaggtcctcccttcagtagggctgtgaaaacctcatcactggaggtaaaagcacaagcaatgcctgtggacaagatgtcattcattcactcagcaaatgttcatggatcaccggctaccaaggtaccaggcaccatgctaggtattggggaagagagactgaagtcacaacccctgactgctcctcaaaagctaacggttgcacctccaagtggctgggtctgttcttactcttggagggaattctgagaagacagcacagaattgtaaaccttcccttttgacccttttggattttatcaggtgtaaacaaaaagctgaacagttacttcaaagatatgtgtgtatattcagttttttattgttaagctgatattttaaagatttctgagctagcaggcatgtgggaaggaaggctctgtcttcaactctttgaccctccatgtgtaccatagaggggggaaaggtggtattttcactttgatgaggttggtaaatgtttttagatcttctggtaagcattatgtttgttaatacatatttattagagtgatgttttaagttaataaagtattaagagtattaaaaaaaaaaaaaaaa

SEQ ID NO: 327 - DNA, 1801 bp, Homo sapiens
aaaaaggagaagtatctatttgtgcaaagagtcacacagttgacagagtggaggccagtcccgagagaggctttgcagttcccacctcgggaagctccggcagaacccaggcgagggacagctccggacaggtgtggggtgcacactgaaaatgccacgctccttcctggtgaagagcaagaaggctcacacctaccaccagccccgtgtgcaggaagatgaaccgctctggcctcctgcccttaccccggtgcccagagaccaggctccaagcaacagccctgtccttagcactctattcccaaaccagtgcctggactggaccaacctcaaacgagagccggagctggagcaggaccagaacttggccaggatggccccggcaccagagggccccattgtgctgtcccgaccccaggatggggactctccactgtccgactcacccccattctacaagcctagcttctcctgggacaccttggccacaacctatggccacagctaccggcaggccccctccaccatgcagtcagccttcctggagcactccgtcagcctgtacggcagtcctcttgtgcccagcactgagcccgccttggacttcagcctccgctactccccaggcatggatgcgtaccactgtgtgaagtgcaacaaggtcttctccacccctcacgggctcgaagtgcatgtgcgacgctcccatagtgggacccggcccttcgcctgtgacatctgcggcaaaaccttcggccacgctgtgagcctggagcagcacacgcacgtccactcccaggagcgcagcttcgagtgccgcatgtgcggcaaggccttcaagcgctcgtccacgctgtccacccacctgctcatccactcagacacgcggccctacccctgccagttctgcggcaagcgtttccaccagaagtccgacatgaagaagcacacctacatccacacaggtgagaagccgcacaagtgccaggtgtgcggaaaggccttcagccagagctccaacctcatcacccacagccgcaagcacacaggcttcaagcccttcagctgtgagctgtgcaccaaaggcttccagcgcaaggtggacctgcggcggcaccgcgagagccagcacaatctcaagtgaggctgcgccggctcccagctcctggccagcctgccctgcggtcctgtcacctggaggccagcctcacatgcccaaatctccagtctcctggaggtgggactggacaggagtctaccagcttgttttgagactcatgaaattgctgtgtgaccttgggcaagtcacttaccctgtctggatcaacatttctcctgctgccaagtgtgggagcctggctgggtctttctcagcagaagttgtttccaggtgtgctcaagtgccttcctctagcagagcacagaaagctagaatacccccagggagacagggatgccaagagtagaccagagctgggacccacagacagaacctccacctgcctgctgcccactgagctgggacctggtcaccttggattttagccggcctctttctggctataacaggcagagtcggagctgcctcccaccccagtcagaagcctggcaccccctctgcttcggccagatgtgctggctgactccgacttccgaccagcactcagctggcctctggggattctagctccacaaccaggccgtgaggctggagaaactggcagttattgctgtcaaaagcctgttctctcaactgctgtcaataaaattaaagatacagatttgctgccaaaaaaaaaaa

SEQ ID NO: 328 - DNA, 2237 bp, Homo sapiens
tcaaatgcaatgagtgtaaagaatgttggaaggcctttgttcattgctcacaacttaaacatctaagaattcataatggtgaaaaacgctatgaatgtaacgaatgtgggaaggcctttaattatggctcagaacttactctacatcaaagaattcacactggtgagaaaccttatgaatgtaaagaatgtgggaaggcctttagacagcgatcacagcttactcaacatcagagacttcatactggtgaaaaaccctatgaatgtaagcaatgtgggaaggcttttattcgtggctttcaacttactgaacacctgcgactccatactggagagaaaccttatgaatgtaaagaatgtggaaagacttttaggcatcgctcacatcttactatacatcagagaattcatactggtgagaaaccctatgaatgtcgggaatgtgggaaggcctttagctatcactcaagcttctcacaccatcagaaaattcattctggcaagaaaccttatgaatgtcatgaatgtgggaaggctttttgtgatggcttacaactaaccctacatcagaggattcatactggtgagaaaccctatgagtgtaaggaatgtgggaagacttttagacagtgttcacacctcaaaagacatcagagaattcatactggtgagaaacctcatgaatgcatgatatgtggtaaggcctttagacttcattcacaccttattcaacatcaaagaattcatactggtgagaaaccctatgaatgtaaggaatgtgggaaggcctttagctatcattcaagcttctcacaccatcagagaattcattctggaaagaaaccttatcaatgcgggaaggcgtttaatcatagattacaacttaacttacatcagactcttcatactggcgagaagccagtcaggtttcctctcctccctccccatcctagtctagcatcatgaaatttgttgatggaaatatacattgtctttgttttatttaaggaaaaagttggtaagccaccagtttcattagtatttatttatttaaataatccttgaaaatcaaatgtttttaagtgagaaagtggataactaaagtgtaaattttggtctcattttaatgctgtttctgagttattgtattaaccattattgagaataaatttttttattgagaataaattttctaaaattacatgtttcactgaaaccagtgaaatatttcactgaaacagtgaaataaaatgaaaacaatttcctcccttccctcaaatctctgagataaccagtatgtgtatttcttcttcctttatgctcaaacaacctgtacacagaaagcattttttgcatgtgtttggaggagcttttacccccatacagacatttgacagcgtcttgtccttttcataataatcatgaatacttttccaggtcagtacgtaaagatgtaacccattctttgtaaggttcagaatatttctagaatggaatgtatgtccgtattttgggccattacctactacagacattgaagttgtttctaatgttcacctagaactctaattttaccttcttttgtttctattgtgcagattcccaacagtgggattaaagagtatctggcgtatatattttgacattacatttattttttaaaatcttctaaattttttgtttaataaaagcacacattataaaaattcaaaaattaccaaaaatgtgaaaattaattctcccctaacatccagttctgtagccactcactttccacagatgcaacaactgctatcagtttccttttattctaacgggaatatttcatgtaaatttcataaattctttggacaaaagtaggttattcataatatgtgatttattacacattctcattattagtccacatttggcctacttcattttttttttttttgagacacacccaggctggagtccagtggtgcaatcttggctcactgcaacctccgccacccaggttaaaaattctcctgcctcagcctcctgagtggctgggactacaggcatgcgcagccactatgcccggccaataagctatatttattcttatttgatgtggatgaaaattatcaaaattggccgggcttggtggctcatgcctgtaatcccagcactttgggaggccgaggcgggcggatcacgaggtcaggagatcgagaccatcctggctaacatggtgaaaccccgtctctacta

SEQ ID NO: 329 - DNA, 2674 bp, Homo sapiens
cgggttcctgagaattgtcaatcaggcgcgaggcagagaggagggtgtgacgttccaggagctagtggcctcttcaccctggtgacctctgttccgtattctgtcactgagagacgccctgggacatctgtggtggcttttgtcgcgctgggacctaccctgactacgggagttgggaggacccgggacaccgcacagccgggaaatggactcagtggcctttgaggatgtggctgtgaacttcacccatgaggagtgggctttgctgggtccatcacagaagaatctctacagagatgtgatgcgagaaaccattaggaacctgaactgtataggaatgaaatgggaaaaccagaacattgatgatcagcaccaaaatctcaggagaaatccaaggtgtgatgtggtagagagatttggtaaaagtaaagatggtagtcagtgtggagaaaccttaagccagattcgaaatagtattgtaaacaagaacactcccgccagagtagatgcatgtggaagcagtgtgaatggagaagtcataatgggtcattcatccctgaattgctacatcagagttgatactggacacaaacaccgggagtgtcatgaatatgcagagaagtcatatacacataagcagtgtgggaaaggcttaagttatcgccactcctttcaaacatgtgaaaggcctcacactggaaagaaaccctatgattgtaaggaatgtggaaaaaccttcagttctcctggaaaccttcgaagacatatggtagtaaaaggtggagatggaccttataaatgtgaattgtgtgggaaagcctttttttggcccagtttattacgtatgcatgaaagaactcacactggagagaaaccatatgaatgtaagcagtgttctaaagccttccctgtttacagttcctatctaagacatgaaaaaatacacactggggagaaaccgtatgaatgtaagcagtgttctaaagccttccctgattacagttcatatctaagacatgaaagaactcacactggagagaaaccctacaaatgtaaacaatgtgggaaagccttcagtgtttccggttcccttcgagtacatgaaagaattcacactggagagaaaccctatacatgtaaacagtgtgggaaagcgttttgtcatcttggaagctttcaaagacacatgataatgcacagtggagatggacctcataaatgtaagatatgtgggaaaggctttgattttcctggttcagcacgaattcatgaaggaactcacactctagagaaaccctatgaatgtaagcaatgtgggaaattgttatctcatcgctcaagctttcgaagacacatgatggcacacactggagatggccctcataaatgcacagtatgtgggaaagcctttgattctcctagtgtatttcaaagacatgaaaggactcacactggagagaaaccctatgaatgcaagcaatgtgggaaagccttccgtacttccagttcccttcgaaaacatgaaacaacacacactggagagcaaccctataaatgtaaatgtggaaaagcttttagtgatttattttcctttcaaagtcatgaaacaacacacagtgaagaggagccttatgaatgtaaggagtgtgggaaagcatttagttcttttaaatacttttgtcgccatgaaaggactcacagtgaagaaaaatcttatgagtgtcaaatttgtggcaaagccttcagtcgtttcagttacttaaaaactcatgaaaggactcacacggcagagaagccatatgaatgtaagcaatgcaggaaagcattcttttggccctctttccttctaagacatgaaaggactcacactggagaaagaccctatgaatgtaaacactgtggtaaagccttcagtcgttccagtttctgtcgagaacatgaaagaactcacactggagagaagccctatgaatgtaaggaatgtgggaaagccttcagttctctcagttcctttaatagacataaaaggacacactggaaggatattctataagtgtatggaatgtgggaaagcattcattggttttatcacattcagatacttgaaagaaataaatcctgtgaatgtaaacgtggtaaagccttaagaagtttccaggctgggcgcagcggctcacacctgtaatcccagcactttgagaggccgaggagggcagatcacgaggccaggagatcgagaccagcctggctaacatgggaaaccctgtctctactaaaaatacggaaaaaaaaaaaaatagccaggcatagttgctcacacctgtagtcctagctactcaggaggctgaggcaggagaatcccttgaacccgggaggtggaggttgcagtgagccgagattgcactactgcactccagcttgggtgctagagcgagactccatctcaaaaaaaaaaaaaaaagtttccatttctttcaaatagagttgctgcctgctatatgcaagaagattggttccagtacaccctgagtatacctaaatccacagatgccagctcttttataaaatggaatattcgcatgtacctacccacattctcctgtatactctataaatgtctagattaattaaaatatctcatgcattgtaaaaaaaaaaaaaaaaaaaaaaaaaa

SEQ ID NO: 330 - DNA, 3618 bp, Homo sapiens
cccagactccagccctggaccgcgcatcccgagcccagcgcccagacagagtgtccccacaccctcctctgagacgccatgttcaactcgatgaccccaccaccaatcagtagctatggcgagccctgctgtctccggcccctccccagtcagggggcccccagtgtggggacagaaggactgtctggcccgcccttctgccaccaagctaacctcatgtccggcccccacagttatgggccagccagagagaccaacagctgcaccgagggcccactcttttcttctccccggagtgcagtcaagttgaccaagaagcgggcactgtccatctcacctctgtcggatgccagcctggacctgcagacggttatccgcacctcacccagctccctcgtagctttcatcaactcgcgatgcacatctccaggaggctcctacggtcatctctccattggcaccatgagcccatctctgggattcccagcccagatgaatcaccaaaaagggccctcgccttcctttggggtccagccttgtggtccccatgactctgcccggggtgggatgatcccacatcctcagtcccggggacccttcccaacttgccagctgaagtctgagctggacatgctggttggcaagtgccgggaggaacccttggaaggtgatatgtccagccccaactccacaggcatacaggatcccctgttggggatgctggatgggcgggaggacctcgagagagaggagaagcgtgagcctgaatctgtgtatgaaactgactgccgttgggatggctgcagccaggaatttgactcccaagagcagctggtgcaccacatcaacagcgagcacatccacggggagcggaaggagttcgtgtgccactgggggggctgctccagggagctgaggcccttcaaagcccagtacatgctggtggttcacatgcgcagacacactggcgagaagccacacaagtgcacgtttgaagggtgccggaagtcatactcacgcctcgaaaacctgaagacgcacctgcggtcacacacgggtgagaagccatacatgtgtgagcacgagggctgcagtaaagccttcagcaatgccagtgaccgagccaagcaccagaatcggacccattccaatgagaagccgtatgtatgtaagctccctggctgcaccaaacgctatacagatcctagctcgctgcgaaaacatgtcaagacagtgcatggtcctgacgcccatgtgaccaaacggcaccgtggggatggccccctgcctcgggcaccatccatttctacagtggagcccaagagggagcgggaaggaggtcccatcagggaggaaagcagactgactgtgccagagggtgccatgaagccacagccaagccctggggcccagtcatcctgcagcagtgaccactccccggcagggagtgcagccaatacagacagtggtgtggaaatgactggcaatgcagggggcagcactgaagacctctccagcttggacgagggaccttgcattgctggcactggtctgtccactcttcgccgccttgagaacctcaggctggaccagctacatcaactccggccaatagggacccggggtctcaaactgcccagcttgtcccacaccggtaccactgtgtcccgccgcgtgggccccccagtctctcttgaacgccgcagcagcagctccagcagcatcagctctgcctatactgtcagccgccgctcctccctggcctctcctttcccccctggctccccaccagagaatggagcatcctccctgcctggccttatgcctgcccagcactacctgcttcgggcaagatatgcttcagccagagggggtggtacttcgcccactgcagcatccagcctggatcggataggtggtcttcccatgcctccttggagaagccgagccgagtatccaggatacaaccccaatgcaggggtcacccggagggccagtgacccagcccaggctgctgaccgtcctgctccagctagagtccagaggttcaagagcctgggctgtgtccataccccacccactgtggcagggggaggacagaactttgatccttacctcccaacctctgtctactcaccacagccccccagcatcactgagaatgctgccatggatgctagagggctacaggaagagccagaagttgggacctccatggtgggcagtggtctgaacccctatatggacttcccacctactgatactctgggatatgggggacctgaaggggcagcagctgagccttatggagcgaggggtccaggctctctgcctcttgggcctggtccacccaccaactatggccccaacccctgtccccagcaggcctcatatcctgaccccacccaagaaacatggggtgagttcccttcccactctgggctgtacccaggccccaaggctctaggtggaacctacagccagtgtcctcgacttgaacattatggacaagtgcaagtcaagccagaacaggggtgcccagtggggtctgactccacaggactggcaccctgcctcaatgcccaccccagtgaggggcccccacatccacagcctctcttttcccattacccccagccctctcctccccaatatctccagtcaggcccctatacccagccaccccctgattatcttccttcagaacccaggccttgcctggactttgattcccccacccattccacagggcagctcaaggctcagcttgtgtgtaattatgttcaatctcaacaggagctactgtgggagggtgggggcagggaagatgcccccgcccaggaaccttcctaccagagtcccaagtttctggggggttcccaggttagcccaagccgtgctaaagctccagtgaacacatatggacctggctttggacccaacttgcccaatcacaagtcaggttcctatcccaccccttcaccatgccatgaaaattttgtagtgggggcaaatagggcttcacatagggcagcagcaccacctcgacttctgcccccattgcccacttgctatgggcctctcaaagtgggaggcacaaaccccagctgtggtcatcctgaggtgggcaggctaggagggggtcctgccttgtaccctcctcccgaaggacaggtatgtaaccccctggactctcttgatcttgacaacactcagctggactttgtggctattctggatgagccccaggggctgagtcctcctccttcccatgatcagcggggcagctctggacataccccacctccctctgggccccccaacatggctgtgggcaacatgagtgtcttactgagatccctacctggggaaacagaattcctcaactctagtgcctaaagagtagggaatctcatccatcacagatcgcatttcctaaggggtttctatccttccagaaaaattgggggagctgcagtcccatgcacaagatgccccagggatgggaggtatgggctgggggctatgtatagtctgtatacgttttgaggagaaatttgataatgacactgtttcctgataataaaggaactgcatcagaaaaaaaaaaaaaaaaaa

SEQ ID NO: 331 - DNA, 6780 bp, Homo sapiens
gattgccacccaggacgatgagcggctgagatggagacgtctgcctcagccactgcctccgagaagcaagaagccaaaagtgggatcctggaggccgctggcttccccgacccgggtaaaaaggcctctcctttggtggtggctgcagcggcagcagcagcggtagctgcccaaggagtgccgcagcatctcttgccaccattccatgcgcccctaccgattgacatgcgacaccaggaaggaaggtaccattacgagcctcattctgtccacggtgtgcacgggccccctgccctcagcggcagccctgtcatctctgacatctccttgatccggctttccccgcacccggctggccctggggagtcccccttcaacgccccccacccgtacgtgaacccccacatggagcactacctccgttctgtgcacagcagccccacgctctccatgatctctgcagccaggggcctcagccccgctgatgtggcccaggagcaccttaaggagaggggactgtttggccttcctgctccaggcaccaccccctcagactattaccaccagatgaccctcgtggcaggccaccccgcgccctacggggacctgctgatgcagagcgggggcgctgccagcgcaccccatctccacgactacctcaaccccgtggacgtgtcccgtttctccagcccgcgggtgacgccccgcctgagccgcaagcgggcgctgtccatctccccactctcagacgccagcctggacctgcagcggatgatccgcacctcacccaactcgctagtggcctacatcaacaactcccgaagcagctcggcggccagcggttcctacgggcatctgtcagcgggtgccctcagcccagccttcaccttcccccaccccatcaaccccgtggcctaccagcagattctgagccagcagaggggtctggggtcagcctttggacacacaccacccctgatccagccctcacccaccttcctggcccagcagcccatggccctcacctccatcaatgccacgcccacccagctcagcagcagcagcaactgtctgagtgacaccaaccagaacaagcagagcagtgagtcggccgtcagcagcaccgtcaaccctgtcgccattcacaagcgcagcaaggtcaagaccgagcctgagggcctgcggccggcctcccctctggcgctgacgcagggccaggtgtctggacacggctcatgtgggtgtgcccttcccctctcccaggagcagctggctgacctcaaggaagatctggacagggatgactgtaagcaggaggctgaggtggtcatctatgagaccaactgccactgggaagactgcaccaaggagtacgacacccaggagcagctggtgcatcacatcaacaacgagcacatccacggggagaagaaggagtttgtgtgccgctggcaggcctgcacgcgggagcagaagcccttcaaggcgcagtacatgctggtggtgcacatgcggcgacacacgggcgagaagccccacaagtgcacgttcgagggctgctcgaaggcctactcccgcctggagaacctgaagacacacctgcggtcccacaccggggagaagccatatgtgtgtgagcacgagggctgcaacaaagccttctccaacgcctcggaccgcgccaagcaccagaatcgcacccactccaacgagaaaccctacatctgcaagatcccaggctgcaccaagagatacacagaccccagctctctccggaagcatgtgaaaacggtccacggcccagatgcccacgtcaccaagaagcagcgcaatgacgtgcacctccgcacaccgctgctcaaagagaatggggacagtgaggccggcacggagcctggcggcccagagagcaccgaggccagcagcaccagccaggccgtggaggactgcctgcacgtcagagccatcaagaccgagagctccgggctgtgtcagtccagccccggggcccagtcgtcctgcagcagcgagccctctcctctgggcagtgcccccaacaatgacagtggcgtggagatgccggggacggggcccgggagcctgggagacctgacggcactggatgacacacccccaggggccgacacctcagccctggctgccccctccgctggtggcctccagctgcgcaaacacatgaccaccatgcaccggttcgagcagctcaagaaggagaagctcaagtcactcaaggattcctgctcatgggccgggccgactccacacacgcggaacaccaagctgcctcccctcccgggaagtggctccatcctggaaaacttcagtggcagtgggggcggcgggcccgcggggctgctgccgaacccgcggctgtcggagctgtccgcgagcgaggtgaccatgctgagccagctgcaggagcgccgcgacagctccaccagcacggtcagctcggcctacaccgtgagccgccgctcctccggcatctccccctacttctccagccgccgctccagcgaggcctcgcccctgggcgccggccgcccgcacaacgcgagctccgctgactcctacgaccccatctccacggacgcgtcgcggcgctcgagcgaggccagccagtgcagcggcggctccgggctgctcaacctcacgccggcgcagcagtacagcctgcgggccaagtacgcggcagccactggcggccccccgcccactccgctgccgggcctggagcgcatgagcctgcggaccaggctggcgctgctggacgcgcccgagcgcacgctgcccgccggctgcccacgcccactggggccgcggcgtggcagcgacgggccgacctatggccacggccacgcgggggctgcgcccgccttcccccacgaggctccaggcggcggagccaggcgggccagcgaccctgtgcggcggcccgatgccctgtccctgccgcgggtgcagcgcttccacagcacccacaacgtgaaccccggcccgctgccgccctgtgccgacaggcgaggcctccgcctgcagagccacccgagcaccgacggcggcctggcccgcggcgcctactcgccccggccgcctagcatcagcgagaacgtggcgatggaggccgtggcggcaggagtggacggcgcggggcccgaggccgacctggggctgccggaggacgacctggtgcttccagacgacgtggtgcagtacatcaaggcgcacgccagtggcgctctggacgagggcaccgggcaggtgtatcccacggaaagcactggcttctctgacaaccccagactacccagcccggggctgcacggccagcgcaggatggtggctgcggactccaacgtgggcccctccgcccctatgctgggaggatgccagttaggctttggggcgccctccagcctgaacaaaaataacatgcctgtgcagtggaatgaggtgagctccggcaccgtagacgccctggccagccaggtgaagcctccaccctttcctcagggcaacctggcggtggtgcagcagaagcctgcctttggccagtacccgggctacagtccgcaaggcctacaggctagccctgggggcctggacagcacgcagccacacctgcagccccgcagcggagccccctcccagggcatccccagggtaaactacatgcagcagctgcgacagccagtggcaggcagccagtgtcctggcatgactaccactatgagcccccatgcctgctatggccaagtccacccccagctgagccccagcaccatcagtggggccctcaaccagttcccccaatcctgcagcaacatgccagccaagccagggcatctggggcaccctcagcagacagaagtggcacctgaccccaccacgatgggcaatcgccacagggaacttggggtccccgattcagccctggctggagtgccaccacctcacccagtccagagctacccacagcagagccatcacctggcagcctccatgagccaggagggctaccaccaggtccccagccttctgcctgcccgccagcctggcttcatggagccccaaacaggcccgatgggggtggctacagcaggctttggcctagtgcagccccggcctcccctcgagcccagccccactggccgccaccgtggggtacgtgctgtgcagcagcagctggcctacgccagggccacaggccatgccatggctgccatgccgtccagtcaggaaacagcagaggctgtgcccaagggagcgatgggcaacatggggtcggtgcctccccagccgcctccgcaggacgcaggtggggccccggaccacagcatgctctactactacggccagatccacatgtacgaacaggatggaggcctggagaacctcgggagctgccaggtcatgcggtcccagccaccacagccacaggcctgtcaggacagcatccagccccagcccttgccctcaccaggggtcaaccaggtgtccagcactgtggactcccagctcctggaggccccccagattgacttcgatgccatcatggatgatggcgatcactcgagtttgttctcgggtgctctgagccccagcctcctccacagcctctcccagaactcctcccgcctcaccaccccccgaaactccttgaccctgccctccatccccgcaggcatcagcaacatggctgtcggggacatgagctccatgctcaccagcctcgccgaggagagcaagttcctgaacatgatgacctagaggcccgagcgcctggtgctgagtgcacccggaggggtcatcgctgcccagagcctggggattccagctgtcttgtctttttccaaaaaagtgttaaataggcttgaggggttgttgcgcaatggccgcttcagatgacagatgttgtaagagaaggtttatgggcatcctctctggtcttttggattattcctcagaacaatgaaaaaagtctccataggacaggaaggaatgcaaaactcatttacacagtgctttccagcctttggtgcttacaggaccgcgctgttccggcttcttcacggctgacattcggctaacgagggattactttggccaaaacctttcaaaggatatgcagaaagatggtagggagcatttgggtttgaatctgaatgctatactggatactctgctccggaaagatgagctttttattctactacttggaaggaaaaggaattcctggtccacctgaattcctctatgaagcctaactcttgaggtctctaacataccttgtcatagaggaaaagcacagattatacctggatgattcaggagcacattctgattccaggtttggtagagctggctcttctactccgtaaagccgagtctgggactggcagcccatccaagtgtatatgaatgaataaagcatccaagtatatatgaatgaataaagtatgtaagtatcaccagaaaaaggaaagaaaaaatgtactccttggggcaagcccagaagctgccctggcctctccagaccgtgtttacagtgtttgcatgtagaatgtagcccttcctgaaaagaagacttgtttctaaatacctcggggctgctggagccgctgtgggttagggatggactgaggcctcgaggagtgagggtgcacccggggcccagcctcaggctgccctagggatctctcagtaggaagaggaagttgcgtgtttacccaatcctgtttctccaatgcaacgtccacccactttaccaccaaaaactccagggcctgacggcagcccggtcccccagcactcaccagcagcccagtgttctccaccaagccacagtgtgcatgcctggtatcctccggattcccttccttctgcccgctgagtcactgggcagagaatgatgacatgtgtaggtggtgtggttgggggtggaaaggggaaggggttgatcctcaggactctgagggagcatcgttgaattttcctgttcagtgtgaccaagacccacctggaaatggaatttggaactggcttcaggagacatcattcctgaacacactgtagggtgaattggtgcatcttccccaccatacacacacacacacacacacacacacacacacacacacacacaccccaaaccttttcatggggaatgtgtggcaaccttgccaaacagcaccactcagagtgtgactctgactgtgaccttggccttaatgaggaacttcttaggagagtttgaggacaaggccaacatcgtcatctgggctcgctgcgtcccagcacatcaaactctgtccagagacaaggccaactgcaaatgaaagccagggaacattgctaagggtctgtggctctgtggtggtgttcatcgccttcctgagataggatttcccttgccagtcccaacctgtatatattctgtacagaagacatccctgaatatactgtaggtgagtcgtccagccaaatttatatctccaaaacatttttagctttttctacatgctatgaattgagatgacatgctcaacttgtaaataagtctttttgtacattaaaaaagtaattttttcataatttatcttgtctatctgcttcccccttgacagtagttaatgagaacctgggcagtaaatttggtgcattcgagcagaaattaggctgtattttttcttaacagtgtcaaaattgactatcccgcctttgccaagaaatgtttaatgctgaggcaaaaaaaaaaaa

SEQ ID NO: 332 - DNA, 8228 bp, Homo sapiens
ccgcgggtctatgggaagttcggggacttgacagccgctgccgccgcagggcatttttggtcgaagagagctgaagtaatgagaagacatcatggaggcccagtcccacagctccacgaccactgaaaagaaaaaagttgagaattccatagtgaagtgctccactcgaacagatgtgagcgagaaagccgttgcctccagcaccacttctaatgaggatgaaagtcctggacagacttatcacagagagagaagaaacgcaatcactatgcagccacagaatgtccaggggctcagcaaagtcagtgaggaaccttcaacatcgagtgacgagagggcctcattgatcaagaaagagatccatgggtccctgccacacgtggcggagccctctgtgccgtaccgcgggacggtgtttgccatggaccccaggaatggttacatggagccccactaccaccctcctcatcttttccctgccttccatcctcctgtaccaattgatgccagacatcatgagggccgttaccattacgatccatctccgattcctccattgcatatgacttccgccttatctagtagccctacgtatccggacctgcccttcattaggatctccccacaccggaaccccactgctgcttccgagtctcccttcagccctccacatccctacattaatccctacatggactatatccgctccttgcacagcagcccatcgctctccatgatctcagcaacccgtgggctgagccctacagatgcgccccatgcaggagtcagcccagcagaatactatcatcagatggccctgctaactggccagcgcagcccctatgcagacattattccctcagctgccaccgccggcacgggggccatccacatggaatatcttcatgctatggatagcaccagattctccagccccaggctgtcagccaggccgagccgaaaacgtacactgtccatatcaccactctccgatcatagctttgaccttcagaccatgataaggacgtctcccaactccttggtcacgattctcaataattcccgtagcagctcttcagcaagtggctcctatggtcacttatctgcaagtgcaatcagccctgccttgagcttcacctactcttccgcgcccgtctctctccacatgcatcagcagatcctaagccgacaacagagcttaggttcagcctttggacacagccctccactcatccaccctgccccaacttttccaacacagaggcctattccagggatccctacggttctgaaccccgtccaggtcagctccggcccttctgagtcctcacagaacaagcccacgagtgagtctgcagtgagcagcactggtgacccgatgcacaacaagaggtccaagatcaaacccgatgaagacctccccagcccaggggctcgggggcagcaggaacagcccgaaggaacaacccttgtcaaggaggaaggggacaaagatgaaagcaaacaggagcctgaagtcatctatgagacaaactgccactgggaaggctgcgcgagggagttcgacacccaagagcagcttgtgcaccatataaataacgaccatattcatggagagaagaaggagttcgtgtgcaggtggctggactgctcaagagagcagaaacccttcaaagcccagtatatgttggtagtgcatatgagaagacacacgggcgagaagcctcacaaatgcacttttgaaggttgcacaaaggcctactcgagactagaaaacttgaaaacacacttgagatctcacactggagagaaaccatacgtctgtgagcacgaaggttgcaacaaggctttctcaaatgcctctgatcgcgccaaacaccaaaacagaacgcattccaatgagaaaccatatgtgtgcaaaatcccaggctgcactaagcgttacacagacccaagctccctccggaaacatgtgaagacagtgcatggcccagaggctcatgtcaccaagaagcagcgaggggacatccatcctcggccgccacccccgagagattccggcagccattcacagtccaggtcgcctggccgaccgactcagggagcccttggtgagcagcaggacctcagcaacactacctcaaagcgggaagaatgcctccaggtgaaaaccgtcaaggcagagaagccaatgacatctcagccaagccctggtggtcagtcttcatgcagcagccaacagtcccccatcagcaactattccaacagtgggctcgagcttcctctgaccgatggaggtagtataggagacctcagtgccatcgatgaaaccccaatcatggactcaaccatttccactgcaaccacagcccttgctttgcaagccaggagaaacccggcagggaccaaatggatggagcacgtaaaactagaaaggctaaaacaagtgaatggaatgtttccgcgactgaaccccattctaccccctaaagcccctgcggtctctcctctcataggaaatggcacacagtccaacaacacctgcagcttgggtgggcccatgacgcttctcccgggcagaagcgacctctctggggtggacgtcactatgctgaacatgctcaacagaagggacagcagcgccagcaccatcagctcggcctacctgagcagccgccgctcctcagggatctcgccctgcttctccagccgccgctccagcgaggcgtcacaggccgagggccggccgcagaacgtgagcgtggccgactcctacgaccccatctccaccgacgcctcgcgccgctccagcgaagccagccagagcgacggcctgcccagcctgctcagcctcacgcccgcccagcagtaccgcctcaaggccaagtacgcggctgccacaggagggccgccgccgacgcccctgcccaacatggagaggatgagcctgaagacgcgcctggcgctgctcggggatgccctcgagcctggcgtggccctgcctccagttcatgccccgaggaggtgcagcgacgggggagcccacggctacgggcggcgccacctgcagccgcacgatgcgccgggccacggcgtgaggagggccagcgacccggtgcggacaggctccgagggcctggccctgcctcgtgtgccgcgcttcagcagcctcagcagctgcaaccccccggcgatggccacgtccgcggagaagcgcagtctcgtgcttcagaattacacgcggcccgagggcggccagtcccgaaacttccactcgtccccctgtcctcccagcatcaccgagaacgtcaccctggagtccctgaccatggacgctgatgccaacctgaacgatgaggatttcctgccggacgacgtggtgcagtatttaaattcccagaaccaagcagggtacgagcagcacttccccagcgccctcccggacgacagcaaagtgccccacgggcccggtgactttgacgcgcccgggctgccagacagccacgctggccagcagttccatgccctcgagcagccctgccccgagggcagcaaaaccgacctgcccattcagtggaacgaagtcagctccggaagcgccgacctgtcctcctccaagctcaagtgtgggccgcggcccgctgtgccgcagactcgcgcctttgggttctgcaacggcatggtcgtccacccgcagaaccccttgaggagcgggcctgctgggggctatcagaccctcggggagaacagcaacccctacggtggcccagagcacttgatgctccacaacagccccggaagtggcaccagtggaaacgccttccatgaacagccctgtaaggccccgcagtatgggaactgtctcaacaggcagccagtggcccctggtgcactcgacggtgcctgtggtgccgggattcaagcctcaaagctgaagagcacccccatgcaagggagcgggggccagctgaatttcggcctgccggtagcgccaaatgagtcagctggcagcatggtgaatggcatgcagaaccaggacccagtgggacaggggtacctggctcaccagctcctcggcgacagcatgcagcacccgggggcaggccgccccggtcagcagatgcttgggcagattagtgctacctcacacatcaacatctaccaagggccagagagctgcctgccaggggctcacggcatgggcagccagccgtcaagcttggcagttgtcaggggctaccagccatgtgccagctttgggggcagcaggcgccaggctatgccgagggacagccttgctctgcagtcaggacagctcagtgacacaagtcagacctgcagggtgaatggtatcaagatggagatgaaagggcagccccatccgctgtgctctaatctgcagaattactctggtcagttctatgaccaaaccgtgggcttcagtcagcaagacacgaaagctggttcattctctatttcagacgccagctgcctgctacaggggaccagcgccaaaaactctgagttactttccccaggtgctaatcaggtgacaagcacagtggacagcctcgacagccatgacctggaaggggtacagattgacttcgatgccatcatagacgatggggaccactccagcctgatgtcgggggccctgagcccaagtatcattcagaacctttcccatagctcctcccgcctcaccacgcctcgggcgtccctcccattcccagcgctgtccatgagcaccaccaacatggctatcggggacatgagttctttgctgacctccctagcggaagaaagcaaattccttgcagttatgcaataggctttaggaaaaaaagactgcaaccaacggaaatcaataggagttgaagagattaaactgactttgttttggctgtttttttagttctgtatgtattttagcaatctcatctcacctaactgagatgtgtttcaattatattccttttatggaaaaggactctgaaaaaccctaaagtattctagggagaaactgtcttccatttcagttttgaatcagtattgttacactcaaaccaccctctttttaaaaaaaaaaaaaaaaactgtaagccccgccccctttttagtaaaccgatgtaaatttgtgatgtgcatattcttctttcttttagaagagcagtcaaattaaaggatttgacatgttttgctgttgctcaaaggaaataggagttggtgtgcttgtgaccaaggggttacacttccagcttttaaaattctcctttacatgtgctcagtgttttgttttgtgttttggtttctgttttttattttaattcccacattgggcacaagaatcagaatatggatagctagtttaagaaacttttgtgggtgcactgtagcatagatgacagaatattgatgttccccccatctccaattcagttcagggcattccacagttaaacagaaatgggaacgtggggctcttataaatgaaatgggcgctcacagttttggttttcagctcttcatgtctgtaagtgtgctttgggggaggctatgtctgtatggtcgattctcagttatcacatttgcctctcctcccactaccttcatgaacattcagtgctgtttcgcactgcagttagagagaagggacggacagttggtgacactcagccacattgctacttttatctgttctggtaagaagttagatagatggtagattgaagcaattgggtagaattagttgggggaatatttatgagttgctgtgtttgttgattagttccatctctttcccattttaactgagaattgattatatatagctctaagtatataggtatttaaacaaccccacaagcggctgtatcagtaacatttattaattccactatagtgagggaggatttccattctaaataccttattttgagggatttataaaacttagttgtaaaagagaaagcccacatagtgggaataaattgcttcagccatttttagtatttgagagcactagggaagatgtttagtagctgtgtggatgccttttttcacaccctgtctattgaatgctgcatccattcacgaagttaaatgttacatgcagttagtccttaatgtggactggatctgtacttttgttttggattaaaacatttaaagatttttgaagtgcagctactccccacgtgcatttgatacacataaaagtcatactgtgtgtgcacaaagagtacatggattttccagcatattgctttaaaaaattatataaactgttaaaatattaacacctcaggctacctgctgtattctgtcccattgacccctggaattggatttactgcaagtgattgataattcaattatgtggcttttcccctttaatcttgccatttaaattacagtagaaagacaaaatcaagtaaaataaagtgttagataatagaaagagtgttaagaccagcccacttttctcatgtttatgttctttcatttggaccaagaatctccgcatggaggttgatttgccactggggactttggctaagactattaggtttgctttcaactagatgttcctgagacaagcagagggacactgcaattccccttccatgcctgctgttctcccccatgtaagtcttctttgaaattaacggatgtgtctcctttggaacagccccataacaaaagagaactactgatctgagcataggaaagtagaggctctaccacttttcagttgaaaaagcaagactttctctgtgtttctgaaacaaggcataatgttgtcacagaatcagagatccagtctcacttttccacaaatctccaaatctccagtcttatcttgtgtgctctaatggtttggttcaatccctttccaactcttgttttcaaagcatggggcctgagtgttctccactcctcctaagaaaggagcttgggtggaagggaccatgctgacctcctccatcagagggctcttccagtagtattctcggatgcaacctccatttctcagttaccattatttcctgtatcagctttgtccttcctggagggatgcacagtgatccggcccaccactgttgttgtcttgtgcttctgctctttcctatggtttcaggttattttctgggtttcccctattcttcttttatttctttttttttttatatttgctttcctttctactgcttttagatttgcaggagatgcaagtttcagctcaatgtttggcttctctcaatatggaaatttcagaaggacagaggagaggagggaggaagaagaaagtatactcctccagaatttcagtgatctgttgtggcagtccagtggaaggaaggtcttttgaggtcacttagaagcatctttttgggacatccttttgggatctctgtaggctaggcatctcatatcttgagactcacccccagcctccaagcctctctccatttctctaacctatgcattttagagcgagaggaccgcctcactagtgtcaccatcctgccttttctaaaacatgcaggctcacacattctactcctgcttaatgtctgtgttaaacgttttctaaccatttttgttttatttttctgaaaaagttaacccctcccaactcctcacacattggctcttcctcttgagccacaaagttttgattcttgcgatgtatgtgccttattttatgttaatcttgtcaatgagagggaccagttggtgttgcccaatcagcactccaaggctgtgtgtgcaccagccagagagcgcacggtggtagcagagtcgaggctgtcttgtatcctggtttcatgtgttgttttgaactgataggaggatgttctcttctgacaagttacccttgtgtatcctgcagacatgtaaaataaaatacaagttcatttttttcaccttttttagatttttttaaaaaataaaatgtgtaatcctttttttaaaagaaacacatgtaaatacatttaagtattgtaggcatagcgttcagatgtgactggcccaggcgttcctcggacaagcctgcattccccgtgatcacgcccacctcaagcccaggggctgcagcccagccacagatgaactctacctttgctttcagaaccacttagtccttttgtaacaaagaaaaaaaaatgtttcttacaatgtcaataaaaaattctttgtatggaaaaaaaaaaaaaaaa

SEQ ID NO: 333 - DNA, 1363 bp, Homo sapiens
ggccggacacttccgtccggcgcgcggcgtcctcctcccgctcggaaggtcccaggtgtgacaccttcagcaggtctcagggaagatggcagccctaggggacattcaggagtccccttctgtcccgtcccctgtcagtctctcatcaccggggacacctggaacccagcaccacgagcctcagcttcacctccatgggcatcaacatggctcccctggctccagccctaaggtgctctcccagccgtccgacctggatctccaagacgtagaggaagtggagatcggcagagacaccttctggcccgactccgagcccaagccggagcaggctccacgctctcctggctctcaggcccctgacgagggggcgggcggggcgctgcgcagcctcctgaggagccttccccgcagggcccggtgcagcgccggcttcgggcctgaatccagcgcggagcggccggcgggccagccgcctggggccgtcccttgcgcccagccgcggggcgcctggcgcgtgacgctcgtgcagcaagcagcggccgggcccgagggtgcgcccgagcgggctgccgagctgggagtcaacttcggtcggagccggcagggcagcgcgcggggggccaagccgcacaggtgcgaggcctgcggcaagagtttcaagtataactcgctgctcctgaagcaccagcgcatccacacgggcgagaagccctacgcctgccacgagtgcggcaagcgcttccgcggctggtcgggcttcatccagcaccaccgcatccacacgggcgagaagccctacgagtgcggccagtgcggccgcgccttcagccacagctcgcacttcacgcagcacctgcgcatccacaacggcgagaagccctacaagtgcggcgagtgcggccaggccttcagccagagctccaacctggtgcgccaccagcggctgcacacgggtgagaagccctacgcctgcagccagtgcggcaaggccttcatctggagctccgtgctcatcgagcaccagcgcatccacactggcgagaagccctacgagtgctccgactgcggcaaagccttccgcggccgctcgcacttcttccggcacctgcggacccacacgggcgagaagcccttcgcgtgtggcgcctgcggcaaggccttcggccagagctcccagctcatccagcaccagcgggtgcactaccgcgagtagccgggcgggggctcggggctcggcctcctacctgcccccaacccaccctccaccccgtcccccacggtgggcactgcccagcaccgcatgccacgtgtccggaataaattctttttgattgttggaaaaaaaaaaaaaaaaaaaaaa

SEQ ID NO: 334 - DNA, 3705 bp, Homo sapiens
tgaagaccagctgggagcccactgcctgctgccacctccaactccggccccctcaccatgcactccctggacgagccgctcgacctgaagctgagtatcaccaagctccgggcggcaagagagaagcgggagaggacgctgggtgtggtccggccccgtgctctgcacagggagctgggcctggtggatgacagccccacacctggctctccaggctccccgccctcaggcttcctgctgaactccaagttccccgagaaggtggagggacgcttttcagcagcccctctcgtggacctcagcctgtcaccaccatctgggctggactcccccaatggcagcagctcgctgtcccccgagcgccagggcaacggggacctgcctccagtgcccagtgcctcggacttccagccactgcgctatttggatggtgtccccagctccttccagttcttcctgcccctcggctccgggggggccctgcacctgcctgcctcctccttccttacccctcccaaggacaagtgcctctcgccagacctgcccctgcccaagcagctggtgtgtcgctgggccaagtgtaaccagctctttgagctcctgcaagacctggtggaccatgtcaacgattaccatgtcaagcccgagaaggatgcggggtactgctgccactgggagggctgcgcccgccatggccgaggtttcaacgccaggtacaagatgctcatccacatccgcacacacaccaacgagaagccacaccgctgtccgacctgcagcaagagcttctcccgcctggagaacctgaagatccacaaccggtcgcacacaggtgagaagccctacgtctgcccctacgagggctgcaacaagcgctattccaactccagtgaccgctttaagcacacgcgcacccactatgtggacaagccctactactgcaagatgcccggctgccacaagcgctacacggaccccagctcactgcgcaagcacatcaaggcccatggccactttgtgtcccacgagcagcaagagctcctgcagctgcgcccaccccccaagccgccactgcccgcccccgacggcggcccctatgtcagtggggcccagatcatcatccccaacccagctgccctctttggaggccctggcctgcccggcttacccctacccctggcccccggcccccttgacctcagtgccctggcctgtggcaacggtgggggcagtgggggtggggggggcatgggccctgggctgccaggccccgtcctgcctctcaatctggccaagaacccgctgctgccctcgccctttggggctggcggactgggcttgcctgtggtctccctccttgctggcgcagctggtggcaaggccgagggggagaaggggcgtgggtcggtgcccaccagggccctgggcatggagggccacaagacgccccttgaaaggacggagagcagctgctcccggccaagccccgatggactccccctgctgccaggcaccgtgctggacctgtccacgggcgtcaactcagctgccagcagcccagaggcgttggcccctggctgggtggtcatcccgccgggctcggtgctgctcaaaccggctgtggtgaactgagcccatcctgcggacagttgtggtgcccccccggcagctcccggcactgcccccgacgaacggaaactcttctgtgaaatagcaataatgtcctactgcccgggcagccccagcccagcccgccgggagcaaggatggtgctaggtcattcatggctggcctcccagcccccgggtggggacctggcctgtcatgcagggagagctgtgctcctgggtgctgaagcctcgctcctgtctgtcccccaccacctggccctcagcttctgagaggctttcccctgcccgacctcctcccgtttccctctcccaccctggcacctccctcacctagtgaccacccatggcaagttgccctctcccagcagagggggtgggtggggtggcatctgccctccctgctagcaccaggctcccccttcctgagaggagcccccagggaccagaggcctgcccttccctcctaggcttacccagcccctgccctgggggctccttggacccctttccctctgaccctgcctccagagggaaagcaagacagatgcaggcccctgcaaagccccaggtagaagcatgccccccaggacaaggcgcctcccactagttaggaggaggcccgctctgcagccgccgtcctcaccccaggccaggcctgcagtaccagacgggatagctggccactccacccctgcaccccagggtctcctccctctaccttttggggcaccctgggagcgtgggaagcaggtccgagggcccctgagctggcaaggggaggtgccaggccagctgtggtgccaagatactgagtgacctgggccctggctcagggagcatgtggggccaggcccagcgccccgtcttcctccttctacccccgctgggcctggcctgggcagcgccccctgcagaggcctttgggtccttggtcctgtaacaggaagggggaggctggctggggacgaccgaccacaggctgggacacagctcctggtctgggggctccaagtgacagcatgcaggggagggggctcccagtcagtgctgtgttgggagctttctggaggctgtggactgaaggccttgagggaagcagtggctggaggagggtgctggacccatgacacgttgcttcctctggcttttccctgctgggccgctttctcagaggcacttccccacccctaacacccagtgggcccccccaggttctgtgccactcagagggaccctggcaggggccagaaccacttaagggtggtgctggagggccttgtgccccagtcccatcccaggacgccctgagggatggacgcagccatgcaccccccatctggggcctctccctgctccctctcccacctggcagctgggagttctggcttctaggcctgccctgtcaccaggcctctgagtggccaggcccttccacctccccatctgtaaaacgaggcagctgcccggacagccttggggtccttagtggccctgcaggtcctctggcagctctgctgaccccaccctctcccggactgcccttctgtcccagaggggtcaccctgacccggcccaccttgccactgggctttggactccagccctgacagggcccagccacactggctctgcccctcgaaggggctatgagcaaggtaggagggagctggtctcctttcttcgggccccacccaggccctgagcaccccccacccctgtgagggccccaggccttaagtccctggcggggtcatgggtttgcgacttgagcagagcggaggaacagggcactggaaggccgacgagctcagcatgcgactcggtgacggaccaggctcggcagggccggtgtactttttgtggttgtcattggtgtgttgttgcacattccaggacgtcagtattttaacaggttctaagtgcctttctatcgtagcttatgttttcctcctcttggctccattgctgttagcatagagttttaaaaaaagagataagctaatgactataacaatatattcctccatgggagaggaagtttataaagaaacaataaaagtgagttgcaaagatg

SEQ ID NO: 335 - DNA, 8482 bp, Homo sapiens
aaataaagttttttcaatggaaggcttgcagctcttgaggacctgccaaatggaagaaggacagagacctggagccctatggaaagttctgacaccatgtgtggaaggacatggcttttaacacgtgtggtgactggagtagctgcagctgaggacagccaccctttcttcgtctctgctgagcgaaggctacacggcccttcctccttgcagctgtttcaccttctaccttgcgtggagccaggcttttgcaccgaatctgagatgccattttaaacagaagactccatcctcttgaagatgggaaattcttacgctggacagctgaagacgacacgctttgaagaggtcttgcacaattccatcgaggcatccctgcggtccaacaacctggtgcccaggcccatcttttcccagctgtacctggaagctgagcagcagcttgccgctctagaaggtggtagccgagtggacaatgaggaagaggaagaagagggagaaggagggctggaaacaaatggccccccaaaccctttccagctgcaccctctgcctgaaggatgctgtaccacagacgggttttgccaggccgggaaggacctgcgccttgtctccatttccaacgagcccatggatgtccctgcgggctttctcctcgtgggggtcaagtcccccagcctgccggaccatctcctggtgtgcgccgttgacaagaggttcttgccagatgacaatggccacaatgctcttcttggtttctctgggaattgtgttggctgtggaaagaaaggcttctgttacttcacggaattctccaatcatataaatctgaaactgaccactcaacccaagaagcagaaacacttgaagtattacctggtccgtaatgcacaagggactctaaccaaaggacctttaatctgttggaaaggctcagagtttagaagccggcagatccccgccagtacttgttccagttccctcttcccagccctggagagcacggctgccttccccagcgagcccgttcctgggacgaaccccagcatcctgatgggagctcagcaggcaggaccagcttctgatcacccctcactaaacgcagcaatgggtccggctgttttcaacggcaaagattccccgaagtgccaacaactggcaaagaataacctgttggccctgccgcgaccatcggctttaggtatcttgtcaaactccgggccccccaaaaaacgccacaaagggtggtctccagaatctccatcagctccagatggtggctgcccccaaggtggtgggaacagagctaagtatgagagcgcaggcatgtcctgcgtgccgcaggttggcttggtgggaccagcttcagtcacctttccagtggtggcctctggagaaccagtgtctgttcctgacaacttgctgaaaatatgcaaggccaagccagtgatatttaaaggccatgggaacttcccttacctctgtgggaacctgaatgacgtcgtggtcagccccctcttgtacacgtgctaccagaattcccagtctgtctcacgggcatacgagcagtacggcgcctctgccatccagcccatctccgaggagatgcagctcctgcttaccgtctactacctggtccagctggccgcggaccaggtgcccttgatggaggacctggagcagatcttcctgcgctcttggcgcgagtcgcacctgaccgagatccggcagtaccagcaggcgccgccgcagcccttcccgcccgcgcccagcgccgcggcacccgtgacctccgcgcagctgccctggctggccagcctggccgccagctcctgcaacgacagcgtgcacgtcatcgagtgtgcttactccctggccgagggcctctccgagatgttccggctgttggtcgagggcaagcttgccaagaccaactacgtggtcatcatctgcgcctgccgcagcgcggccatcgactcctgcatcgccgtcaccggaaaataccaagcccggattctttccgagagccttctcactcctgcggagtaccagaaggaagtcaattacgagctggttacggggaaggtagactcgctgggggccttctttagcaccctctgtccagagggtgacattgacattttgctggacaaatttcaccaggaaaatcaaggccatatttcttcctcactcgctgcctcttctgtcactaaagcagcatccctggatgtcagtgggacaccggtgtgcacaagttacaatctggagccacacagcatccggcccttccagctggcagtagcgcagaagctcctctcccatgtgtgttccattgcggattccagcacccaaaatctggacctgggatcctttgagaaggtggactttctcatttgcattcccccctcagaagtgacctaccagcagactctgctccatgtgtggcattcaggggttttgctggagcttggtctgaagaaagagcacatgacgaagcagagggtggaacagtatgttctgaagctagacacggaggcacagacaaaatttaaggcttttctgcaaaactccttccagaacccgcatacactttttgtcctaatccatgaccatgcgcactgggatcttgtgagtagcactgttcataacctctattctcaaagtgacccgtcggtgggattggtggaccgattgctcaactgcagggaggtgaaggaggcccccaacattgtgacacttcacgtgacctccttcccgtatgcactgcagacacagcacaccctcatcagcccctacaacgagatccactggcctgcctcctgcagtaatggagtggacttatatcatgaaaataagaagtacttcgggctgtcggagtttattgaatccaccctttcaggacacagcctccccttgctcagatacgatagctcctttgaggccatggtcactgcattaggaaaaaggttcccccgcctgcacagcgcggtgatcaggacctttgttctcgtgcagcactacgcggccgccctgatggccgtaagcggcctcccgcagatgaagaactacacgtcggtggagacgctggagatcacgcagaacctcctcaactccccgaagcagtgcccctgcggccacgggctcatggtcctgctgcgggtgccctgttcgcccctggcggtggtggcctatgagcggctggcccacgtgcgggcccggctggcgctggaggagcactttgagatcatcctgggcagtcccagctcaggcgtcaccgtggggaagcacttcgtaaagcagctcaggatgtggcagaaaattgaggatgtggagtggagaccccagacttacttggagctggagggtctgccttgcatcctgatcttcagtgggatggacccgcatggggagtccttgccgaggtctttgaggtactgtgacctgcgattgataaactcctcctgcttggtgagaacagccttggagcaggagctgggcctggctgcctactttgtgagcaacgaggttcccttggagaagggggctaggaacgaggccttggagagtgatgctgagaagctgagcagcacagacaacgaggatgaggagctggggacagaaggctctacctcggagaagagaagccccatgaaaagggagaggtcccgctcccacgactcagcatcctcatccctctcctccaaggcttccggttcagcgctcggtggcgagtcctcggctcagcccacagcactcccccagggagagcatgccaggtcgccccagccccgtggccccgcagaggagggcagagcccctggtgagaaacagaggccccgggcaagtcaggggccaccctcggccatcagcaggcacagtcccgggccgacgccccagcccgactgtagcctcaggaccggccagaggagcgtccaggtgtcggtcacctcgtcgtgctcccagctgtcctcctcctcgggctcatcctcctcatccgtggcgcccgctgccggcacgtgggtcctgcaggcctcccagtgctccttgaccaaggcctgccgccagccacccattgtcttcttgcccaagctcgtgtacgacatggttgtgtccactgacagcagtggcctgcccaaggccgcctccctcctgccctccccctcggtcatgtgggccagctctttccgccccctgctcagcaagaccatgacatccaccgagcagtccctctactaccggcagtggacggtgccccggcccagccacatggactacggcaaccgggccgagggccgcgtggacggcttccacccccgcaggctgctgctcagcggcccccctcagatcgggaagacaggtgcctacctgcagttcctcagtgtcctgtccaggatgcttgttcggctcacagaagtggatgtctatgacgaggaggagatcaatatcaacctcagagaagaatctgactggcattatctccagcttagcgacccctggccagacctggagctgttcaagaagttgccctttgactacatcattcacgacccgaagtatgaagatgccagcctgatttgttcgcactatcagggtataaagagtgaagacagagggatgtcccggaagccggaggacctttatgtgcggcgtcagacggcacggatgagactgtccaagtacgcagcgtacaacacttaccaccactgtgagcagtgccaccagtacatgggcttccacccccgctaccagctgtatgagtccaccctgcacgcctttgccttctcttactccatgctaggagaggagatccagctgcacttcatcatccccaagtccaaggagcaccactttgtcttcagccaacctggaggccagctggagagcatgcgactacccctcgtgacagacaagagccatgaatatataaaaagtccgacattcactccaaccaccggccgtcacgaacatgggctctttaatctgtaccacgcaatggacggtgccagccatttgcacgtgctggttgtcaaggaatacgagatggcaatttataagaaatattggcccaaccacatcatgctggtgctccccagtatcttcaacagtgctggagttggtgctgctcatttcctcatcaaggagctgtcctaccataacctggagctcgagcggaaccggcaggaggagctgggaatcaagccgcaggacatctggcctttcattgtgatctctgatgactcctgcgtgatgtggaacgtggtggatgtcaactctgctggggagagaagcagggagttctcctggtcggaaaggaacgtgtctttgaagcacatcatgcagcacatcgaggcggcccccgacatcatgcactacgccctgctgggcctgcggaagtggtccagcaagacccgggccagcgaggtgcaagagcccttctcccgctgccacgtgcacaacttcatcatcctgaacgtggacctgacccagaacgtgcagtacaaccagaaccggttcctgtgtgacgatgtagacttcaacctgcgggtgcacagcgccggcctcctgctctgccggttcaaccgcttcagcgtgatgaagaagcagatcgtggtgggcggccacaggtccttccacatcacatccaaggtgtctgataactctgccgcggtcgtgccggcccagtacatctgtgccccggacagcaagcacacgttcctcgcagcgcccgcccagctcctgctggagaagttcctgcagcaccacagccacctcttcttcccgctgtccctgaagaaccatgaccacccagtgctgtctgtcgactgttacctgaacctgggatctcagatttctgtttgctatgtgagctccaggccccactctttaaacatcagctgctcggacttgctgttcagtgggctgctgctgtacctctgtgactcttttgtgggagctagctttttgaaaaagtttcattttctgaaaggtgcgacgttgtgtgtcatctgtcaggaccggagctcactgcgccagacggtcgtccgcctggagctcgaggacgagtggcagttccggctgcgcgatgagttccagaccgccaatgccagggaagaccggccgctcttttttctgacgggacgacacatctgaggaagacagcggcgagttttctgaagagatgagtgctcagagccctcatgctgttgaggctaaagggaggcctggaacggtggggcgtttgactggaatggaccccagggactgtccaggtgcagcccctcctagtacacatgggcccccgaggccgtggtcctgggagccaggaagactccgcagtgggtgagaatgaaaacttgagactcccaagttctgggccagcccattgctctgggctgttttaaagcccatttcacgaggaacaaagatttacttcctgtcctgccattcgtgtgcttccatggacaaacctgatttttttctcttagttctaaagaatcttgggttattttgtagcggtgccagtatttcagtagatgggatttcagccaagtaggttcccctgtaacctcctacaaagcaatattccaaaggaacattttaactgtaaaggctggagacaagaaaaaataagtagatcgttttaataacaattatttaattgcctataagtttgctgtttcagaggctagcccaaaggcatcaaatttaataaagttaaacaaattgatttacttcagagcaaatatgatcctattaaaataatatagggtaaataccctacctcttagaaagggcaaaaatgcaaagaagctttctttaaaactaaaagggttttttggggggggagttggcggggaggaaataaggctaacagaggttgacctaaaattagccttacaaaggagaaaggaccacattgcttacttgaaacagacaatgaaaacaaccaaagtgatatataaaatagttgatgagaactagacttatgactgtagtttactagagtttagttttcagttgctgaagtagctcattttctcttactaatgtttggttcctcagggaagaatctcacttgactagagaggaggtgggaacagaagagagaaggaggcagggagatgtatttcttagggctcaccccttcacagactgacagaatggttttgttttgttttgttttgttttgttttgtttttgagatggactctagctctgtcacccaggctggagtgcagtggtgcgatctcggctcactgcaagctccgcctcccgggttctcaccattctcctgcctcagcctcccgagtagctgggactacaggcgcccaccaccacgcccggctaattttttgtattttttagtagagacggggtttcaccatgttagccaggatggtctcgatctcctgacctcgtgatccgcccgcctcggcctcccaaagtgctgggattacaggcgtgagccaccgtgcctgccccagaatggtttttaaagccacagttgagaggccacccattgcccggcgcctggacagtgatcatcttgttcatcttgttcagtcctttcttgtgtgattggaattattcatcccctttgaaagatgagaaggttgagatgcaaagagtctacctttccaagttctcactgctggaaagagctagaagcacagttcaaagttctggcttctggactctgcagtccaggtctcccttctcccacttgcctaccctcaatgccacactgtttttgaagtggcccataacttgaaggaaaagtttaaagacagttcaatttaatcatcagaatgcattcttttttttttcggagacggagtttcactcttgctgcccaggctggagtgcaatggtgcaatgacctcggctcactgcaacctctgcctcctgggttcaagtgattctccagcctcagcctcccgagtagctgggattatgggcgcccaccaccatgcccagctaatttttgtattttttttttttagtagagatggggtttcgccaggttggccaggctggtcttgtgaactcctggcctcaggtgatctgcccacctcatcctccaaaagtgctgggattacaggcatgagccactgcgcctggcctcagaatgcattcttacacatctatcctagacatttataagcactctaatggataacaatccaagaataaatgattgtaaaagatgatgccgaagagttgatgtcaatctttttttcctaagaaaaaaagtccgcgagtattaaatatttagatcaatgtttataaaatgattactttgtatatctcattattcctattttggaataaaaactgaccttctttaatcatatacttgtcttttgtaaatagcagcttttgtgtcattctccccactttattagttaatttaaattggaaaaaaccctcaaactaatattcttgtctgttccagtcttataaataaaacttataatgcatg

SEQ ID NO: 336 - DNA, 8904 bp, Homo sapiens
atgatgatggcaagaaagcaagatgtccgaattcccacctacaacatcagtgtggtgggattatctgggaccgagaaggaaaagggccagtgtgggattggaaagtcttgtttgtgcaaccgcttcgtgcgcccgagtgctgacgagtttcacttggaccatacctccgtcctcagcaccagtgactttggagggcgagtggtcaataatgaccactttctctactggggagaagttagccgctccctggaggattgtgtggaatgtaagatgcacattgtggagcagactgaatttattgatgatcagacttttcaacctcatcgaagcacggccctgcagccctatatcaagagagctgctgcgaccaagcttgcatcagctgaaaaactcatgtacttttgcactgaccagctggggctggagcaggactttgagcagaaacaaatgccagacggaaagctgctggttgatggttttcttcttggtattgatgttagcaggggcatgaataggaactttgatgaccagctcaagtttgtctccaatctctacaatcagcttgcaaaaacaaaaaagcccatagtggtggtcctgactaagtgtgacgaaggtgttgagcggtacattagagatgcacatacttttgccttaagcaaaaagaacctccaggttgtggagacctcagcgagatccaatgtaaacgtggacttggctttcagcaccttagtgcaactcattgataaaagtcggggaaagacaaaaatcattccttattttgaagctctcaagcagcagagtcagcagatagctacagcaaaagacaagtatgagtggctggtgagtcgcattgtgaaaaaccacaatgagaactggctgagtgtcagccgaaagatgcaggcctctccagaataccaggactatgtctacctggaagggactcagaaagccaagaagctgtttctacagcacatccaccgcctcaagcatgagcatatcgagcgtaggagaaagctgtacctggcagccctgccattagcttttgaagctcttatacctaatctagatgaaatagaccacctaagctgcataaaagccaaaaagctcttagaaaccaagccagaattcttgaagtggtttgttgtgcttgaagagaccccatgggatgccaccagtcacattgacaacatggaaaacgaacggattccctttgatttaatggataccgtccctgcagagcagctatacgaggcccacttagagaagctgaggaacgaaaggaaaagagttgagatgcgaagggcgtttaaagaaaacctggagacttctcctttcataactcccggaaagccttgggaagaggcccgtagttttattatgaatgaggatttctaccagtggctggaggaatctgtatacatggatatttatggcaaacaccaaaagcaaattatagataaagcaaaggaagaatttcaggagttgcttttggaatattcagaattgttttatgaactggagctggatgctaagcccagcaaggagaagatgggtgttattcaggatgttctgggagaggaacagcgatttaaagcattacaaaagctccaagcagagcgtgatgcccttattctgaaacacattcattttgtgtaccacccaacaaaggagacatgccccagctgcccagcttgtgtggacgctaagattgagcacttgattagttctcggtttatccggccgtctgaccggaatcagaaaaattcactctctgaccctaacattgatagaatcaacttggttatattgggcaaagacggccttgcccgagagttggccaatgagattcgagctctttgtacaaatgatgacaagtatgtgatagatggtaaaatgtatgagctttccctgaggccaatagaggggaatgtcaggcttcctgtgaactctttccagacgccaacatttcagccccacggctgtctctgcctttacaattcaaaggaatcgctatcctatgtagtggaaagtatagagaagagtagagagtccacgctgggccggcgggataatcatttagtccatctcccccttacattaattttggttaacaagagaggagacaccagtggagagactctgcatagcttaatacagcaaggtcaacaaattgctagcaaacttcagtgtgtctttctcgaccctgcttctgctggcattggttacggacgcaacattaatgaaaagcaaatcagtcaagttttgaagggactcctggactctaagcgtaacttaaacctggtcagttctactgctagcatcaaagatttggctgatgttgatctgcgaattgttatgtgtctgatgtgtggagatccttttagtgcagatgacatactttttcctgtccttcagtcccaaacctgtaaatcttcccattgtggaagcaacaactctgttttacttgaactaccaatcggactgcacaagaagcggattgaactgtctgttctttcataccattcctcctttagcatcagaaagagccggttggttcatgggtacattgttttttattcagccaaacgtaaggcctctttggctatgttacgtgcctttctttgtgaagtgcaggatattatccctattcagcttgtagcactcactgatggcgctgtagatgtcctggacaatgacttaagtagggaacagctaactgagggggaggagattgctcaagaaattgacggaaggttcacaagcatcccctgtagccaaccccagcataaacttgagatctttcacccattttttaaagatgtggtggaaaaaaagaacataatcgaggctactcatatgtacgataatgctgccgaggcctgtagcaccaccgaagaggtgtttaactccccccgggcaggatcaccgctctgcaactcaaacctgcaggattcagaagaagatatcgagccatcttacagcctgtttcgagaagacacatcactgccttctctgtccaaagaccattctaagctctctatggaactggagggaaatgatgggctgtctttcattatgagcaattttgagagtaaactgaacaacaaagtacctccgccagtcaaaccaaagcctcctgtccattttgaaattacaaagggggatctatcttatttagaccaaggccatagggatggacagaggaagtctgtgtcttctagcccctggctgcctcaggatgggtttgatccttctgactatgctgaacccatggatgctgtggtgaagccaaggaatgaagaagaaaacatatactccgtgccccatgacagcacccaaggcaaaatcatcaccattcggaatatcaacaaagcccagtccaacggcagcgggaatggttctgacagtgaaatggacaccagctctctagagcgagggcgcaaggtttccatcgtgagcaagccagtgctgtacaggacgagatgcacccggctggggcggtttgctagttaccggaccagcttcagcgtggggagtgatgatgagctggggcccatccggaagaaagaggaggatcaggcatcccagggttataaaggggacaatgctgtcattccatacgaaacagacgaagacccgcggaggaggaatattcttcgcagcctaaggaggaacactaagaaaccaaagcccaaaccccggccatccatcacaaaggcaacctgggagagtaactattttggggtgcccttaacaactgtcgtgactccagagaagccgatccccatttttattgaaagatgtattgagtacattgaagccacaggactgagcacggaaggcatctaccgggtcagcgggaacaagtctgagatggagagtctgcagagacagtttgatcaagaccacaacctggacctggcagagaaagactttacggtgaataccgtggctggtgccatgaagagctttttctcagaactgcctgaccccctggtcccgtataacatgcagatcgacttggtggaagcacacaaaatcaacgaccgggagcagaagttgcatgcccttaaggaggtattaaagaaatttccaaaggaaaaccacgaagtcttcaagtatgtcatctctcacctaaacaaggtcagccacaacaacaaggtgaatctcatgaccagcgagaacctctccatctgcttctggcccaccttgatgagacctgatttcagcactatggacgccctcacagccacgcgcacctaccagacaatcattgaactctttatccagcagtgccccttcttcttctacaatcggcccatcaccgagccccccggcgccaggcccagctccccctctgccgtggcttccaccgtccccttcctcacttccacgcctgtcacaagtcagccgtcgcccccacagtcgcctccacccaccccccagtccccaatgcagccactgcttccctcccagcttcaagccgaacacacgctgtgagccaccaagacctggggcgacaggagaaccggtcctctctctgacggggtggcatttggccttgaacaaaaccaagtccactggggacagaggcaggggcaagtggctctccccattaccttctcaagacctcagtgggagcaccagccaatggtaccatcggctgggctgccaggtaccctgggcctggcgctgcagacctgagctggcttggacccatttgaggactgaactaggcaggcaatggctccagtgccctccctctgttccctggaccaccaccccacgtagctgctcacaccagcctccgggtgcctccctctgcttgtacagagcccatggtcgggacagtgccctggcctttgccggggaggaggatgctctgagattcagggtggggctggcaacccctgaagagaacacttcctgttggtctgtctcttcccaccttccatctgcacacacccccaaggtaagggtacagcccggctggcggcctccttgggaacgtgtaggccacggctctgccaccactaggtacctgctgagggcgctggctctgcagatcagaacaacggaggatagctttgtgcctggacccagagagtgtgggactccccgcttcatccccaccgtcccactccacagccttcccgaaacattccctggcaaacaaaggaacactaggagaaaaaatggaaaaacccttccagtaattaaaaaggaagaaaccacagaaagaaaactacagacctcaagattccactctgtgcccgcctctgccgggagggagggaggcacacaggtggagctgaccctcgtctttgtggcagcaaaaccaggatgcctggagctgtggcctgagggcctgctggggtcccactcacccacttaggtctagtcgctagatcccccgttttcccaagaagagggttcgagcccttggtggggacagctggggagatggcagtgcaggctggaacctgggctgccccagaacacagtccattacgatagaaacactaattgagcatgtgcgtggggtgggggtgtgtgtgcacatgtgagtgtgagtgtgtgtgggcgcttggtggggggttggggacagctggaaggtgccaggtgcacttggggttggggttggtgtgttgggtgttgaagtggaatcgtttcatcccagccatggaggccaccagcaggagtgttcatggggatgtgggcgaggtggggcactttgaaggaatggcggtctgctggtgccctcgaaggggcatccttcctggtcttcgctgacccagaggcgctgtgcctgcatatcatccaccaccaccctagcccagccttcccactgccccaggaaaagctcttctcctggccacctctgccccccagcacctcaaacttgcatggctgggctgtggcctctgcggccaggaagcctgacactaggcaccccccaggcgagagctagtggggtgcagagggccccatgccagacagcccttggggctcgttgcactttaagaaataggatctgtggtgtattccagggggcctgatggacacctttcccgggcgtctgcagctgccctgcccgtgcccgcctgcagtggttggagacgggagtggcccttcggctcccgagctccctctggggacggctggctcactgtctccagttctcaatggccaacgaaggtgcttggaaacacctaaccttgcaagttttaccgccttttgaggaacacaaatcggagaacaaacccagggttcaggcgtgttttctgtgaatgttggatgatgaatttttgtctcttctggtggagctgtgcctggccctgtaggcccagggttggctggaaggtgacatctgtgtttcgttttagctgaggttggcagaaacgttcccaaactcccccagccctggaccccagcagatgaggaaacggccccatttactgaccccgcccccttttcgaggttatgctcacctggtcagctcctcacgtaattgggggtggagggaaagcatggtggtgccctgggccgtccctgtgtgaacgcaggcaaaagcagcccagtccccctcactgcttgagctaacactgccacctcttttgtgtgagcacaaaagccacgtcccaagccacctggcccgattccacagatgtatgtgcggccagtgacttccccaggagtgtggagggggtggtgaggaggagcacctgggctctctacccctctcctcacagaagtacctgaaactaggtctggggcactcccaatgcagcgccttgtcagccaaggtgggcaggcagggactgtggcagcttatgtccaaagggagcccccatgcacaggaagccacagggttcctcttgtttcccccgctaacttcagcctctcatctgctgctccgggctgagggactagaggacatctcggtcgtttgaggggcatggccagtcgtggcaggccggccttcagcgtccggtcagggaagcgtgcagcccaaatgggcacttgcatgggagccacagaggagcgtccctggggattgttgggaccatgctgcccccactcccgcttttgttggggctctaagttctggaaggtgtgtgcacagagggtgctcatgggactcgcatgcagctctcagcactgggtgggagggcgttggcttgtccagaatggggacgtggggcagccacccctgcccagcgagagcgcagacaccgtgtgaggggacagcagcccttggtgcaaagccagagactgatcctggctctgacggctgaagagggaagacccaaggctgggtggcgtggctcgtgaatccacttagaattcttggcttgtgtcgcatactgggtgtcacggcacacatttactctgcattgtccccgtctttcccatcgcctagcgtttggggaggaacagggagagagcttcggggcgtctgtctccgtgctctcctgcctccaccgccttggttttgcttcctgctggaggcagggcacctgctgcgacccagattcttctgcaggatgtgtctgtctttgtcacggtggacagagggtgacatcataggagcagctcgctggccagaaggggatgggggcatccctgtgcctcactcagctcctgctgctcttagggaaaggaggcctgggtcaagccagcatccccttggtaaagacccccgcaggccaccaggcattctggacacgcacacacacacacacacacacacacacacacaaaacttcacagcaggccagctgcagtgacttgtcatcaagagtcacctcagctgcgcccccctcccatcctttcctatgagaagccactgctttgggggcgccggctagaaaaagtagggtgcggtggccaggagggcccctgccgcgcggggggctgggtctggttgagtcgctgctttcccgagggcagcgcagggatccggggaagctgcggcagggagcgggcgccggcttcgtggctctgaggtgtaacgggggtgggctccctccctcggaggacatcgtctgtgtccaggtcagaaagtggcccaggaagggggcagtttctgtcgcgggtccggtgggggcgcggccgcggtgcggtcggtgcagcgtggccaatgcgcggcgcgcgcgggggacagagcaggaggcggtctgtcacctcggccactgctgacctgggctggcctcccccagccctcccgtggcggagccggcagcgatgctacaggcctaagttattgtttgcataaaaagaatcatgttccctgtgtacatttaagaaaaaaacaaaaaaacggaaatgtcagaattgtatggaaataaaacttgtttgaaaatttggaatagtgctgctgccagcttatttttctggtacttgtattttcacatgttaaatgatctttatatatgttgaattaacaaatattttgagtttctgagaaaaaacaaaacatattaatggtattgaaatgtgttagtagtctggctgtgtgcccaaaattctgtttcgcagcaaaagtgaagacctgtatgtaaagaaagtataacaattatttctttgtattttaggggctttaaccggaacatcgtctagctggtgttaggaatgtttgcttaatttccagacttttttttaaaaacacatcgtgggttttttgaggctccaacctgattagtgcatggtcagccctcaatgaaggctgaggcatctctgactgaggtgtttttgtttggttttgttttttaaaatcatgtatttgctacaaagtattgtacttgtctcaatgggaatggtgtaaaaaacaaaaggccttatgtgatctgtatcatagttaataaatgaatcttgtaaaaaaccaaaaaaaaaaaaaaaaaa

SEQ ID NO: 337 - DNA, 1217 bp, Homo sapiens
agggggcggggaggggcgcagggctgcgcgctcgccggcgctctctttcggtttggtcggcggctggaggagagtggacccccccactttaaggctctgtcctcggcgcgttcccgccgccccccggtcccgacgcggggctcggggatgcccgccagcatgttcagcatcgacaacatcctagccgcccggccgcgctgcaaggactcggtgttgccggtggcgcacagcgcggcggctcccgtcgtcttcccggccctgcacggggactcgctctacggcgccagcggcggcgcctcctcggactatggcgccttctacccgcgccccgtggcccccggcggcgcgggcctcccggccgcggtcagcggctcccgcctcggctacaacaactacttctacgggcagctgcacgtgcaggcggcgcccgtgggcccggcctgctgcggggccgtgccgccgctgggcgcccagcagtgctcctgcgtcccgacgcccccaggctacgagggccccggttcggtgctggtgtccccggtaccgcaccagatgctgccctacatgaacgtgggcacgctgtcgcgcaccgagctgcagcttctcaaccagctgcactgtcggcggaagcggcggcaccgcaccatcttcactgacgagcagctcgaagctctcgagaacctcttccaggagaccaagtacccggacgtgggcacgcgcgagcagctggcccggaaagtgcacctccgcgaggagaaagtggaggtctggtttaagaaccgccgcgccaaatggaggcggcagaagcggtcctcatcagaggagtcggagaacgcggagaagtggaacaagacgtcgtcgtcgaaggcgtcaccggagaagagggaagaggaaggtaaaagcgatttggactcggacagctgacggccgcgggacacttgcccgtattacttacctaactcgaaggacttgcacagacagacgatgctactttcttgcacacgcgctgccttgcgggagggggtcgagaaagaggaacgaggagctgtaaatagtgtacagagccgggagggtcggcgtctggggtcagggcgcgcacagcccagcagcccgaggccgcccgcgactagcccccaccgtagtatttatagttaaattaagggtgacagtacaataaagtgatggcgatgtaaaaaaaaaaaaaaaaaaaaaaaaaaaaa

SEQ ID NO: 338 - DNA, 618 bp, Homo sapiens
atggcggcagcggctgggggcgcggcgagccgccggggtgccgggcggccctgccccttctccatcgagcacatcctctccagcctgcccgagcggagcctcccggcccgggccgcctgcccaccgcagcccgccggtcgccagagccccgcgaagccagaggagcccggggcgcccgaggctgcgccctgcgcctgctgctgctgctgcggcccccgcgcggcgccctgcgggcccccagaggcggccgccgggctgggcgctcgtctggcgtggccgctgaggctgggaccggcggtgcccttgtctctgggtgcgccagccggaggttccggggcgctcccgggcgcggtcggcccgggttcgcagcggcgcacgaggcgccaccgcaccatcttcagcgaagagcagctgcaggcgctcgaggcgcttttcgtgcagaaccagtatcctgacgtgagtacgcgcgagcgcctggccggccgcatccgccttcgcgaggagcgcgtggaggtctggttcaagaaccgccgggccaaatggcgacaccagaagcgcgcgtcggcttccgcgaggctcctgcccggcgtcaagaagtccccgaaggggagctgctga

SEQ ID NO: 339 - DNA, 1720 bp, Homo sapiens
ggcttctggaatggactgagtccatcgtggaaagggctgggggcaggaggaggtggggaggggcactgcctgcggaaggtaggattagatcattagctcagtgacctcctagggtttcgatgtgctatgttctcatcctacagttggtttggtaatgatctgcaagtcccggagagcaacagcacagctctgcctgacgctctcattaaaatctatgcagccaagctcggcactttgtagcagccggccttgcgaagcctcctcagctcggggggccggggacccagtgagccgagaggccctctgggctccacttatgcatatgcaccaaaaaaaaaaaaaaaaaaaaaaggcttctttagacccagagccctttaagatgataaaggacccaatgcaggtaatcctgtttttggactcacgtaatgtagaatgcaaagtttagtgattatttaatctgggcctaagctagtgagagtatggaacaatggcccataaggactcctaagcgccgaagccaaggagcctcctcccttcctggttcaccccgcccaagggacctgcccccattcctgtggccctggggcccagcttccaatagtgtcagaagcaacttgtggctttgccttggttgtgagatgggtacattccaaaggagcagcctgggggagggggcaggctcagccagcccttggaggctcagagcagctggcccaggctccagctcgcctccagtggaagcccgagcgccctcagaaacgaccctggccaatgtcaacgcagagccgaggcggtgttgtcacggctaatgtgaaatctcttcccgtggcgcccatcctctgactctgcagtgccagcttggacagattgaggtctctgtggctttggtgaccctgcttaagcattcccaccgtgtcccagctctgctctaggactgcctcccactgcggcccctcacctgacttcagggtatggggagggagggagccagtgctccaaggccagggggctttgctcatgagagatgtcaggcttcctggaggcatcaggctttgagccctgctggggtccaactgacctgggaccaggtgtcgcgcagagatgtgcctcattctgtgcctccttctgtgcctcctaccatgttccctttaactgtgcctcagtgtgggttagggaacaattttgttattgtattaagtttattcagttaattcacttgaggaactaaccagtttttactttctgtctagaatgatgtacatgtagtagagtaagccataatgctcccaaagtgccttgttttctctgatacaaacatatttataaggacatattcctgtgggttcttgggtgtgtttgccacatcaagattttagggaaggggggtatatgtgtagtagggatgccgtttgaaaacaggcactcttcccctgaggatgggaaaggagctcttcagttggagatctaggcagtgggttaagccagacccctaaagtgaccctttcctcttctgccctattcttctcagaccctcagaaagacatccaatttttttaaatccctgtagctccaagcctggtctcatttgcttccctgccaggctcatcgtgtgtataccacatttgtgccccactgacctgaaggttccatgtaactgtatacacatgaatacttaaatgccaacatttaaaataatttgataaagtctttgtagccactc

SEQ ID NO: 340 - DNA, 1212 bp, Homo sapiens
gaggagcctgagccgagcggtactccgcagcatcacgtgccagggtggggggctataaaatacccgagccggggcgccgggcgggggacgtgaggaccagccctctccggggacccctttgttcccagcccagacgccaacacctctgcgtccccaagggcttgactgcccgtgtctgcgcggctcccagggcagagcttagaacactagaggagaggggtcgccgcgaactgccggggcttccagccacccacccctctcgacatgtcgcgctccttctatgtcgactcgctcatcatcaaggacacctcacggcctgcgccctcgctgcctgaaccgcaccccgggccggatttcttcatcccgcttggcatgccgcccccattggtgatgtccgtgtccggccccggctgcccgtcccgcaagagcggcgcgttctgcgtgtgccctctctgcgtcacttcgcacctgcactcctctcgggggtctgtgggcgccggcagcgggggcgcaggggccggggttaccggggccggaggcagtggggtggcaggggccgcaggggcactgcctctgcttaagagccagttctcttcggctcctggggacgcgcagttttgcccgcgggtgaaccatgcgcatcatcaccaccacccgccgcagcaccaccatcaccatcatcagccccagcagcctggctcggccgcggcggcggcagcagcagcagcggcggcggcggccgcggcggccttggggcacccgcagcaccacgcacctgtctgcaccgccaccacctacaacgtggcggacccgcggagattccactgcctcaccatgggaggctctgacgccagccaggtacccaatggcaagaggatgaggacggcgttcactagcacgcaactcctggagctggagagagaattctcttccaacatgtacctgtctcgactccggaggattgaaatcgccacttacctgaacctgtcggagaagcaggtgaaaatctggtttcagaaccgccgagtgaagcacaagaaggaggggaagggcacgcagaggaacagtcacgcgggctgcaagtgcgtcgggagccaggtgcactacgcgcgctccgaggatgaggactccctgtcgccggcctcagccaacgatgacaaggagatttcccccttatgagggagggcctcctccctcacatcccccgctcct

SEQ ID NO: 341 - DNA, 1736 bp, Homo sapiens
cggcggcggcggcggcggtggtggctcgcgcagcttgttggctcgctatataaaggagagaagcgggcggaccggacggctggagctgcagccggtggcggcagcggcggcgcagggagcggtgaccggtggtggtttccctccttggcgcggggtggggagcgggcaacgccccccggacccctgaagggtcgtggctttttttttttttttaaggcgattctcgaggttttcagctgcgggaggagtgcccccctcctcctcctctctccgctctcccctactccttcaggattgattttgtttaaaattttttccccaatcttgcggtgatttgggtcaccctccgggtgttatagtttttttttttttggttttgtttttatcttgttttcttggggttgccccctcttgtttgtgttgtgtgtggaaatggcgaactcggcaaatacaaacaccgtgcctaaattatacagatctgtgattgaagatgtcattaatgatgtgagagacatctttctggatgatggagtggatgaacaagtactgatggaactaaaaactttatgggaaaacaaactaatgcagtccagggcagtagatggatttcattcagaagagcagcagcttctactgcaagttcaacagcagcatcaaccccagcagcagcagcatcaccaccatcaccatcatcagcaagctcagcctcagcagacagtacctcagcaagcgcagacccagcaggttcttattcctgcatcacagcaagccacagcaccacaagttattgttccagattctaagttgatacagcatatgaatgcatcaaacatgagtgctgctgctacagctgctaccttagcactccctgcaggtgtgactcctgttcagcagatattaacaaattcaggccagcttcttcaggtggtcagagcagccaatggtgcccaatatatctttcagcctcagcagtcagtggttctacaacaacaggttataccacaaatgcagcctggtggagtacaagctcctgttatacagcaggtgctggctcctcttcctggagggatttcaccacagacaggtgtcatcatccagcctcagcaaatcttatttacaggaaataagactcaagttatacctacgacagtggcagcacctacaccagcccaagcacagataactgcaactggccagcagcaaccgcaggcccagcctgctcaaacacaagctccattggtcttacaagttgatggaactggggatacatcatctgaagaagatgaagatgaagaagaagactatgatgatgatgaggaggaagacaaagagaaagatggagctgaagatgggcaggtggaagaagagcccctcaatagtgaagatgatgtgagtgatgaggaaggacaggaactctttgacacagaaaatgttgttgtatgccaatatgataagatacacagaagtaaaaacaaatggaaatttcatctcaaggatggcattatgaatcttaatggaagagattatatattttccaaagccattggagatgcagaatggtgaagagttgctttttttcttttataaataaaagaaacttaaaaaaaatgtaaagcggacagtttgaaacttggggcatatgccaaccaaaacttcgtttctgcatgtcagaaaagtgcagtagaagcaaagctactggaacaaagatagaccttgacaacatagacactacttac

SEQ ID NO: 342 - DNA, 1582 bp, Homo sapiens
gagcacttccgggtcgtcagctcagttctgcggtttctgcggcggctggagaggtggtcggagaagtaggaacctcctgccgggctcgtggcggcttctgtccgctccgcggagggaagcgccttccccacaggacatcaatgcaagcttgaataagaaaaacaaattcttcctcctaagccatggcatatcagttatacagaaatactactttgggaaacagtcttcaggagagcctagatgagctcatacagtctcaacagatcaccccccaacttgcccttcaagttctacttcagtttgataaggctataaatgcagcactggctcagagggtcaggaacagagtcaatttcaggggctctctaaatacgtacagattctgcgataatgtgtggacttttgtactgaatgatgttgaattcagagaggtgacagaacttattaaagtggataaagtgaaaattgtagcctgtgatggtaaaaatactggctccaatactacagaatgaatagaaaaaatatgacttttttacaccatcttctgttattcattgcttttgaagagaagcatagaagagactttttatttattctagaattgcagaaatgactacactgtgctataccagagaattccagtagaaagaaacttgtaactctgtagcctcttacatcacctttattatacagcatgaaaaaccataacttttttttaaggacaaaagttgttgccttcctaagaaccttctttaataaactcattttaaaactctgagtaataactggtgaagctattaaggtagcaatatgaagatattagataatgcattttcccatttcctttgcaaggaacatgatgccctttcagaatgcttatttcaataaagtcatgttttgtcagttgtaactttacctgatgaaagcatcagcaggggcaaaaccaaactctggatggaattttttaagaaaatcccttgctttttaaaatacaaaaccaaagttaatcattggtataaaaaaacccaagtacaacttgattaggaaaagttagacaatcatagcaaaaacaaaaccaaaaaactttccttcttagaccaggtaacatgaggaagggggaaaaaaacccaaacaaaatagtccccccacatgacaggtgtcttcagcttgccatattgatccaaagttcatacattttatcatgtacaagatacattagacttacaataaagtctaattattagacttttatgtcagtggattgtgcttgcagaaatacagaagtaacatactgaccctaggtgaggagtttcttacatggttaactggattgacccaattggagtaaaagatttttgctgttacctcgatgctcctgcagttgttacctcagcatgccactgtagtccttgactctcacattaaaactaactttggctaggtactggtggctcacacctgtaagtaatcccagtactttaggaggctgagactggaggattacttgagtccaggagttggagaccagcctggccaatatagactgtccctacaaagaaaataaaattgtttcatcttccaa

SEQ ID NO: 343 - DNA, 1651 bp, Homo sapiens
acgactgcgtgggtgagtcgtctataaaaactcatctctgcgcgtctcttcgccacattcgcttcctgctttcggtgtgtctgttgtgtcttgttgcgggcaccgcagtcgccgtgaagatggcgtctaccagccgtttggatgctcttccaagagtcacatgtccaaaccatccagatgcgattttagtggaggactacagagccggtgatatgatctgtcctgaatgtggcttggttgtaggtgaccgggttattgatgtgggatctgaatggcgaactttcagcaatgacaaagcaacaaaagatccatctcgagttggagattctcagaatcctcttctgagtgatggagatttgtctaccatgattggcaagggcacaggagctgcaagttttgacgaatttggcaattctaagtaccagaatcggagaacaatgagcagttctgatcgggcaatgatgaatgcattcaaagaaatcactaccatggcagacagaatcaatctacctcgaaatatagttgatcgaacaaataatttattcaagcaagtatatgaacagaagagcctgaagggaagagctaatgatgctatagcttctgcttgtctctatattgcctgtagacaagaaggggttcctaggacatttaaagaaatatgtgccgtatcacgaatttctaagaaagaaattggtcggtgttttaaacttattttgaaagcgctagaaaccagtgtggatttgattacaactggggacttcatgtccaggttctgttccaacctttgtcttcctaaacaagtacagatggcagctacacatatagcccgtaaagctgtggaattggacttggttcctgggaggagccccatctctgtggcagcggcagctatttacatggcctcacaggcatcagctgaaaagaggacccaaaaagaaattggagatattgctggtgttgctgatgttacaatcagacagtcctatagactgatctatcctcgagccccagatctgtttcctacagacttcaaatttgacaccccagtggacaaactaccacagctataaattgaggcagctaacgtcaaattcttgaatacaaaactttgcctgttgtacatagcctatacaaaatgctgggttgagcctttcatgaggaaaaacaaaagacatggtacgcattccagggctgaatactattgcttggcattctgtatgtatatactagtgaaacatatttaatgatttaaatttcttatcaaatttcttttgtagcaatctaggaaactgtattttggaagatatttgaaattatgtaattcttgaataaaacatttttcaaaactcaagtttttgttatatgttacatgtaacttatgatacataattacaaataatgcaaatcattgcagctaataaagctgatagactttatttccattacttatatatacatagttttttattttaataaatttatggaaagagcaaaagcttttgagaaccattgttaacatcaacatcatagtttccagtttgaaaggatgtgtatgtgagatttattatgtatattattaaacaagaagtgatgagcttgggccttgaaaggcaccagcttgagagacattaaaatgttctaagtaaaaaaa

SEQ ID NO: 344 - DNA, 3033 bp, Homo sapiens
gtcgcgcaaggggcgtggttcatttaagccggtagttgaagcgctgggggcagctgtagtgggagtgttccaggattcgccttgtatatttaaagttggagttcgttgctaaagatggcagacccagatgtcctcactgaagttccagcagcattgaagcggttagccaagtatgtgatccggggattttatggcattgagcatgccttggccttggacatcttgatcaggaactcctgtgtgaaagaggaggatatgctggagctgctcaagtttgatcggaagcaacttcgatcagttttgaataatttaaagggagacaagtttatcaaatgcagaatgagggtagagactgctgcagacgggaaaaccactcgccataactactacttcatcaattatcgtactcttgttaatgtggtaaaatataaactggaccacatgagaagaagaattgagaccgatgagagagattcgaccaaccgggcttccttcaaatgtcctgtctgtagtagtactttcacagacttagaagctaatcagctctttgatcctatgacaggaactttccgctgtactttttgccatacagaggtagaagaggatgaatcagcaatgcccaaaaaagatgcacgcacacttttggcaaggtttaatgaacaaattgagcccatttatgcattgcttcgggagacagaggatgtgaacttggcctatgaaatacttgagccagaacccacagaaatcccagccctgaaacagagcaaggaccatgcagcaactactgctggagctgctagcctagcaggtgggcaccaccgggaagcatgggccaccaaaggtccttcctatgaagacttatacactcagaatgttgtcattaacatggatgaccaagaagatcttcatcgagcctcactggaagggaaatctgccaaagagaggcctatttggttgagagaaagcactgtccaaggggcatatggttctgaagatatgaaagaagggggcatagatatggacgcatttcaggagcgtgaggaaggccatgctgggcctgatgacaacgaagaggtcatgcgagcactgctcattcacgagaaaaagacttcctctgccatggctggttcagtgggggcagctgctccagtgaccgctgccaatggcagtgactcagaaagcgagaccagtgagtcagatgatgattctccaccccgtccggcagctgtggctgtgcataaacgagaagaggatgaagaggaagatgacgagtttgaagaagtagcagatgaccccattgtcatggtggctggccgtccgttctcctacagtgaagtgagccaacggccagagctagtggcccagatgacaccagaagaaaaggaagcatatatagcaatgggacaacgcatgtttgaggacctctttgagtgagctttccctaattctttctcctttctctaatgctcagttcaaaaaggaatgtctcatctttgaagaaaagtatttaagtggctttctgcccctcttgatgtaagcaactgtccatccttgtgcaaagattgatggtagagagtttgacttttatgccagaaactttcccagcaaggtagggtgctgagaatcctacccttccttgctgtcactacagtattaatattttactgtattttcttttcttttttttttttttttggagatgaagtctcactcttgtaccccaggctggagtgcaatggcgtgatctcggctcactgcaacctctgcctcctgggttcaagcgattctcctgcctcagcctcccgagtagctgggattacaggtgcctgccaccatgcctggctaatttttgtatttttagtagaggcagggtttcaccatgttagccaggatgatctcgatctcctgacctcatgatccacccgcctcggcctcccaaagtgctgtattttcttatctgatttttttcttgccttattaagacataattttctcccttctgaaatgagtgagggaagttcataaggtaaatccttcccatccatctgtttactacaataggttacaataattcactgatcacatccattttatctgttctagccaggcattccaaacaatttcttatactgctgcccaccaaagcagcttgccaacagtcaaatcactgattgggggaaaaaatcctgaaattttgcttagaatttgagcatttcctcaaaattgagatggatcaatatgtaaggggaggtgggagcgtgtgtggaagggggagagatatacttgagtcttatgattaatgtctaaaccagaatttgtgtctttagaactgaccagactggtagattttattgtattgcttaatgtcttttggtttggatttaggatgatagaaaacagaagtataattggtaaacccttaggaagaaattagaaaaacatggacgtaagacaagaagtctctgtgaagggttgaagagtgacaagcattggtaacagtgccttagaactgtgtcagttagtctgatttggaaatcctttatgtaaagctgagactggtcctggttttgttccctttgggtacagacctcttgtcagtgctataaattgtttaatgaggccattccagcagaaatcaacagaataattgattactcttctctctctctgtcactctccctctttctaaacatcattgaaggctgtctctcttttaatttttgtcagacacagtattttagggtgcatccagtataccattgagcattgtaacctcaggaaacagtttattttgggttctgatatgtagcatggtattttccctaaggcagaactttaaaaataaagaactttcacacaagggtctgtaacaattgtatatcttacaatatttttccttgcattgtaatttttaagtatttatcattttatagtacacatgtaaagaatatatgagccttgtatggagtgatgtttcatttacctgggttgtgttaatgactgaatgttgacaataaatctgttttatactga

SEQ ID NO: 345 - DNA, 1560 bp, Homo sapiens
cccgatcgggaagtggcgggcggagtcccgggtccagtcgccgcctcagctaccgccgctgccgccgccgccgccgccaccgccagtggtgagaccccgacctggcgggtcagcgctgggcgtgcgtgcgggcaggcgggggcgctgacgagaagcaggaagagggtgcagtgccggcgtgggcggccggccgaggcggaggcgcaggaagggggcggcgagtcgtgcgaggctgcccttctcactcagcattatggatccaagcctgttgagagaaagggagctgttcaaaaaacgagctctttctactcctgtagtagaaaaacgttcagcatcttctgagtcatcatcatcatcgtcaaagaagaagaaaacaaaggtagaacatggaggatcgtcaggctctaaacaaaattctgatcatagcaatggatcatttaacttgaaagctttgtcaggaagctctggatataagtttggtgttcttgctaagattgtgaattacatgaagacacggcatcagcgaggagatacgcatcctctaaccttagatgaaattttggatgaaacacaacatttagatattggactcaagcagaaacaatggctaatgactgaggctttagtcaacaatcccaaaattgaagtaatagatgggaagtatgctttcaagcccaagtacaacgtgagagataagaaggccctacttaggctcttagatcagcatgaccagcgaggattaggaggaattcttttagaagacatagaagaagcactgcccaattcccagaaagctgtcaaggctttgggggaccagatactatttgtaaatcgtcccgataagaagaaaatacttttcttcaatgataagagctgtcagttttctgtggatgaagaatttcagaaactgtggaggagtgtcactgtagattccatggacgaggagaaaattgaagaatatctgaagcgacagggtatttcttccatgcaggaatctggaccaaagaaagtggcccctattcagagaaggaaaaagcctgcttcacagaaaaagcgacgctttaagactcataacgaacacttggctggagtgctgaaggattactctgacattacttccagcaaatagggaacagttttgccctggaacagagttacagatacacaatcaagagtgttcttgctgatgctcggggtctgaagactgtcttcctatctgcttcttgcggctgaggagaggagcagttcagtttacaaaacaagtgcaaattaccaaactcaaagcttatttgagtagaatgggctcatgggcaatgtgatgttccctgttaaccttctgttactccctgggagaaaggcgctgagcgtggcatgcaggtgtctttgctgtgtttttctccacttctaaatggttcctggttcctttcttcctcgtttgttactttagagcaagtttgcccatagtcttgaatgcaatatttgtttattccaaaagaacatatttataataaaatcactgtagaaggatttttaagaaaaaaaaaaaaaaaaaaaaaaaaa

SEQ ID NO: 346 - DNA, 2551 bp, Homo sapiens
actgcgcactgaggtggccacagtcgctaagaaggttgccatcgcgacgcggctgctcgagggtttcgcttccgggttaggcggccgcagaagcgtagaccgagtagcttgagcgcctcttccggttaccttttcccagcgccagaggcgcctagggttggggtcctcgctcaggcacagagacccgacaccgagcggcggcttccccgggatcgagggacgcgcacgccagaggagacgaaaggaacccgggtcggaccagatcggaaccactgaccattgcccatggcggccctaggccctagcagccagaatgtcactgaatacgtcgttcgagttcctaagaatacaaccaaaaaatataacatcatggcttttaatgcagccgacaaagtcaactttgctacgtggaatcaggctcggctggagcgggacttgagcaacaagaaaatctaccaagaggaggagatgcccgaatcgggcgcgggcagtgagttcaaccgcaagcttcgggaggaggctcggaggaagaagtacggcatcgtcctcaaggagttccggcccgaggaccagccctggctgctccgggtcaacggcaaatcaggcaggaagttcaagggcatcaagaagggaggcgtaacagagaacacgtcctactacatcttcacccagtgccccgacggggccttcgaggccttccccgtgcacaactggtacaatttcacaccgctggcccggcatcgcacgctcactgccgaggaggccgaggaggagtgggagaggaggaacaaggtgctgaaccacttcagcatcatgcagcagcggcggctcaaggatcaggaccaggacgaggatgaggaggagaaggagaaacgtggccgcaggaaggcgagcgagctgcgcatccacgacctggaggacgacctggagatgtcgtccgatgccagtgatgccagtggtgaggaggggggcagagtccccaaggccaagaagaaggcgccgctggccaagggcggcaggaaaaagaagaagaagaagggttcagacgacgaggccttcgaggacagcgatgatggggacttcgagggccaagaggtggactacatgtcagacggctccagtagctcccaagaagagcctgagagcaaggccaaggcgccgcagcaggaggaggggcccaagggtgtcgatgagcagagcgacagtagtgaggagagtgaggaggagaagccgcctgaggaggacaaggaggaggaggaggagaagaaggcacccaccccgcaggagaagaagcgcaggaaagacagcagcgaggagtcggacagctcagaggagagcgacattgacagcgaggcctcctcagccctcttcatggcgaagaagaagacgccacccaagagagagcggaagccgtcgggagggagctcaaggggcaacagccgcccaggcacgcccagcgcagagggtggcagcacctcctccaccctgcgggcggctgccagcaaactcgagcaagggaagcgggtgagcgagatgcctgcagccaagcggttgcggctggacacgggaccccagagcctgtctgggaagtcgacaccccagccaccatcaggcaagacaacacccaacagcggcgacgtgcaggtgactgaggatgccgtgcgccgctacctgacacggaagcccatgaccactaaggacctgctgaaaaagttccagaccaagaagacagggctgagcagcgagcagacagtgaacgtgttggcccagatcctcaagcgactcaaccccgagcgcaagatgatcaacgacaaaatgcacttctccctcaaggagtgaggcttggtccaatacatggctctgccccccagaacttaaggctctcactgccccttcgccatcctagagtgaggctctgtccaatacatggctctgccctccagaacttcaggctctcagtgacccttcgacatcctgcttgctccctgactcccagggccccgtagttagcaattctggaaaagttaagccatctcctcctctggcccttccttctggaatcttcagatgcctgttaggccttcttattgtcctcctcctcctggctcggcctccctcacactgaccaagggcctgtgctgcccactgggtaacttctacagttctcccttccacttccctaagtctctcttcagctgtgacttatccaccacatagcccagtaagtcttcagttttggctgggcatgatggtgagcgcctgcagtcccagctacttgggaggctaagcccagttcaaggctgcagtgaactatgatggtgccactgcattccagcctgggtgacagaatgaaatcctggcacaaaaaaaaaaaaaaagtagccaggcatggtggcgggagcctgttgtcccagctgttccgtaggctgaggcacgagattcacttgaacctgggaggtggaggttgctgtgagctgacaccacgccactgcactccagcctgggtgacagtgagactctgtctcaataaataaaaaataataataaattg

SEQ ID NO: 347 - DNA, 1469 bp, Homo sapiens
gtgttcctcttttcctcggttcccagtgttctggcaggtaaggaacgccggctcttcgcctctcagcgcggcttgtcctttgttccggacgcccgctcctcagccctgcggctcctggggtcgctgctgcatcccgcacgcctccaccggctgcagacccatggccgagcgcggggaactcgacttgaccggcgccaaacagaacacaggagtgtggctagtcaaggttcctaaatatttgtcacagcaatgggctaaagcctctggaagaggtgaagttgggaaactgcggattgccaagactcaaggaaggactgaggtgtcatttactttgaatgaggatcttgcaaatattcatgatattggtggaaaaccagcttcagtcagtgctcctagagaacatccatttgtcttgcaaagtgttggaggacagacattaacagtatttactgagagctcatcagataagctgtcattggaaggaatagtggtacaaagagctgaatgccgaccagctgccagtgaaaactacatgcgattaaaaagattgcaaatagaagagtcttccaaaccagtgaggctatcacaacagctggacaaagttgtaacaaccaattacaaacctgttgctaatcatcaatacaatatcgaatatgaaaggaaaaagaaagaagacggaaagcgagctcgagctgataaacaacatgttttagacatgctattttcagcctttgagaaacatcaatactataatcttaaggacttggtggacatcacaaagcaacctgtggtgtacctgaaggaaatcttaaaagaaattggtgttcagaatgtaaaagggatccacaaaaacacatgggagctgaagccagagtacagacactatcaaggagaagaaaagagtgactaagaagactcctagccagcatgctagtgaaacgactagcagcgatgctatgcaaaaggcgctgatactggaaggcttgaacaccgtatgttaataggggttaagtgacagtactttgatttctctcggtaaattttttaaacctgtaattcttgtaaagtttcttaactgtttttttgaggagaaagaacagatttatttatagacttaacttgtattaaaccagattattcacagtaggaataggggttggaggattaagagggtttttcttaaatattagcttttaatgtgtacaattaggaaatttttttaagtgaggactctctacccttgccgtatctaaggagctgaggtaatacagatccaaggagaattgtatagcaagaaaaaaacagtcaactacagaaactcttaaaaggaataaaaacccaaagttccttattttgaaattgtcaaagaacaaagcggtgtttttcttttaaacaggtgatcacgtttcgtgttcatactcaacgttaataaaaggagagagtttgtagtgaaaaaaaaaaaaaaaaaa

SEQ ID NO: 348 - DNA, 3308 bp, Homo sapiens
ctccttccgcgtggtccctccccctcaggccgcggtcgcgattacgctctctacggcctgcgaccgcagggccgttgcgggctggagacacggcgccgactggaaccggaggagctctaggccaaatggttgggccagccaggatcccaggacccttcgccgctcgagaccggagagaggaaacgaaacaggcgggaacccgtgggggagggagggaactagcggaaggtgtcatggcggccgcgctcttgagtcacgtgcccagggcccgccttgctacttccggtcacgtgccctcagactcctcgcagccagcgatggaggcgagaccccctagtaacagaggcggtggctactgctgcggccactgggtttcggcctcttcccagcagcggctctaagaagcgcagcggaactcgaccggatccaacccagttagttacttcctgtctagagttgtagcttccacctgcaccttctagccaccatggcaacctcatctgaagaagttttgctgattgtaaagaaagtgcgtcaaaagaagcaggatggagctctgtacctcatggcagaaagaattgcttgggcacctgaaggcaaagatagatttacaatcagccatatgtatgcagatattaaatgccagaaaattagtccagaaggaaaagctaaaattcagcttcagctggtcctacatgcaggggacacaactaacttccatttttccaatgaaagcacagcagtgaaagagcgagatgcagtaaaagaccttcttcagcagctgctgcccaaattcaagaggaaagcaaataaagaactggaagagaagaacagaatgctgcaagaagatcctgttttgtttcagctttataaagaccttgttgtgagtcaagtgatcagtgctgaggaattctgggccaatcgtttaaatgtgaatgcaacagatagttcttccacatccaatcataagcaggatgttggcatttctgctgcatttctggctgatgtccggccccaaactgatggctgtaacggtctaagatataatttaacttctgatatcattgagtccatatttaggacctatccagcagtaaaaatgaaatatgcagaaaatgttccccacaacatgacagagaaggaattctggacacgttttttccagtcccattattttcacagggatcggctgaatacagggtcaaaggatctctttgcagaatgtgccaaaatagatgaaaaaggcctaaaaacaatggtttcattaggagtgaaaaacccactactagatttaacagctttggaagataaaccattagatgagggctatggcatttcctctgtgccatctgcttccaattctaaatccataaaagagaatagtaatgctgccatcatcaagagatttaaccatcacagtgccatggtcctggcagctggactcagaaaacaagaagcacaaaatgaacaaactagtgagcccagcaacatggatggaaattccggagatgcagactgctttcagccagcagtcaaaagggcgaaattacaagagtccattgaatatgaagacttggggaaaaataattctgtaaaaacgattgcactaaacctcaagaagtcagataggtattatcatggtccaactccaatccagtcactacagtatgcaacaagtcaggacattattaattcttttcaaagtattagacaagaaatggaagcttatacacccaagttaactcaggttctctcaagtagtgctgccagtagtaccatcacagcactgtcacctggaggggcacttatgcagggaggaacacagcaagccataaaccagatggtgccaaatgatattcaatctgaattgaaacacttatatgtagctgttggagaacttctacgacatttctggtcctgctttcctgttaatacgccattcctagaagaaaaggtagtgaaaatgaaaagtaatttggaacgattccaagttacgaagctctgtccattccaagaaaagattcggagacagtatttaagcacaaatttggtaagtcacatagaagagatgctccagacagcctacaacaagctccacacatggcagtcacggcgtctgatgaagaaaacgtgaggtggccatgatgcttacaggttttgtgagattgagagaactatgacctgcagcaactctggaaacctggcctgacagacaagcagatgacctcacaggagtgataagaaacatctgctccacgccaactcccagagctgatgctattgtacttgcacattggagactgaaaggaaagaagggactaaatgctggggaggtaaattaagacagaaccaaatgagctaagttgcaaatatatatatatacacacacacacatatatgtacatgtgtatgtacatatatattttaaaagactgtttactgcagttgctcaggaactgcttttgattcacattaagctgctttcagaaattaaaaaaacactttttaaagggtgcattgataaaatctgaggttttttggttgtcgtttttttctgtgtacatttttttcctaagtttatggcacagggtagaccttaagtattcctcctccatccttcattcttcaccctccattggatcctcaagttttaatgaattccaattataccttacatcagcaagttaaaaaaagtactttaaaataaagcaaagggagactgttgctcaaccatcaggaaacagttgtcagaagacatcattggttctgtgtttcctacggaaataagaaacgataaatattgcactgaatgtttgtggtttggagtccctgaataataaagagggaatatatttgcagaaagtcgcatagggttttttaatgcagaattttgtcagaagacaatggcgctgcatgtttttctttgagtgcaaatgtacattgctaagatttttttaagatggcatgtgctttgaaaagaagatattgcatttttaagagtttaaaaatcttatgagtgagaaatattaaaaaaatcttattttcacctctttagaagaaataaaagatgtttctcctatctccttttctctagtatttgactgttactgtccttggcgaatcgataatcattgcatagtgactgaaaagcctaagtgcaaaaaaaaaaaaaaaagatgttcttgtttctgaacttcgtgccatattttgttcctgatgggatcaacttaatgtttaagactttagatgtcttgtattaaaaattacacaaaaaaagtaaaactttttatacttacccttttaactct

SEQ ID NO: 349 - DNA, 3078 bp, Homo sapiens
aggaggctgagtcctggccgcgggccggggccggggcgccgctggcaggagcgcttggggatcctccaaggcgaccatggccttgctgggtaagcgctgtgacgtccccaccaacggctgcggacccgaccgctggaactccgcgttcacccgcaaagacgagatcatcaccagcctcgtgtctgccttagactccatgtgctcagcgctgtccaaactgaacgccgaggtggcctgtgtcgccgtgcacgatgagagcgcctttgtggtgggcacagagaaggggagaatgttcctgaatgcccggaaggagctacagtcagacttcctcaggttctgccgagggcccccgtggaaggatccggaggcagagcaccccaagaaggtgcagcggggcgagggtggaggccgtagcctccctcggtcctccctggaacatggctcagatgtgtaccttctgcggaagatggtagaggaggtgtttgatgttctttatagcgaggccctgggaagggccagtgtggtgccactgccctatgagaggctgctcagggagccagggctgctggccgtgcaggggctgcccgaaggcctggccttccgaaggccagccgagtatgaccccaaggccctcatggccatcctggaacacagccaccgcatccgcttcaagctcaagaggccacttgaggatggcgggcgggactcgaaggccctggtggagctgaacggtgtctccctgattcccaaggggtcacgggactgtggcctgcatggccaggcccccaaggtgccaccccaggacctgcccccaaccgccacctcctcctccatggccagcttcctgtacagcacggcgctccccaaccacgccatccgagagctcaagcaggaagcaccttcctgcccccttgcccccagcgacctgggcctgagtcggcccatgccagagcccaaggccaccggtgcccaagacttctccgactgttgtggacagaagcccactgggcctggtgggcctctcatccagaacgtccatgcctccaagcgcattctcttctccatcgtccatgacaagtcagagaagtgggacgccttcataaaggaaaccgaggacatcaacacgctccgggagtgtgtgcagatcctgtttaacagcagatatgcggaagccctgggcctggaccacatggtccccgtgccctaccggaagattgcctgtgacccggaggctgtggagatcgtgggcatcccggacaagatccccttcaagcgcccctgcacttatggagtccccaagctgaagcggatcctggaggagcgccatagtatccacttcatcattaagaggatgtttgatgagcgaattttcacagggaacaagtttaccaaagacaccacgaagctggagccagccagcccgccagaggacacctctgcagaggtctctagggccaccgtccttgaccttgctgggaatgctcggtcagacaagggcagcatgtctgaagactgtgggccaggaacctccggggagctgggcgggctgaggccgatcaaaattgagccagaggatctggacatcattcaggtcaccgtcccagacccctcgccaacctctgaggaaatgacagactcgatgcctgggcacctgccatcggaggattctggttatgggatggagatgctgacagacaaaggtctgagtgaggacgcgcggcccgaggagaggcccgtggaggacagccacggtgacgtgatccggcccctgcggaagcaggtggagctgctcttcaacacacgatacgccaaggccattggcatctcggagcccgtcaaggtgccgtactccaagtttctgatgcacccggaggagctgtttgtggtgggactgcctgaaggcatctccctccgcaggcccaactgcttcgggatcgccaagctccggaagattctggaggccagcaacagcatccagtttgtcatcaagaggcccgagctgctcactgagggagtcaaagagcccatcgtggatagtcaagagagggattccggggaccctctggtggacgagagcctgaagagacagggctttcaagaaaattatgacgcgaggctctcacggatcgacatcgccaacacactaagggagcaggtccaggaccttttcaataagaaatacggggaagccttgggcatcaagtacccggtccaggtcccctacaagcggatcaagagtaaccccggctccgtgatcatcgaggggctgcccccaggaatcccgttccgaaagccctgtaccttcggctcccagaacctggagaggattcttgctgtggctgacaagatcaagttcacagtcaccaggcctttccaaggactcatcccaaagcctgatgaagatgacgccaacagactcggggagaaggtgatcctgcgggagcaggtgaaggaactcttcaacgagaaatacggtgaggccctgggcctgaaccggccggtgctggtcccttataaactaatccgggacagcccagacgccgtggaggtcacgggtctgcctgatgacatccccttccggaaccccaacacgtacgacatccaccggctggagaagatcctgaaggcccgagagcatgtccgcatggtcatcattaaccagctccaaccctttgcagaaatctgcaatgatgccaaggtgccagccaaagacagcagcattcccaagcgcaagagaaagcgggtctcggaaggaaattccgtctcctcttcctcctcgtcttcctcttcctcgtcctctaacccggattcagtggcatcggccaaccagatctcactcgtgcaatggccaatgtacatggtggactatgccggcctgaacgtgcagctcccgggacctcttaattactagacctcagtactgaatcaggacctcactcagaaagactaaaggaaatgtaatttatgtacaaaatgtatattcggatatgtatcgatgccttttagtttttccaatgatttttacactatattcctgccaccaaggcctttttaaataagtaaaaaaaaaaaaaaaaa

SEQ ID NO: 350 - DNA, 3551 bp, Homo sapiens
gaaagaaagagaaaaaggagggcgagtggcgagcaggggcctcggccgccacccacacgccccgaagcgtgctcgtcccccgcgcggggctcccggccgccgccctcggccatcggctgctccccggtggcccaggcctcggactccgcggccggcccggcgcggcccagcgccctcagggatcatggcccaggtagcagtgtccaccctgcctgttgaagaagagtcctcctcagagaccaggatggtggtgacattcctcgtgtctgccctcgaatccatgtgtaaagaactggccaagtccaaggcagaagtggcctgcatcgcagtgtacgaaacagacgtgtttgtcgtcggaaccgagagaggatgcgcttttgttaatgccaggacggattttcagaaagattttgcaaaatactgcgttgcagagggactgtgtgaggtgaaacctccctgccctgtgaacgggatgcaggtccactcgggcgaaacggaaatactcaggaaggcagtggaggactatttctgcttttgttatggtaaagccttagggacaacagtgatggtgcctgttccctatgagaagatgctgcgagaccagtcggctgtggtagtgcaggggcttccggaaggcgttgcctttcaacaccctgagaattacgaccttgcaaccctgaaatggattttggagaacaaagcagggatttcattcatcataaatagacccttcctaggaccagagagtcagctgggtggccctgggatggtaacagatgcggagagatccatagtatcaccaagtgaaagctgcggccccatcaatgtgaaaactgaacccatggaagattctggcatttcactgaaagcagaagctgtctcagtcaagaaagaatcagaagatcctaattactatcaatataatatgcaaggaagccacccttcttccacaagcaatgaagtaatagaaatggaattaccaatggaagattccactccgctggtcccttcagaagaaccaaatgaggaccctgaagccgaggtgaaaatcgaaggaaacacaaattcatccagtgttacaaattctgcagcaggtgttgaagatcttaacatcgttcaagtgactgttccagataatgagaaggaaagattatcaagcattgaaaagattaaacagctaagagaacaagttaatgacctctttagccgaaaatttggtgaagcaattggcgtggatttccctgtgaaagttccctacaggaagatcacattcaaccctggctgtgtggtgattgatggcatgcccccgggggtggtattcaaggcccccggctatctggaaatcagttccatgaggaggatcttggaggcagctgagtttatcaaattcacagtcatcaggccgcttccagggcttgagctcagtaatgtgggaaaacgcaagatagaccaggagggccgtgtgtttcaagaaaagtgggagagagcgtatttcttcgtggaagtacagaatattccaacatgtctcatatgcaaacaaagcatgtctgtgtccaaagaatataacctaagacgccactatcaaaccaatcacagcaagcattatgaccagtatatggaaagaatgcgtgacgagaagcttcacgagctgaaaaaagggctcaggaagtatctcttaggcttgtcagacaccgagtgtcccgagcaaaaacaagtgtttgcacacccaagtccaacccagaaatcccccgtgcagcctgtagaggacctagctgggaacttatgggagaagttacgtgaaaaaatcaggtcttttgtggcatattctatcgcaatcgatgagatcacggatataaataataccacccagttggccatattcatccgtggtgtcgatgagaatttcgatgtgtccgaagaacttctggacacggtgcccatgacgggtacaaaatctggcaacgagatcttttcgcgtgttgagaagagcctgaaaaagttctgtatcgactggtcgaaattagtaagcgtggcctccactggcaccccagcgatggtggatgccaataacgggcttgtcacaaaactgaagtccagggtggcgacgttctgcaagggtgcggaactgaagtccatctgttgtataattcatccggaatcactctgtgctcagaagttgaagatggaccacgtcatggacgtggtagtgaagtccgtgaactggatatgctcccggggactgaaccacagtgagttcacaaccttgctctatgagctggacagccagtatggtagcctcctgtactacacggagattaagtggctcagtcgcgggctcgtgctaaagagatttttcgaatccttggaagaaatcgactccttcatgtcatccagagggaaacccctgcctcaactgagctccatagattggatccgagacctggccttcttggttgacatgacgatgcatctgaacgctttgaacatctctctccaaggacactcccaaatcgtcacgcagatgtatgacctgatccgggcgttcctagcaaaactgtgcctctgggagactcatttgacgaggaataatctggcccactttcccaccctgaaattggcttccagaaatgaaagcgatggcctgaactacattcccaaaatcgcggaactcaagaccgaattccagaaaaggctgtctgatttcaaactctacgaaagcgaactgactctgttcagctccccgttctccacgaagatcgacagtgtgcacgaggagctccagatggaggttatcgacctgcaatgcaacacggtcctgaagacgaaatacgacaaggtgggaataccagaattctacaagtacctctggggtagctacccgaaatacaagcaccattgcgcaaagattctttccatgttcgggagcacctacatctgcgaacagctgttctccattatgaaactgagcaaaacaaaatactgctcccagttaaaggattcccagtgggattctgtactccacatcgcaacgtgatggagagaaaactcctggcagggccctatggtgggaaaggctggagtcttctagtcccaagggattgggagatgacaaaatgaatttttttttcttttttgagatggagtcttgctctgtcgcccaggttggagtgcagtggcgtgatctcggcttactgcaacttccagctcctgggttcgaacgattctcctgcctcagcctcccgagcagctgggactacaggcgtgcgccaccatgcctggctaatttttgtattagtagagatgaggtttcaccatgttggccaggctggtctccaactcctgacctcaggtgatccacctgcctcgacctcacaaagtgctgggattacaggcatgaaccactgtgcccagctgacaaaatgagttcttaaacttttttttttttcagttttttttccactttgaatcagaaatataatctgcagtatcatacttgtttatattacattgtgtgcctcactattcattaaaaatcaagaaagttttattgt

SEQ ID NO: 351 - DNA, 1404 bp, Homo sapiens
atgcgcgatctcccggagcatgcgcagcagcggcgccgacgcggggcggtgcctggtgaccgcgcgcgctcccggaagtgtgccggcgtcgcgcgaaggttcagcagggagccgtgggccgggcgcgccggttcccggcacgtgtctcggcacgtggcagcgcgcctggccctgggcttggaggcgccggcgccctggatccgccggccgtggtcgccgagtcggtgtcgtccttgaccatcgccgacgcgttcattgcagccggcgagagctcagctccgaccccgccgcgccccgcgcttcccaggaggttcatctgctccttccctgactgcagcgccaattacagcaaagcctggaagcttgacgcgcacctgtgcaagcacacgggggagagaccatttgtttgtgactatgaagggtgtggcaaggccttcatcagggactaccatctgagccgccacattctgactcacacaggagaaaagccgtttgtttgtgcagccaatggctgtgatcaaaaattcaacacaaaatcaaacttgaagaaacattttgaacgcaaacatgaaaatcaacaaaaacaatatatatgcagttttgaagactgtaagaagacctttaagaaacatcagcagctgaaaatccatcagtgccagcataccaatgaacctctattcaagtgtacccaggaaggatgtgggaaacactttgcatcacccagcaagctgaaacgacatgccaaggcccacgagggctatgtatgtcaaaaaggatgttcctttgtggcaaaaacatggacggaacttctgaaacatgtgagagaaacccataaagaggaaatactatgtgaagtatgccggaaaacatttaaacgcaaagattaccttaagcaacacatgaaaactcatgccccagaaagggatgtatgtcgctgtccaagagaaggctgtggaagaacctatacaactgtgtttaatctccaaagccatatcctctccttccatgaggaaagccgcccttttgtgtgtgaacatgctggctgtggcaaaacatttgcaatgaaacaaagtctcactaggcatgctgttgtacatgatcctgacaagaagaaaatgaagctcaaagtcaaaaaatctcgtgaaaaacggagtttggcctctcatctcagtggatatatccctcccaaaaggaaacaagggcaaggcttatctttgtgtcaaaacggagagtcacccaactgtgtggaagacaagatgctctcgacagttgcagtacttacccttggctaagaactgcactgctttgtttaaaggactgcagaccaaggagcgagctttctctcagagcatgcttttctttattaaaattactgatgcagaacatttgattccttatcatttc

SEQ ID NO: 352 - DNA, 7124 bp, Homo sapiens
cgttgcgcatgcgccccgggcgccgccgactgaagtagcaatggacgcgctggagtcgttgttggacgaagtcgctctggaggggctcgatggcctgtgtctgccagcgctgtggagccggctggagacgcgagtgccgcccttcccgctgcctttggaaccctgcacgcaggagtttctctggcgggccctcgccacgcacccgggcatcagcttctatgaggagcctcgggagcgacccgacctacagctccaggaccggtatgaagaaattgatttggaaactggaattttggagtctaggagggacccggtggctttggaggatgtctaccccattcatatgatcttagagaataaggatggcatccagggctcatgccgctactttaaggagaggaaaaacattaccaatgacatcagaaccaagtccttgcagcctcgctgtacaatggtggaagcctttgacaggtgggggaagaaactgatcatcgttgcctcccaggccatgcggtacagggccttgataggccaggagggggatcccgacctgaagctgcccgacttctcctactgcatcctggaacggctaggccggtccaggtggcaaggggagctccagcgagaccttcacaccactgctttcaaggttgatgctgggaagctgcactatcacagaaaaattttgaacaaaaacgggctgattacaatgcagtcccatgtgatccgattacccactggagcccagcaacactcaatcctcctcctactgaaccggtttcatgtggacaggaggagcaaatacgacatcctcatggagaagctttcggtcatgctgagcacacggactaaccacatagagacgctgggaaagctgagggaagagctggggctgtgcgaaaggacgtttaagcgtctgtaccagtatatgctgaacgccgggctagccaaggtggtgtctcttcgcttgcaagagatccaccctgaatgtggaccttgtaagacaaagaaagggaccgacgtcatggttcggtgcctcaagctgctgaaggaatttaaacggaatgaccatgatgatgacgaggacgaggaggtcatctccaagacagtgcctccagtggacattgtgttcgagcgggatatgctcacacagacctacgacctcattgagcgcagaggcacgaaaggaatttcccaagctgaaatccgagtggctatgaatgtgggaaaactagaagcaagaatgctgtgccgacttcttcaaagattcaaagttgtcaagggattcatggaagacgaaggtcggcagcgaaccaccaagtacatttcctgcgtgtttgcagaggagagcgacctaagccggcagtaccaaagagagaaggcccgcagcgagctcttgaccaccgtgagcctggcgtctatgcaggaggagtcgcttctgcctgaaggcgaggacaccttcctctctgagtcggacagtgaggaggagaggagcagcagcaagcggagaggcagagggtcccagaaagacacaagagcctctgcaaacctccggcccaagacccagcctcatcactccaccccaaccaagggtgggtggaaagttgtaaacctacacccattgaaaaagcagccgccctccttcccaggagctgctgaagagagagcctgccagagccttgccagcagggacagcctcttagataccagcagcgtctcagaacccaacgtgtcctttgtctcccactgtgcggacagcaacagtggtgacatagctgtgatcgaggaggtccggatggaaaacccaaaggagagtagcagttccctgaagactgggaggcacagctcaggccaagacaaaccacacgaaacttaccgactgctgaaacgcaggaatctgatcatagaagctgtcaccaatcttcgcttaatcgagagtttattcacgattcagaagatgatcatggatcaggagaagcaggaaggcgtgtccaccaagtgctgcaagaagtccattgtccgcttggtgcggaacctgtctgaggaaggtctcttgcgattgtatcggaccactgtcattcaagatggcatcaagaagaaggtggatctggtggtgcacccgtccatggaccagaacgaccctctagtgagaagtgccatcgagcaggtccgcttccggatctccaattcaagcacagccaacagggttaaaacttcccagcctccagtgccccaaggggaggcagaagaagacagtcaaggaaaagagggcccaagtggatcaggggactctcagctgagtgcttcctctagatcagaaagtggacggatgaaaaaaagtgataataaaatgggcataaccccgcttagaaattatcaccccattgtagttcccggactggggcgttctctaggatttctgcccaaaatgcctcgcctgcgggtggtccacatgtttctgtggtacctcatctacgggcaccctgccagcaacaccgtggagaagccaagcttcatcagtgaacggagaacgataaagcaggagtcaggcagggcaggcgtccggccgtcctcctctggaagtgcctgggaggcctgctctgaagccccatctaaaggcagccaagatggtgtcacctgggaggctgaagtggagcttgccacggagacagtgtatgtcgacgatgcctcgtggatgcgctacatccccccaatcccagtccacagggacttcggctttggctgggctctcgtcagcgacatcctcctctgccttcccctctccatcttcatccagattgtgcaagtcagctacaaggtggacaacctggaggaatttctgaacgacccgctgaagaagcacacgctgatccgctttctccccaggcccattcggcagcagcttctgtacaagaggcgttacattttttcggtggtggagaaccttcagaggctgtgctacatggggctgctacagtttggtcccacggaaaagtttcaggataaagatcaggtctttatcttcttgaagaagaatgcagtcattgttgacactaccatctgcgacccacattacaacctggcccgcagcagccggcccttcgagaggcgcctctatgtcctgaactcaatgcaggatgtggaaaactactggtttgacctgcagtgcgtctgcctcaacaccccactaggcgtggtgcgctgcccgcgcgtcaggaagaacagcagcacagaccagggcagcgacgaggagggcagcctgcagaaggagcaggagagcgccatggacaagcacaacctggagcgcaagtgcgccatgctggagtacaccactggaagccgtgaggtggtggatgaaggcttgatccctggagatgggctgggtgccgcagggctcgattccagcttctacggacacctcaagcgcaactggatctggaccagctacatcatcaaccaggccaaaaaggagaacactgccgcagagaatggactcacagtgaggctccagacatttctgtccaagcgcccaatgcccctcagtgccagaggcaacagcaggttgaatatttggggggaagcaagagtaggctccgagctctgtgctggctgggaagagcagtttgaggtggaccgagagccctcgctggaccgaaaccggagagtgaggggtgggaaaagccagaagcggaagcggctgaagaaggaccctgggaagaagatcaagagaaagaagaaaggagagttcccaggagaaaaaagcaaaaggctgcgctaccatgatgaagccgaccagagtgccctgcagcggatgacgcggcttcgtgtcacctggtctatgcaggaggatgggctgcttgtgctgtgccgcattgccagcaatgtcctcaacaccaaggtgaagggcccatttgtcacctggcaggtggtacgggacattttgcatgccacgtttgaagagtctttggataaaacatctcattccgttggacgaagagctcgctacatagtcaaaaacccacaggcctatctcaactataaagtgtgcctggccgaggtgtaccaggataaagcacttgttggagatttcatgaatcgaagaggtgactatgatgacccaaaggtttgtgccaacgagtttaaagaatttgtggagaagcttaaagaaaagttcagttcagccctaaggaattctaaccttgaaatcccagacacactccaggagctgttcgccaggtaccgagttttggcaattggggatgaaaaagatcaaaccaggaaagaggatgaacttaacagcgtggatgacatccactttctggtgcttcagaacctgatccagagcacgctggccctctcagacagtcagatgaagtcctaccagtcattccagactttccgcctctatcgggagtacaaggaccacgttcttgtgaaggccttcatggagtgccagaagaggagcttggtcaaccggcgccgggtcaaccacacgctgggccccaagaagaaccgggccctccccttcgtgccaatgtcctaccagctatcccagacctactacaggatttttacgtggcgatttccaagcaccatctgcacggagtcattccagtttttggacagaatgcgggctgccggcaagttggaccagcctgatcgtttctctttcaaagaccaggataataacgagcccacaaacgacatggtggccttttcactggacggccctggaggaaattgtgtggccgtcctgaccctcttctctctgggcctcatttctgtggatgtcaggatcccggagcagatcatcgtggtagacagctcaatggtggagaatgaggtcatcaaaagcttggggaaggacggcagcctggaggatgacgaggatgaagaggatgacttggacgaaggtgtagggggcaagcgccggagcatggaggtgaaacctgcgcaagcctcccacaccaactacctgctgatgaggggctactactcccccggcatcgtcagcacccgcaacctcaaccccaacgacagcattgtggtcaactcctgccagatgaagttccagctccgctgcacccctgtgcccgcccggctcaggcccgctgccgctcctctggaagagctaacaatgggaacctcctgcctccctgatacgttcaccaagctgataaacccccaggaaaacacctgcagcttggaggagtttgtcctccagctggagctgtctgggtatagtcccgaagacctgactgctgccttggagatcttggaagccattatagccacgggttgttttgggattgacaaggaggagctgcgcagacggttctcggccttggagaaggcaggtggtgggcgcaccaggacattcgcagattgcatccaggccctcctggagcagcatcaggtgctggaggtcggtggcaacactgcgcgcctggtagccatgggctctgcctggccttggctcctgcactccgtgcggctgaaagacagagaagacgccgacatccagagagaagacccccaggccagacccctggaggggtcttccagtgaggacagcccccccgaggggcaggcacctccttctcacagcccccggggcaccaagaggcgcgccagctgggccagtgagaatggggagaccgacgccgagggcacccagatgacccctgccaagaggccagcgctccaggactcaaatttggcccccagccttgggcccggagctgaagatggggcagaagcccaggccccatctccacccccagctcttgaagacaccgctgcagcgggagcagcacaggaagaccaagagggtgtcggtgagttcagttccccaggccaagagcagctgagcggccaggcgcagcctccagagggctctgaagaccccagagggttcacagagagtttcggagctgccaacatctcccaggcagcacgggaaagggactgtgagagtgtctgcttcatcggccggccgtggcgtgtcgtggatggccacctgaaccttcctgtatgcaagggtatgatggaggccatgctgtaccacatcatgaccaggcctggcatccccgagagctccctgctgcgccactaccagggggtcctgcagcccgtcgccgtgctggagttgctccagggcctggagtccctcggctgcatccggaagcgctggctgagaaagccaaggcctgtctcgctcttctctacacccgtggtggaagaggtggaagtgccctccagcctggacgagagccccatggctttctatgagcccaccttggactgtaccctccggctgggccgtgtgttcccccacgaggtcaactggaacaagtggatccacctctaggacccctgtgggcgtcccctccctcccagccaccgcctgccacaccactcctgcctggtgctcggcagaccccactgtgccctggccttgggtctgccgagcctcctgcagcaggggacgggtgctttggccagagtcacagactgacacgtttcccactgtactggaactctggaaagaggggctccccgacctgcccatcccccaggctcttctgggccttccccttgggaactggcctcatcacactgggagttggtgcttcttgtctctgggtctccagagtttgccccgcctgtgcacacctcacattccagactctagccatctcggcaggatctcctggctccttgagtgcccaggtgccaccaagaggaagggccttgtgggatacaccttgcagaatagggatcggtgtgccccgctgcgaggggccccccatgggggctgtggcccctccgcaggcaggacatcccaacccctggctgggactgaaccacccagagcggagcggctcccttttcagccttgtgagtcacctggcaggccccagctgggctggctgtccgtgtccctcagcctggctggtgattccttgcaggccagaaatgaagagtccctgtaggttttggttttgtttgttttattttgttctttcaccttttttcctcattaaaaaaaaaaagtccctgtggagtgtacttatttattttttgattaaagggaagtaaaatgcaaaaaaaaaaaaaaaaaa

SEQ ID NO: 353 - DNA, 3935 bp, Homo sapiens
gcagcgtccctggcgccgctgaagacgccctggaactcggctggcttcggagggctcggtgactctggccgcgctgcattatggaatacagagtctaagagaaaactagcccggcaccgactccggaccaagcacacgtgtttaccttgtgcactggggtgggggcgtcagtgaagagcagctaacaagatttcgtcataagaccgcgaccagacaggcggcgccatcttcgaacttagacttccggaaggactttggcgaggcttgagtgtgcgtcagaatcccctgaagagcttgttaaaacacaaggtgctggccccatccagaattgctgattcggggcagccattttggggggtgctgatggatacctgcggggtcggctatgttgccctgggggaggccggccccgtggggaacatgactgtggtagactctcctggacaagaggtgctaaatcagcttgatgtcaagacctcttcagaaatgaccagtgcagaggcttccgtagagatgtcattacctacccctttgcctggatttgaggattctcctgatcagaggaggctccctccagagcaggaaagcctctccagactggaacagccagatctttcttcagagatgtcaaaggtctcaaagcctagggcctcaaagcctggccggaagagaggtggtaggacacgaaaaggccccaaaaggccccaacagcctaatcctccatcagccccactggttcctggtctcttagatcaatccaaccctctgtccacccccatgcctaagaaacgaggtcgaaagtccaaggcagagctgctgctgctgaagttgtcaaaagacctagatcggccagaatctcaatctccaaagaggccccctgaggactttgagaccccttctggggaacgaccccgccgaagggctgcccaagtggcacttctgtatcttcaggaactggctgaagagctctcaacagccctgcctgcccctgtgtcctgtcctgagggccccaaggtgagcagccccaccaaaccgaagaagatccggcagccagcagcctgtccaggtggagaagaggtggatggtgctccacgggatgaagacttttttctccaggttgaggctgaagatgtggaagaaagtgagggcccaagtgagagctcatctgaacctgagcctgtagtgccccgaagcaccccacgaggatctacttcagggaaacagaaaccacactgccgaggaatggctcccaatggcttaccaaatcatatcatggctcctgtttggaagtgcctccatctcaccaaggacttccgagagcagaaacattcatactgggagtttgctgagtggattcctttagcctggaagtggcacttgttatctgagcttgaggccgctccctacctgccccaggaggagaagtctccattgttttctgtacaacgtgaagggctacctgaagatggcaccctctaccgaataaacagatttagctcgatcacagcacatccagagcgctgggatgtgtccttcttcacggggggaccgctctgggctctggactggtgcccagtgccagagggggcaggagcctcgcaatatgtggctcttttctccagccctgacatgaatgagacacacccactgagccagcttcattcgggtcctgggctgctccagctctggggccttgggaccttgcagcaagaaagctgtcctggcaacagggcccactttgtctatgggattgcttgtgacaacggctgcatctgggacctcaagttctgccccagtggagcatgggaacttccaggcacccctcggaaggctcctctcctgccccggttgggtctcttggctctggcctgctcagacgggaaagtactgctattcagtctaccccatccggaggccctgctggctcagcaacccccagatgcagtgaagcctgccatatataaggtacaatgtgtggcaactctgcaggtggggtctatgcaagctacagacccctctgagtgtggtcagtgccttagcctggcctggatgcctaccaggccccaccaacacctagctgctggatattataatggcatggtggttttctggaaccttcccactaactcacccctgcagcggatacggctctctgatggctccttaaagctctaccccttccagtgtttcctagcccatgaccaggctgtgcgtacccttcaatggtgcaaagctaacagccatttccttgtctctgcggggagtgaccggaaaatcaaattctgggaccttcgacgtccttacgaacccataaactctatcaagcgcttcttgagtacagaactggcctggctgcttccctacaatggtgtcactgtggctcaggacaactgctatgcctcttatggactctgtgggattcattatattgacgctggttaccttggtttcaaggcctacttcactgctcctcgaaaaggcaccgtttggagtctttcaggatccgactggcttgggacaatagctgcaggagatatatccggggagctcattgctgctatattaccagatatggcactgaatccaataaatgtcaagcgacctgtagagcgaagatttcctatatataaagcagatctgataccgtatcaggacagtcctgaaggtccagaccattcttctgcttcatctggggtccccaaccctcctaaggctcgaacttacactgaaactgtcaaccatcactacttgctctttcaagacacagatttgggttcattccatgatctgctccgtagagaaccaatgctgcgcatgcaggagggagaggggcattctcaactctgcctggacaggctgcagctggaggctattcataaggtacgtttcagcccaaacctggactcctatggatggctggtatctggggggcagtcagggctggttcgaatccattttgtccgtggactcgcctccccactgggccaccgtatgcagcttgaaagccgagcccacttcaatgctatgttccaaccatcctcccccactagacggcctggcttctctccaaccagccatcgccttctgcccactccctagccttggcccacaccagatccttggagtgaagtcggtcaagaacaaatggcccctatgcacagagccataggaactgggggccttccctggacagtgatcatgccaggcctggacctttaggcctgcctccccaggactccttagatcccactctttctacagacttctgtgatcacagccccctgcgggcaggggggctctccctccaccaactctcaaggctcctcagcctaagactatggctcatgagaaacactcaggcctgacctaggcttgggagtcaaactgctcatattgagcatattgttaagtgggtaaagccaagtaaaggtactgggtgtttttgtgaccacttgtgaatgggtgtatggagaactgaaaagggtatctgcatgaaggctcctgtctgactattccaggatccaatattactgccttctgaaacttcctctttagggtaaccatcatgtatgcccacgagggtgatagtaattcgtgagactgaagttgcttagagtacttctttgaccaaggaataccacagacaccctaccgatagaacagtggctcagatcttacttgctcctgcttacgaagtattcccaatcactggtcatctgaccctacttgaacactcctgaacagtcatgttttttaaaatcttcctttatatcaagtcagagagtatacttctataaatttcactcatggatgttaggaaatctagtcatcttccctgtgattgccctgttaagtatttaaccatagctatcatgtgtttcccaaatcttctctagattaaatatcttcagttacttcaaaaaaaaaaaaaaaaa

SEQ ID NO: 354 - DNA, 2958 bp, Homo sapiens
tgctggccccggcgaggtagcttctggaaggcgctgctcttccggttctctgtcccggttcctggggttgcacagacagaccctgtaaacatgtcagggttcagtccggaactcatcgactacttggaagggaaaatctcctttgaggagttcgaacggcggagagaagagagaaaaacccgcgagaagaaaagtcttcaggaaaaaggcaagttatcagctgaagaaaatcccgatgactctgaagttccatcatcatcaggaattaactctaccaaatcccaagacaaagatgtcaatgaaggagaaacatcagatggagtgaggaagtcagttcacaaggtctttgcttccatgcttggagagaatgaagatgatgaggaggaagaggaagaagaggaggaggaggaggaggaggaagaaacacctgagcaacccactgcgggcgatgtatttgtattggagatggttctcaatcgtgaaaccaagaaaatgatgaaagagaaaaggcctcggagtaaacttcccagagctctgagaggtctcatgggtgaagccaacattcgttttgctcgaggagaacgtgaagaggcgatattgatgtgcatggaaatcataagacaagctcctctggcttatgagccattctctactctagccatgatatatgaggaccaaggtgacatggaaaaatcattgcagtttgagttgattgctgcgcatttaaatcccagtgacacagaagaatgggttagactggcagaaatgtctctggaacaagacaatattaagcaggctattttttgctatacaaaagctcttaaatatgaacctactaatgtccgttatctgtgggagcgatcaagcctttatgaacagatgggtgatcataaaatggccatggatggttataggcgtattttaaaccttttgtctccatctgatggcgaacgttttatgcagctggctagagatatggcaaagagttactatgaagccaatgatgttacttctgctattaacataattgatgaagctttctcaaagcaccagggcctagtctccatggaagatgttaacatagcagctgaactatatatttctaacaaacagtatgacaaagctttggagataattacagatttttctggaattgtgctggaaaaaaaaacttcagaagaaggcacctcagaagagaataaagctcctgagaatgttacctgcactatacctgatggcgtgccaatagatatcacagtgaagttgatggtctgccttgtacatctcaacattcttgaaccacttaatcctctcttgacaacactagtagaacagaatcctgaagatatgggagacctatacctagatgttgctgaagcttttctggatgttggtgaatataattctgcacttcccctcctcagtgctcttgtttgctctgaaagatacaaccttgcagtagtttggcttcgtcatgcagaatgtttaaaggccttaggctatatggagcgagctgctgaaagctatggcaaggtggttgatctggccccactccatttggatgcaaggatttcactttctacccttcagcagcagctgggccagcctgagaaagctctggaagctctggaaccaatgtatgatccagatactttagcacaggatgcaaatgctgcacagcaggaactgaagttattgcttcatcgttctactctgttgttttcacaaggcaaaatgtatggttatgtggataccttacttactatgttagccatgcttttaaaggtagcaatgaatcgagcccaagtttgtttgatatccagttccaagtctggagagaggcatctttatcttattaaagtatcgagagacaaaatatcagacagcaatgaccaagagtcagcaaattgtgatgcaaaagcaatatttgctgtgctcacaagcgtcttgacaaaggatgactggtggaatcttctgttgaaggccatatactccttatgtgacctatcccgatttcaagaggctgagttgcttgtagattcctcattggaatattactcattttatgatgacaggcaaaaacgcaaagaactagaatactttggtctgtctgctgcaattctggacaaaaatttcagaaaggcatacaactatatcaggataatggtaatggaaaatgtcaataaaccccagctctggaacattttcaatcaagttaccatgcactcccaagatgtacgacatcatcgcttctgtctccgtttgatgctgaaaaacccagaaaatcatgccctatgtgtcttaaatggacacaatgcatttgtatctggtagttttaagcatgcgcttggacagtatgtgcaagcctttcgcactcaccctgacgaacctctctatagcttctgtataggcctaacctttattcatatggcatctcagaagtatgtgttacggagacatgctcttattgtacagggcttttcctttcttaatcgatacctcagtttacgtgggccctgccaggaatcattctacaatttgggccgtggccttcatcagttggggctgattcatcttgcaatccactattatcagaaggccctggagctccctccacttgtggtagagggtatagaacttgaccagttagacttacgaagagatattgcctacaacttgtctctcatctatcagagcagtgggaataccggaatggctcaaacgcttttgtatacctattgttctatataaagcaccgcaactgagaacagagcaatggcagctgctgtgtgaggaccagtgtcttctgtctcagggcttattatttgtaactccaaaatagaaatgaccatttcagaattacctaacaaacagtgtatttatttttaatatgtgatcatgatcttgtggtatatatgcaaaattattcctacaaaaaaaaaaaaaaaaaaaaaaaaa

SEQ ID NO: 355 - DNA, 3866 bp, Homo sapiens
gagctcaatccctgggcagggaaaagggggtcctcggggctccccgctcgctgtcctttttctggacaggcagttccttggccacctggtagggccgcgttgcctggcaacggcggggtccttcttggctcggcggcgctcggggcctgaggggagaaaaccgccgcggagggcgctgggggtggcggcggcggtccgggaggtggtcgcgcgactgcgtggagcgccagggcgtccgacctctgcacctgagagaagatgaacacggccgaccaggcccgggtggggcccgcggacgacgggcctgcgccgtctggggaggaggagggagaggggggcggcgaggcgggcgggaaggagccagcagcggacgcggccccggggcccagcgctgcattccgcctcatggtgactcggcgggagccggccgtgaagctgcagtatgcggtgagcggcctggaaccgctggcttggtccgaggaccaccgcgtgtctgtgtccacggcccgcagcatcgctgtgctggagctcatctgcgacgtgcacaacccgggccaggacctggttatccaccgcacctcggtgcccgcaccgctcaacagctgtctcctcaaagttggctcaaaaacagaagttgctgagtgcaaggagaaattcgccgcctccaaggaccccacggtcagtcagactttcatgttggatagggtgttcaaccctgaggggaaggctttaccaccaatgagaggattcaagtacaccagctggtctcccatgggttgcgatgctaatggcaggtgcctcttggcagcactgaccatggacaatcgcctgaccatccaggcaaatctcaacagactgcagtgggtccagctggttgacctgactgagatctatggagaacgtctttatgagaccagttacaggctctctaaaaatgaggccccggaaggaaatctcggggattttgctgagtttcagaggagacacagcatgcagaccccagtcagaatggagtggtcgggcatctgtaccacccagcaggtcaagcataacaacgaatgccgggacgttggcagtgtgctcctggctgtcctctttgaaaacggtaatatcgccgtgtggcagtttcagctgccgtttgtaggaaaagaatccatctcttcatgcaacacaattgagtcaggaatcacctctcccagtgtattgttttggtgggaatatgagcacaataatcgaaaaatgagtggccttattgtggggagtgcttttggacccataaaaattcttcctgtcaatctcaaagcagtcaaaggctatttcactttaaggcagcctgttatcttgtggaaagaaatggaccagttacctgtgcacagtatcaaatgtgtgccactttatcatccttaccagaagtgtagttgcagcttagtagtggctgcaagaggctcttatgtattttggtgtcttcttctgatctccaaagcagggctgaatgttcacaattcccatgtcacaggccttcactcactgccaattgtctccatgactgcagacaaacagaatggaacagtctatacttgctccagtgacggaaaggtgaggcagctgattcccattttcacagatgttgcattgaagtttgaacaccagttgattaaactctcagatgtgtttggctcagtgaggactcacgggatagcagtgagcccctgcggtgcatacctggccatcatcaccactgagggcatgatcaacggcctccaccctgttaacaaaaactaccaggtccaatttgttactctcaaaacctttgaagaggcagctgctcagctcctggaatcttcagttcaaaacctttttaagcaggtagatttaatagacctagtacgctggaagattttaaaagataaacatatccctcaatttttacaagaagctttggaaaaaaagattgaaagcagtggagtcacctatttttggcgttttaagcttttcctcctgaggattttatatcagtcaatgcagaaaaccccttcagaagccttgtggaaacccacccatgaggactcaaaaatcttactagtggattcgcctgggatgggcaatgctgacgatgaacagcaggaagaaggcacttcttccaaacaggtggtgaagcaaggcctgcaggagaggagcaaggaaggagatgtagaggagcccactgatgactcgctccccacgactggagatgctggaggccgtgagccaatggaagagaaactcctggaaatccaagggaaaatcgaagctgtggagatgcacttgaccagggaacacatgaagcgagtcttaggagaagtgtatctgcacacctggatcacagaaaacactagcatccccacccgcggactctgtaactttttaatgtctgatgaagagtatgatgacagaactgcacgggtgctgattggacatatctcaaagaagatgaacaaacagactttccctgagcactgtagtttgtgtaaagagatcttgccattcacagatcgcaaacaggcagtctgttccaatggccacatttggctccggtgcttcttaacctaccagtcctgccagagtttgatatatagaaggtgtttgctccatgacagcattgcccggcatccagctccagaagatcccgactggattaagaggttactgcaaagcccctgccctttctgtgattctcctgtcttctaaataatcagtgacgggaagatggaagggcatgatgaactctgccatagaaaacttcctccagcctgaagagaaggatgcactggaggaagccggaccctcacgagtggagagaagtccttggtgattgtaaagagggcccctggagctcatttctgaatcgcactctccatttccagagactaaaggatgtcctttgaaatggctggactcagagagttggagtcgttttgagatgagcattagccccagctttgtaaccaatgaggaacacttacttatttttaagtatcttgacagaagcaatttgaacacagtgtcccgtcatttctagaaacagaatggtctcttctagagagcttggataaggaccttgctgggttgagttaggttttaatccttgctttggtttggaactgccttcgggctccagaacttaaattgcttggtccgtggcatctgatgtaccaacagagattaaaagtgtaaagcaacacatgggctgatgttttgttctcagaaaatagctgctggtctgcatccctccattcttgttttttatgcatatggaaaacattttcctaaaactctatattcttaagttgaagccaagactaaaatttaatgtgtcaaatgatctggtgactattataatgaataattgtgacttatttttcattctctcctgggtcatcaggtttcctgacccaactccttaatccgtataaagatgtcaaatactgtagttcacccacgccacagccctgcttcagacttaactgtggtagcctagatgagctatttgtacacagaggaaaaaaagatattttcctcttttagtaataagactttcagtatttttaatgttgacatttccagatgtttcatttagtatccaggggtctgtctggagacttctagagagggacagctcagaagtgagacccttgagctctggtgctgtaagcttgtgcaattaagttgaacagagcctgggaatttctttcctctgcacagtcccttgatatttggaatccaggttctgcccccaacccctacccacccagtggtctgttaagatgtctcagatggggctgggcttggtggctcatgcctgtactctcaacactttgggaagcaaa

SEQ ID NO: 356 - DNA, 2436 bp, Homo sapiens
gattctcattggctgaagtcgagggaggtttgtgtcttattatcctccgggtccctcgctggctagtaggagagactggtgcttgccccgcccggtggactaactcgcttaattttaaataaaaagtcgaggacacggcggtcgttttcccgaagacatgggccctcccatgggccatttgctccctggaggccctcgcgtcttgctgagcccggggagttaggatgacgcgagcggtgagggagcccggaacgattccttcgcggaacaattgaggcgaggcctttgggagtactttgtgggacggaccctggcgggccctgccagacgcacagggatggcggcggaggcggccgatttggggctgggggccgccgtccccgtggagctgaggcgggagcgacgcatggtgtgcgtggagtacccgggagtggtgcgtgatgtggctaagatgctgccgactctgggcggcgaggaaggcgtctcccggatctacgcagaccccaccaagaggctggagctgtacttccggcccaaggacccatactgccacccagtgtgcgccaaccgcttcagtaccagcagcctgctgctccgcatcaggaagagaacgaggcggcagaaaggggtgctgggcactgaggcccactccgaggtcacatttgacatggagatccttggcatcatctccaccatttacaaatttcaggggatgtctgacttccagtacttggctgtgcatacggaagcaggcggcaagcatacgtcaatgtatgacaaggtgctcatgctccggcccgagaaggaggcctttttccaccaggagctgccgctctacatccccccacccatcttctcccggctggacgccccggtggactacttctaccgaccagagacccagcaccgggaaggctacaacaatccccccatctcaggtgagaatctgattggcctgagcagagcccggcgcccccacaatgccatctttgtcaactttgaggatgaggaggtgcccaagcagccactggaggctgcagcccagacgtggaggagagtctgcactaaccccgtggaccggaaggtggaggaggagctgaggaagctgtttgacatccgtcccatctggtcccgaaatgctgtcaaggccaacatcagcgtccacccagacaagctcaaggtcttgcttcccttcatagcctattacatgataacaggcccctggcgcagcctatggattcgatttgggtatgacccccgaaaaaacccagatgccaagatttatcaagtcctcgatttccgaatccgttgtggaatgaaacacggttacgcccccagtgacttgccggtcaaagcaaagcgcagcacctacaactacagcctccccatcaccgtcaagaagacatccagccagcttgtcaccatgcatgacctgaagcagggcctgggcccgtcggggacgagtggtgctcggaaaccagcttccagcaagtacaagctcaaggactctgtctacatcttccgggaaggggccttgccaccctatcggcagatgttctaccagttatgcgacttgaatgtggaagagttgcagaagatcattcaccgcaatgacggggcagagaattcctgcacagaacgggatgggtggtgcctccccaagaccagcgacgagctcagggacaccatgtccctcatgatccggcagaccatccgctccaagaggcctgctctcttttccagctcagccaaggctgatggcggaaaagagcagctgacgtacgagtctggggaagacgaggaggatgaggaggaggaggaagaggaggaggaggacttcaagccatccgacggcagtgaaaacgaaatggagacagagattctggactacgtgtgacagggcccaaggctgggcctccctgacccggccagactggtgtctggcctaatgagggagccggggctccccattgccacccacagtgcccggaatggccctaggaggccctctgaggagagctagagtcccagcaaagggtgcagctgaccctagcactggctgtgacatgctgcttggtgctgcctctggtcctgaggggttagggacatccccaaagggtataccctggctctgccacccatgaaccagcccagcatccagccagtgagtgggcacccaatgcctctcaggatgagaccagtaaatgccggaggtggagctgggcagctgtggagccccaggccacaggccagtctcgcttggctctcatgactgtggtggtggagatagcgtggggagcctcgcccatggtctcacgtggcaagaagtgcctttagctctggatcccaaccgtttggcacagctttggccacagccaggcccctctggaattgtccttattaaaccagtttcccgagaaaaaaaaaaaaaaaaaa

SEQ ID NO: 357 - DNA, 1749 bp, Homo sapiens
gcggtcttatataagccagatccgcaggggagtccgcagaagggttaaacaggtctttgggcttcggcgacctcgcccgcggcagaaaccggtaagaagacagtgggctgcgcgtctcattttcagccttgcccggactctcccaaagccggcgcccagtagtggctccagagcccacaggtggcccccggcagtctctggggcgcatggagcggcgttaatagggctggcggcgcaggccagtagccgctccaacatgaacctcgtgggcagctacgcacaccatcaccaccatcaccacccgcaccctgcgcaccccatgctccacgaacccttcctcttcggtccggcctcgcgctgtcatcaggaaaggccctacttccagagctggctgctgagcccggctgacgctgccccggacttccctgcgggcgggccgccgcccgcggccgctgcagccgccaccgcctatggtcctgacgccaggcctgggcagagccccgggcggctggaggcgcttggcggccgtcttggccggcggaaaggctcaggacccaagaaggagcggagacgcactgagagcattaacagcgcattcgcggagttgcgcgagtgcatccccaacgtgccggccgacaccaagctctccaagatcaagactctgcgcctagccaccagctacatcgcctacctgatggacgtgctggccaaggatgcacagtctggcgatcccgaggccttcaaggctgaactcaagaaggcggatggcggccgtgagagcaagcggaaaagggagctgcagcagcacgaaggttttcctcctgccctgggcccagtcgagaagaggattaaaggacgcaccggctggccgcagcaagtctgggcgctggagttaaaccagtgagccgaggcccgcgccgaggacctggccaggccagccactcctgaagccccgggaggagaggaaggcagcggcgaacgccaggctctgggctccggcgactggtgctacgcatcccgcggagcttctgctgagcgccggcaggtcgtcggctgcaaccacacacttggatcgcacgtgcaatgtcctttgattttttttaatacattaagagaaagagaaatatatatatatccacccccagcccaaccgagggcggcccttggcggcaacatgcaagaaggagggactgtcgaacccaagggctcaaagacgcactcttccacccttttggagcgaatttagaacctcagccctatctccatttccctatctggctctttctctcttgtccctccatatgatccgccccgacgccgtcttctctaattaaaatgcaataaggaatcaattcttttctgcctgagaaagagaaccagacgcaggaagatgaaaggctgccctttgttcttcgaatcgtggtggttttattttatttttctttttgtcgctgcacttcctgtttagttccaagggaaacactttctctctttctctgtctctctcttttcttccttcttttccttcctttttgtttctatctaaataaaagctttccctgtgttggaaagtttttatgtatttaaactacctaccatgcctgttgtgctcaggtgtttgttcatcctgccatccccaacccttttctacctcaagtctgtgtgaccactcacagcccccctcccttcgccaaagcagtgtctatgctcttgattaataaaacattttctgaaatcaaaaaaaaaaaa

SEQ ID NO: 358 - DNA, 2368 bp, Homo sapiens
ctgtacatggagatcttgctgggaaaatccgcttgctcccctcacgtcgtccagcccaggagaaccaccgccgtcaccccggagcttcctcggccaccgcgcagagccctccgagagcccgagccgcggtcttcgagctccaaggctcattcagggccccagatccttgccccgaaaggagaggatctgagaaaatggatgcactgagacctctctgaaaaccctccgagagagcgcgagaggagcgaggacacgttactcgcagctaaaatcacatttaaggaccaaaacaacaacaaccaaaaatttcattaaaacaataagcgcccaagaacccagatcgggctggtggggggaggggaagaggcgggaaggggagggtcgcacggaggtagctttgcagtgagcagtcgaccccgccgccccccggcacagctggaccggctcctccagccgcggctcagactcgcccctggattccgggttagcttcggtgccaggaccgcggcccgggcttggattcccgagactccgcgtaccagcctcgcgggagccccggcacctttgtatgagcacgagaggattctgcctccgcgcagcagcccgggaagcaggagccgaagcgcgggccgtggagcaaggcgggaaccggaggcggcggcggcggcggccaggggcgcacggtgccaggaccagctcgccgcgccccatggggagccggcggccgcagcgctgctgaggcgggcccggctggccaggcggggggacggggcccgggctgcagcagccccctctgcggctgccgggcgggcccgggcgcccgggggctggggggtggggggtgggggaggacgccgagcgctgaggcaggggcccgggccgagggcgcggcggggctgcgcgcacgctggggcgcgtggaggggcgcggagggcgaaatgagtctggtaggtggttttccccaccacccggtggtgcaccacgagggctacccgtttgccgccgccgccgccgcagctgccgccgccgccgccagccgctgcagccatgaggagaacccctacttccatggctggctcatcggccaccccgagatgtcgccccccgactacagcatggccctgtcctacagccccgagtatgccagcggcgccgccggcctggaccactcccattacgggggggtgccgccgggcgccgggcccccgggcctgggggggccgcgcccggtgaagcgccgaggcaccgccaaccgcaaggagcggcgcaggactcagagcatcaacagcgccttcgccgaactgcgcgagtgcatccccaacgtacccgccgacaccaaactctccaaaatcaagaccctgcgcctggccaccagctacatcgcctacctcatggacctgctggccaaggacgaccagaatggcgaggcggaggccttcaaggcagagatcaagaagaccgacgtgaaagaggagaagaggaagaaggagctgaacgaaatcttgaaaagcacagtgagcagcaacgacaagaaaaccaaaggccggacgggctggccgcagcacgtctgggccctggagctcaagcagtgaggaggaggagaaggaggaggaggagagcgcgagtgagcaggggccaaggcgccagatgcagacccaggactccggaaaagccgtccgcgctccgctctgaggactccttgcatttggaatcatccggtttatttatgtgcaatttccttcccctctctttgaccccctttgaggcatctgctccccgtctccccctccaaaaaaaaagtggatatttgaagaaaagcattccatattttaatacgaagaggacactcccgtgtggtaagggatcccgtcgtctcatagattctgtgtgcgtgaatgttccctcttggctgtgtagacaccagcgttgccccccgccaacctactcaaccccttccagataaagacagtgggcactagtgcgtttgtgaagtgtatctttaatacttggcctttggatataaatattcctgggtattataaagttttatttcaaagcagaaaacagggccgctaacatttccgttggggtcggtatctagtgctatccattcatctgtggtcgttccctctttgaagatgtttccaacagccacttgttttgtgcacttccgtcctctaaaactaaatggaatttaattaatattgaaggtgtaaacgttgtaagtattcaataaaccactgtgttttttttttacaaaaaccttaatcttttaatggctgatacctcaaaagagttttgaaaacaaagctgttatacttgttttcgtaatatttaaaatattcagaagtaaactaaattatcatga

SEQ ID NO: 359 - DNA, 5873 bp, Homo sapiens
gaaaaatgcttcctgtttctttaaaggcgctcgcggctcgggcggcccgggctggggaggcggtggcggcgggagctgcctcctctccgggcggcggcgctgactgatctcgcgaactgggcttctgtgtaaactgaggctaaacaaacacagatggagcgcagcgggcgttctccagaaatgctggcaaggaggcagcgacttcagatgacactctgagcgctccgggaacggacagcccggcggcttcccgaagccggcggcgcagctgcccggggcgagggggagaaagggagagagggagggggagggcgggcgaagcgggagagccagagactcctcggcgctgagcgcggcggcggcccgggcagccccacgcccctgcctcgcgcgccgcccgcgccatgaagcacatcccggtcctcgaggacgggccgtggaagaccgtgtgcgtgaaggagctgaacggccttaagaagctcaagcggaaaggcaaggagccggcgcggcgcgcgaacggctataaaactttccgactggacttggaagcgcccgagccccgcgccgtagccaccaacgggctgcgggacaggacccatcggctgcagccggtcccggtaccggtgccggtgccagtcccagtggcgccggccgttcccccaagagggggcacggacacagccggggagcgcgggggctctcgggcgcccgaggtctccgacgcgcggaaacgctgcttcgccctaggcgcagtggggccaggactccccacgccgccgccgccgccgcctcctgcgccccagagccaggcacctgggggcccagaggcacagcctttccgggagccgggtctgcgtcctcgcatcttgctgtgcgcaccgcccgcgcgccccgcgccgtcagcacccccagcaccgccagcgcccccggagtccactgtgcgccctgcgcccccgacgcgccccggggaaagttcctactcgtcaatttcacacgtaatttacaataaccaccaggattcctccgcgtcgcctaggaaacgaccgggcgaagcgactgccgcctcctccgagatcaaagccctgcagcagacccggaggctcctggcgaacgccagggagcggacgcgggtgcacaccatcagcgcagccttcgaggcgctcaggaagcaggtgccgtgctactcatatgggcagaagctgtccaaactggccatcctgaggatcgcctgtaactacatcctgtccctggcgcggctggctgaccttgactacagtgccgaccacagcaacctcagcttctccgagtgtgtgcagcgctgcacccgcaccctgcaggccgagggacgtgccaagaagcgcaaggagtgactggctgcaggcaagaccaaggccaccactgtgggccctccttccagtcaggcctgaggacaaggtgagctcgctgagtccagcctcgtggtcttctccaagatgccgccagatgcccagcctacagcctctcagggtcggatcggagcacgcctgcctccctctcccctccgccctcacccagccaatccgaggctgcttcgcactttgccctctgcctggtggggaggggagagctcagcccccgactcactcagaccccaaggcccactgtccagctgcagaaattcgttgccaaagattggacagagacaccgaaggaaatggggtggtgaaaccccacagcgaaaagccacaccgttgctctgtgacttttgctcctcctgttgcctgagccccatctcaagccaaagatgagtcagtggttctgctaggaactcatggaatggatgggcatttgatgacccctgggggtcatcttggccctctgacctggtgctctctctccactgggccttgtgctggctgagtgcaagacaagccttaggggctgtgagagggaggctggggtgcctgggcggggctgggagtgggacctgagatccctgcccactctctccccttcattggctgcccaggccactggccccagttctcagtgtcccttgggtccaggctccttgggccctaagcatcaccagaagggagtaagcagggagagaagcaatattactccctcccctacaccagggacttgccccagggcagctacctatgggtctttgcttccccagccagcctctcctcactgtgacccacccccatgggcccccgtcccaggcagccagcaccatgggcaggccctgccatggacagaaaaagagtttttctcttgttcagcctgcacgtggcctgaggaaggagtagaggctgggttggctggagccgtcctactgggcaagatggcgccccacttggagggcggtggtctgttacagggtgtgcaggggcagagaaggaagggaccaggggactgggccagtatgtggaggatggggcctgcgtgttcaaagccaaggcccgccccttccttgtgctcaaatggccaaagctgttcacgtctgtgctcaaccatctgcttcaaattgaagtaaaagccccaaaatgtcaagaaaatacttgtgttgagtggactctgtgggtgaccaggactttggccggtcatcagctggggagtgtgagggagggggttggtttctacctacaggttgagagcccttcaggatcaggcgctgtccgagtgagagtgtgtgtgtctgtgtgtggaagggggtggagggcggttcccacagtagtctcagcctggactagtgaccaggaggcctggtcaggaacacatgaggagccctctctgtccgcactgcactcaatctgtaccatggatttatgagataggggcccctattattaaccccgtttcacagatggggtaactgaggcctcaagtagacagggtcagtcggtgacagagccagtcatcgaatcaggatgggctcacttcaaatcctgtgctctcaaaccttttccagccccatcaccagtcccagcccaaagtctcttgtgtggccttgtcacattgcttcacctcagcgggcctaaggtagggacaataaaggcccattgggactgggggaaggggtgataagataaaaaataggagagcactgtcaaggcagaagggacagggctggccaaggaaagggggataggaggggaccggaggctgcagccatacaggacacagtttgtcccttggtttcaccagtgtcactttctcgtctctgctgctcagactcctgggctgggctggggctggctgcagggagccccccttgcagtagcgtttctcaggctggccctttaccaaggaccacagtgtccatgctgtcttggatccctaggctggcacagaaacaggggacccaggtggccctgagcactcctcagagcaaaggtgctctggaagcagactggacagagtgggcatggaatggggccaggagggtctgttaggaaggttcagccaccctgtgaagctggcacagataacagcactgctctgttgtccctcggagcctctgagtaaccctgatggcacttcctaaggcagcaggacatgtggactgaccagcatcaaactgttgacatagaagaccatttctattaccaaagggagtgtaccccattctgctgccaagggagcaaacccatggccttaccacccagaaagagcccatcctccacctcccatccccctcctgcatacatacttcattacatgtttccctttcattctgaagcatcattgatgaccagctgcctgtcagacactaagataggcagtgggaatgaagagatggatcttgtgtcatgcatggcatcacggagctctgggttctgtacggagggtgggacagacaggtagacaagcaaataattatgattatagcagatgactaaggtgttgtcgggagcttcaggaaaggaagaactaactcttggggaggttctcaggaaggatttccctggaaagtagccatgggacttgcgtcttaaatggtgagtaaaagctttctgagcaggggagtaggaaaagggctttctatgcagaggagcactcagcgctggcaggaaattggaatcacccaaggagattattaaatattaaatattgatatgaagtattgatgcccaatttcatctccagaaattctgatgtattggtctagggtgttgcctggtcattgggatttttacaagctcctcaagtgatcttaatgtgcaggcaaggttgaagccgctggtctaagtggggtctggtctacgataagaaagtgactttgagccatcgatttgggagacaggctctgggtggatgtgtgtgtgtgcacacatatgtatgtatgtggatgactaaaagtgcatgctctcctctcctttcccagcttcctctccagcacagcaacttgtgttcgtatgcacacacatgcatactctctctcatgggcacatgcatacccacacacacactcgtgtacatttccagaaaatggaattacatttcagatagattcagattccaacggcagtcttctaaacacttttatgcaagcagccattcaaggagaccctcagcaaaatataaatgacgaggagctgccctcatggggccctgtgaaagcactttgcagtccagccttgggtttgtggtcacagagtcacctgtggatgtttgtagcacactctccttgtcttgtctgctctgggtcaccaggcacaggccataaagggatgagggggccctctccagggacccgcaagatcttcctgggtatgtctgcatgaagccccacgtgtgcacacccatcttcatgtgtgtgtgtgccagcctcctgctctctgcagaacaaaaccagaaggaatggctctgggagttggagatctcagctcacaggccaagctttgcaagactctccaaagactgcccacagactgtgctgcttcctgggtctggcctgagactatcccagaagagagggttaaattctggaggtgaggttttgagcaagtgttcatccccccacactatgctccttcctgtctccatggccacatccttcaaggctctgtgctgttctctttttttctggatttctccacctccaccaagttcccctttctcacagctagtggaggcatgagtaggcaggtcccaggggctgggaactgggtagcattgccatgtgcagggactgtgttgggagctgcaggtacagagctcctctgtgctcaagagcttgccggtgagcctggacggaggcataggtgcagctaattaggataagacaggggccgcgctgtggtcagccgtgggaagccggcgaggggactggagttggggctacacttgcctccctcctatgctgcttcctgagccacgaagtggtcattgccagcatcccaggcaacaaacagcaagactcagacatctccaaggaaaccctttgagtggatctgtaccgttgttctcgtcttgctctcttgctgccctgccaccttcacagctgctttctgtttcctggttccaggaagacagcggggcacagggtccctgctttgtgaggagcagctggcttctccctttgcccccaggttttgccctcccacatgtctcccttctggtgacccggaccccagacaaactatgcctgcctccctgaagccaggcatcctgaggaacttgatagacaaacaatgacagtgttttccagaactgtgggtacgtgtctaatctcagatggtactatgaattcctggagatcaaagtttggatctaattcaacccctgatcctcgaaacggctttcttgcaaagtgtatatattggtttctttgctgaatgaatgaataaaacatggaaaatgtggtaattcaaaaaaaaaaa

SEQ ID NO: 360 - DNA, 3600 bp, Homo sapiens
gaggcactagggatcgtccgcaggattgggactgatacagaggccgccacggagcccgccggagccaccgttcctgctgctgccgccgctgcccgaatcggaaccgtcgggccgcagccgccggcaatgccgcgaaggaagaggaatgcaggcagtagttcagatggaaccgaagattccgatttttctacagatctcgagcacacagacagttcagaaagtgatggcacatcccgacgatctgctcgagtcacccgctcctcagccaggctaagccagagttctcaagattccagtcctgttcgaaatctgcagtcttttggcactgaggagcctgcttactctaccagaagagtgacccgtagtcagcagcagcctaccccagtgacaccgaaaaaataccctcttcggcagactcgttcatctggttcagaaactgagcaagtggttgatttttcagatagagaaactaaaaatacagctgatcatgatgagtcaccgcctcgaactccaactggaaatgcgccttcttctgagtctgacatagacatctccagccccaatgtatctcacgatgagagcattgccaaggacatgtccctgaaggactcaggcagtgatctctctcatcgccccaagcgccgtcgcttccatgaaagctacaacttcaatatgaagtgtcctacaccaggctgtaactctctaggacaccttacaggaaaacatgagagacatttctccatctcaggatgcccactgtatcataacctctcagctgacgaatgcaaggtgagagcacagagccgggataagcagatagaagaaaggatgctgtctcacaggcaagatgacaacaacaggcatgcaaccaggcaccaggcaccaacggagaggcagcttcgatataaggaaaaagtggctgaactcaggaagaaaagaaattctggactgagcaaagaacagaaagagaaatatatggaacacagacagacctatgggaacacacgggaacctcttttagaaaacctgacaagcgagtatgacttggatcttttccgaagagcacaagcccgggcttcagaggatttggagaagttaaggctgcaaggccaaatcacagagggaagcaacatgattaaaacaattgcttttggccgctatgagcttgatacctggtaccattctccatatcctgaagaatatgcacggctgggacgtctctatatgtgtgaattctgtttaaaatatatgaagagccaaacgatactccgccggcacatggccaaatgtgtgtggaaacacccacctggtgatgagatatatcgcaaaggttcaatctctgtgtttgaagtggatggcaagaaaaacaagatctactgccaaaacctgtgcctgttggccaaactttttctggaccacaagacattatattatgatgtggagcccttcctgttctatgttatgacagaggcggacaacactggctgtcacctgattggatatttttctaaggaaaagaattcattcctcaactacaacgtctcctgtatccttactatgcctcagtacatgagacagggctatggcaagatgcttattgatttcagttatttgctttccaaagtcgaagaaaaagttggctccccagaacgtccactctcagatctggggcttataagctatcgcagttactggaaagaagtacttctccgctacctgcataattttcaaggcaaagagatttctatcaaagaaatcagtcaggagacggctgtgaatcctgtggacattgtcagcactctgcaagcccttcagatgctcaaatactggaagggaaaacacctagttttaaagagacaggacctgattgatgagtggatagccaaagaggccaaaaggtccaactccaataaaaccatggatcccagctgcttaaaatggacccctcccaagggcacttaaagtgacctgtcattccgagccagcgaaccccagcagtaggaatccgtaccctagggatctgtctgtcatttctctgttgctcttgtgattggcaagtacagtatcctttgggaaggccatccccctcaggactgtcctggctccgacctttgtgtacactgcagacgctggttctgaggaactgttgtttcggcctcagtgaggttgcctggatgggatctgtattagacttgagtgcaggtctctcagcactgacccaaggagttctgttatggtactgtacctgtccagtcactggttctctcctcatgtcctctcgccccatgaggttgtgttgtgtcttctaagcgtggtactagtgcttgccacctggtcaccagacctccaaatatggctgccaccaccaggacctttccagttactccttatatgtgtgttctatggaggggcagggaaaaggtggcacttgtgagtgtgtgtggattggcagggggtccattcactttgggttccatcttgctttaaatttcttcattttgattaagagacctctttttgatctgtattgggctaaccagagccaaatacttttgaagagtttcccagggactagtcatggtaatagcatataattgatctgaatgagatggagagaagaatgaaggggtggtggttctgggtttgatttgagttcacctgtgggcagtgggcagtgggcagtgtcttggtgaaagggaacggatactactttttgcctcaccgtaaagtactcactagtaaatatttccttctctctttactcccactttttacgtttgcaggtgccaaagtaatgtccacttttccctttcatgctgcatattaactggttaattatactgcagaaaccttttcacctccactagtctgatacagtacatctgtacttccatataccttgcactgattttgtctgagtgccctgggagaagtagaaaatgattgaaagtgacttccgtatctcagcccatgactcagcaaggcagaatggccacccctgccaaagtttgcttctcttttcaacagtgcctcaccctccctctaggattaaagtgcttctgcccttccacgaactcctcctccatttcctttttgggatttgtcaccatccttctattctctggtcttctatttttggtgttgttcaagtgaaggaagagatgttccctctaatttctctctagcccattataacctgctatcttggggcaacttttgatgtatgacatgtcacccttcccaacttggtctcctccaacatgctgtcttcatgtggagccctcaccacaatccctgactccggtcatttgtgcccttctcttgtcatctctgtacactacttatattcactgtgggttgggggagctaattttaagcatgttcagtggcagctcccctccagtttcagtgtcactgttaaaatttatcaaaaagcaacttcactaggggttttcttaagggataaaggccttttacagaagctaaacccttccccacatgtggtagaatgtgctcttctatatctactcctcaataaagcatgttctctgctcaaaaaaaaaaaaaaaaaaaaaaaaaaaaaaaaaaaaaaaaaaaaaa

SEQ ID NO: 361 - DNA, 5743 bp, Homo sapiens
acgtgaccccagcacagctggaggcgggtccccgccctccccagggagcagccggttgaggcgggagcggtgcattgtgggcagaggggcgggggttgggaagatggcggctcccagcctcctcaactggaggcgagtttcttccttcacggggccggtcccccgcgcccggcacggacaccgagcggtggccatccgggagctgatgatcatctttggagggggaaatgagggcatcgcggatgagctgcacgtctacaacacggctacgaatcagtggtttctgccagctgttagaggagatatccctccaggctgtgctgcccatggatttgtctgtgatggtaccagaatattagtatttgggggaatggttgaatatggaagatacagcaatgagttatatgagttacaagcaagtcgttggttatggaaaaaagtgaaaccccatccccctccttctggtttacctccttgtcctcggcttggacatagcttctctttatatggtaacaaatgctatttgtttggtggcctggcaaacgaaagcgaagattcaaacaataatgttcccagatatttaaatgatttttatgagttggagctacagcatggctctggtgttgtgggttggagcattccagtgactaaaggggttgtgccttctccaagagaatcccacacagctgttatatattgcaaaaaagattctggaagtcctaaaatgtatgtttttggtggaatgtgtggtgctcgcctggatgacctatggcagcttgacttagaaactatgtcatggtcaaaaccagaaactaaagggacagtgccacttccacgaagccttcatacagccagtgttataggaaacaagatgtacatttttggtggatgggtcccacataagggggaaaatactgagacttcacctcatgattgtgaatggagatgtaccagttcattttcttacctaaatctggatacaacagagtggaccaccctagtatcagattctcaggaagataaaaaaaattcaagaccaagaccaagagctggccactgtgctgttgcaatcggcactcgattgtatttttggagtggaagagatggctacaaaaaagcactgaatagtcaagtttgctgcaaggatctttggtatcttgatactgagaaaccaccggcaccatctcaagtacagctgatcaaagccactaccaactcctttcatgtcaagtgggatgaagtgtctacagttgagggctatcttttgcagttgagtacagacttgccataccaagctgcatcatcagattcttcagcagcaccaaatatgcaaggagtcaggatggaccctcacagacaaggcagtaataacatcgttcctaacagtatcaatgatacaataaacagcacaaaaactgaacagccagccacaaaagaaacttcaatgaaaaacaaaccagactttaaagcactgacggattctaatgccattttatatccatctttggcatcaaatgcttctaatcataatagtcatgtggtggatatgctaaggaaaaatgaaggtcctcacacttcagcaaatgtaggtgttctaagtagttgcctggatgtaagaacagtaattcctgaaacatctgtatccagtactgtttccagcacacaaactatggtaacccagcagaccattaaaactgaatcatccagtacaaatggggcagttgttaaagatgaaacttcactaacaacattcagtaccaaatctgaagttgatgaaacatatgcactgcctgcaacgaagatcagccgtgtagagacacatgctacagcaacgccgttttctaaagagactccttcaaatccagtggccacagtgaaagcgggagaacgacaatggtgtgatgtgggaatttttaaaaataatacagctttggtgagccagttttatttgctgccaaaagggaagcaaagcatctcaaaggtaggaaatgcagatgtacctgactacagcttgcttaagaaacaagatcttgttccaggcacaggatacagattcagggttgctgcaatcaatggttgtgggataggtcctttcagcaaaatcagtgaatttaaaacttgtattcctggttttcctggagctccttctgcagtcagaatttcaaagaatgttgaaggtatccacctttcctgggaacctccaacctcaccttctggaaatattttggaatattcagcctacttggctatccgcacagcacagatacaagataatccaagtcaacttgtgttcatgaggatttattgtggtcttaagacatcatgtatagtaactgctgggcaacttgcaaatgcacatattgattatacatccaggcctgccattgtgttcaggatatcagcaaagaatgaaaagggatatggaccagctacacaagttcggtggcttcaaggtaacaataagaaagcacctttaaattgaattggtttttttactgaagctattgtgatgatgattatttattagtaactggttatgaagatttgtcatttaaaagagtattctctggctgtatttccagcagttatgaacttgagtttgtaaattgttcttaaaatgtatttgctgaattatagatccaaataaaagaaaagaagcaaagactctctgaaaattagtatatgagttcttccttacagatatagctcttttataaagaaaaacagtgaaattaagataaaagctagaaagctttattaccccaatatcttttataagggctgtgtaacccagtcatcctagagttattgagatgattctggtaactggctgttgtatactatgctgtcttatatagtaaatgttctctacattgtaaatgtcctacctttgagtactccttctatctttattctatatgagcagtgttcctctaacaactgtcttctattggataatatgtgtgatactataataattctaatagttatttgattcctttctttgtttacagttagcacagagcttaagaaattaaaaaagaggcaagtttagaaactgcttttgaacttttattattttccaagaatcatggtaaaatacaacaagaacaatgagttttcttgattcttaccaggccaatatatttgaatatatttttggccaaagcacttaacttatctggccctcattttcctcataacagatgagggagttaaagcagtttatcttttaggtccctttcagcactaaggttttgtgtttttagtagaagtgaagtatgtccctgaacattttcatctgtcttaatggctctaattttgcttttgctaaaattaaaatcttcataattgaattcaaaattaaagtatatgtcctcctattggagaaaaaaacaagcaccttaacaggacacaagttttaaaatagtgttttaaacatttgtaagatttttgtaaatgctctaaatgttttatttttgcattgtttttaccttgaaattgtataaacttttttactatgaaaatataagcattagacagctaactcaggttccattacaaccttaaagatacagataggcattataaacactctgctacaggtaacttgttttaaaccttttaggaatttcatggttccactgcctatttaaatctggaattaatatacagagcaataattgcagaaaagatatttcaaactaagagcttcaataactgcaggggcacaggtctatctttttttataccacataaccttatgccagtttaggttgactgagtagctatgtcctcaaatttcatgtatgataccccccagcaaagatggatttaattgtgcagaattgatatatatgtgtgttccagttactaatttaaagtgtatagaatattttaatatataatttttgtaaagaactgggatttttatactacagtatttgtaattaatgtgtctcactaattaagtttctcttgaagaaaatatgcaaattgttagacacataatgagtggtttccaaactctaaagataaaataaatgcactactatggtgttgttagaataccttttttgtggctgtatgaatctttactctttaaatgtgtactttacaatgtttacaaggagcttctctggtttgttatcccagcaatgcccttggtgagagcttcattctgcatttgtttaattcatatgctttgcttttggcatatgcttgctttttgcactagtagaattttaacttacctcattattatgtttgtaatcatttgtctagcttctgtaatgtatctgatataggctaaacaaatacttaaccaaagttaaaatacatggtaagcaattttgcacatattaaatattagggtttgttgtgtatatgtgtatacttaattataaaagaatatgaatggaaagttatactaaaagtatatgtttcaagcccagttattttaaagatctattgctttaatagaaaaagtttggcttttaaccctttcttctctgcattaattaacaacgtgcatcttgaagcccttctcctgataacaaggaataagttgattttaagcaaaggatagaatatttgtttgagtgtgcacatttatacctgtttagtatttgattcagttaagcctccactcttctggatcaggaggtgattctgaacctgtggttctaacatatgacttaactgtttagagggaagagaagtctttctatactgagggatttgttaaaatcataaatgtttttgccctgagacttagcccagattctattttttttttttttttggcatttgtacattaagcaccagtcatatttatctctgtgataagggattgctgactaaaaaatgccattaagaaatctctgtggctttgacattagtagttaataagagatcttagagctgtgtgctgatgaatagaatgaattggagcaaatagcaagagaagtgcatttagcttcttatgatttgcacattttctaaatgaagatccctttgtgtagcagtaggctgtatcatgcagatatttttcataggatttgcactgagttaaatgactttctttactcttcccagtcaggtaagcagttcaaatataacaagactttgtgccagtcctcttctgtgttctgcaactctggctctcataagtagtaaaaatatttttgatgttgcatgctctcagaattatgttttctaaaatatcatattggcttcattttagtttaataaacttctttggcaacttaattagacatagggtatatataaactcaattttatctgcattttttaaaaaattgaaataatctgattgcatgtatgaaggactcctgcctcattacccaattacataaatacaattatctataggaaggtgaaattgttgatctattatttcaaagacttgtagactagcaaagattcattctgattagaaataaggtctatagctaaagatatttttattttaaaaaattacagcccttgtaacaaaaatcatttgtaacattggatatgaagacattattagtatttaaaattattgtagtcatttgatcataaatgaagtagcttgcaaaatagacttggtctttgaccctttaaggtgtaactgactgactgttgtgtttttcaagactgattttaggcagttttatgtatcgtgtaccaatgatatgtaaaataaagcaccttttctactataaacaaaaaaaaaaaa

SEQ ID NO: 362 - DNA, 2519 bp, Homo sapiens
gaagtcggcgtcttgagtcataggagtgagccacgcccgggctgtgggaataagatggcggggaagaagaatgttctgtcgtctctcgcagtttacgcggaagattcagagcccgagtctgatggcgaggctggaatcgaggcggtgggcagcgcggctgaggagaaaggcggattggtatctgatgcctatggggaggatgacttttctcgtctagggggtgatgaagatggttatgaagaagaagaagatgagaacagtagacagtcggaagatgacgattcagagactgaaaaacctgaggctgatgacccaaaggataatacagaagcagaaaagcgagacccccaggaactcgtggcctccttttctgaaagagttcggaacatgtcgcctgatgaaatcaagatcccgccagaaccccctggcagatgttcaaatcacttgcaagacaagatccagaagctttatgaacgaaagataaaggagggaatggatatgaactacattatccaaaggaagaaagaatttcggaaccctagcatctacgagaagctgatccagttctgtgccattgacgagcttggcaccaactacccaaaggatatgtttgatccccatggctggtctgaggactcctactatgaggcattagccaaggcccagaaaattgagatggacaaattggaaaaggccaaaaaggagcgaacaaaaattgagtttgtgacgggcaccaaaaaaggcaccacgaccaacgccacgtccaccaccactaccactgccagcacagctgttgcagatgctcagaagagaaagagcaagtgggattcggctatcccagtgacaacgatagcccagcccaccatcctcaccaccacagccaccctgccagctgttgtcacggtcaccaccagcgccagcggctccaagaccaccgtcatctctgctgtgggcaccattgtgaagaaggccaagcagtgacctgaggggccaccctaggacttgaaaggaccgtgcagcccagtgaccactgcccagtgggaggcgccactttgtatatttcaggactgggacctactccccagatgccacctgagaggagcttctgtttggcattccagatggaaggacaggcagcacgggagccaggcgctgtggacagggtctgtccacgcaccacctggggtctgccgcctattaaaagtgccgtattcttacctcttggcatctcagatgcactggcctctcctgcattctgtttgcaggcaaatgcttcagctcacatgtcccccaagactcaatagtcttggttgggactattgcctcagggttgacaacagggtgatggaggcctgggacgctgttcagaggggtgacccaagaagtcaccgttgttatccgtgtatgcctctgggcatggacaggcgggagtccccgagccccacgtatgccccatctgccgccttgatcccaaaacccagccagttctcgggtgatggtggagctgtgctcccttgagtgcacttgagcactccccagaccagatcactttttggacacacccaggaaggcttttgaagtcaagccagtttccagaagggctggggtgagatcctgacctgtgcagagagtggggaggcgtcagcgcctggccagggctgccccagtcctttggtgcccggtgagcgcagccagcaggagctgagcagcgggggagatgaatcacctcctgccttggcgaggcggcagctcattgtttacaggcaagccctgctcctgggagggctcctgccaccccacccttcctctgtgtgttatctctgccccacagcagcccctgggcagcaccagtggccactgggctccccccggggttgaaacgggtttcccagaccaggggttcagaggagactatttacccttcatgatctttggcgattctccactggagcggaagggctgtgtgtcaaaagaaggaagccaggctgtgaagggccgtgttgctttcagtgggtgggcagaggtttagaaaggtggttctgaaatggcacctggtactcttgtgggacctggggaatataaggaactctgtgcatgaggtttcaaaaataaaaattgagtccactctccccgtacacacacactcgggcacttcaggaggtcagttctcaccccttcctcgatggggctttaaagctctggggagaagagctgctccccactcatgccccagagggactgtgaaaaggcttcctgtgacctccgatggcggcccctcattggccaagggcactgtggatgttttgtgggaggcagcatggcaccgtggaaagggcagtagacgtggagccggcacctctggtctggattccacttaaaaccagttgagtggtctcaagcccttaacctctgtaagcctgtttcttctctgaaatcacagtaataaagcgtcgtaagatggttgggaagaaccagaggtgacttatgcaaaagctttataaactgtaaagttcctgcca

SEQ ID NO: 363 - DNA, 2091 bp, Homo sapiens
gagcggagccgcgggcgggagggcggacggaccgactgacggtagggacgggaggcgagcaagatggcgcagacgcagggcacccggaggaaagtctgttactactacgacggggatgttggaaattactattatggacaaggccacccaatgaagcctcaccgaatccgcatgactcataatttgctgctcaactatggtctctaccgaaaaatggaaatctatcgccctcacaaagccaatgctgaggagatgaccaagtaccacagcgatgactacattaaattcttgcgctccatccgtccagataacatgtcggagtacagcaagcagatgcagagattcaacgttggtgaggactgtccagtattcgatggcctgtttgagttctgtcagttgtctactggtggttctgtggcaagtgctgtgaaacttaataagcagcagacggacatcgctgtgaattgggctgggggcctgcaccatgcaaagaagtccgaggcatctggcttctgttacgtcaatgatatcgtcttggccatcctggaactgctaaagtatcaccagagggtgctgtacattgacattgatattcaccatggtgacggcgtggaagaggccttctacaccacggaccgggtcatgactgtgtcctttcataagtatggagagtacttcccaggaactggggacctacgggatatcggggctggcaaaggcaagtattatgctgttaactacccgctccgagacgggattgatgacgagtcctatgaggccattttcaagccggtcatgtccaaagtaatggagatgttccagcctagtgcggtggtcttacagtgtggctcagactccctatctggggatcggttaggttgcttcaatctaactatcaaaggacacgccaagtgtgtggaatttgtcaagagctttaacctgcctatgctgatgctgggaggcggtggttacaccattcgtaacgttgcccggtgctggacatatgagacagctgtggccctggatacggagatccctaatgagcttccatacaatgactactttgaatactttggaccagatttcaagctccacatcagtccttccaatatgactaaccagaacacgaatgagtacctggagaagatcaaacagcgactgtttgagaaccttagaatgctgccgcacgcacctggggtccaaatgcaggcgattcctgaggacgccatccctgaggagagtggcgatgaggacgaagacgaccctgacaagcgcatctcgatctgctcctctgacaaacgaattgcctgtgaggaagagttctccgattctgaagaggagggagaggggggccgcaagaactcttccaacttcaaaaaagccaagagagtcaaaacagaggatgaaaaagagaaagacccagaggagaagaaagaagtcaccgaagaggagaaaaccaaggaggagaagccagaagccaaaggggtcaaggaggaggtcaagttggcctgaatggacctctccagctctggcttcctgctgagtccctcacgtttcttccccaacccctcagattttatattttctatttctctgtgtatttatataaaaatttattaaatataaatatccccagggacagaaaccaaggccccgagctcagggcagctgtgctgggtgagctcttccaggagccaccttgccacccattcttcccgttcttaactttgaaccataaagggtgccaggtctgggtgaaagggatacttttatgcaaccataagacaaactcctgaaatgccaagtgcctgcttagtagctttggaaaggtgcccttattgaacattctagaaggggtggctgggtcttcaaggatctcctgtttttttcaggctcctaaagtaacatcagccatttttagattggttctgttttcgtaccttcccactggcctcaagtgagccaagaaacactgcctgccctctgtctgtcttctcctaattctgcaggtggaggttgctagtctagtttcctttttgagatactattttcatttttgtgagcctctttgtaataaaatggtacatttct

SEQ ID NO: 364 - DNA, 6656 bp, Homo sapiens
agtggatgcgctcacctccctgcggcctcctgaggtggtttggtggccccctcctcgcgagttggtgccgctgccacctccgattccgagctttcggcacctctgccgggtggtaccgagccttcccggcgccccctcctctcctcccaccggcctgcccttccccgcgggactatcgcccccacgtttccctcagcccttttctctcccggccgagccgcggcggcagcagcagcagcagcagcagcaggaggaggagcccggtggcggcggtggccggggagcccatggcgtacagtcaaggaggcggcaaaaaaaaagtctgctactactacgacggtgatattggaaattattattatggacagggtcatcccatgaagcctcatagaatccgcatgacccataacttgctgttaaattatggcttatacagaaaaatggaaatatataggccccataaagccactgccgaagaaatgacaaaatatcacagtgatgagtatatcaaatttctacggtcaataagaccagataacatgtctgagtatagtaagcagatgcagagatttaatgttggagaagattgtccagtgtttgatggactctttgagttttgtcagctctcaactggcggttcagttgctggagctgtgaagttaaaccgacaacagactgatatggctgttaattgggctggaggattacatcatgctaagaaatcagaagcatcaggattctgttacgttaatgatattgtgcttgccatccttgaattactaaagtatcatcagagagtcttatatattgatatagatattcatcatggtgatggtgttgaagaagctttttatacaacagatcgtgtaatgacggtatcattccataaatatggggaatactttcctggcacaggagacttgagggatattggtgctggaaaaggcaaatactatgctgtcaattttccaatgagagatggtatagatgatgagtcatatgggcagatatttaagcctattatctcaaaggtgatggagatgtatcaacctagtgctgtggtattacagtgtggtgcagactcattatctggtgatagactgggttgtttcaatctaacagtcaaaggtcatgctaaatgtgtagaagttgtaaaaacttttaacttaccattactgatgcttggaggaggtggctacacaatccgtaatgttgctcgatgttggacatatgagactgcagttgcccttgattgtgagattcccaatgagttgccatataatgattactttgagtattttggaccagacttcaaactgcatattagtccttcaaacatgacaaaccagaacactccagaatatatggaaaagataaaacagcgtttgtttgaaaatttgcgcatgttacctcatgcacctggtgtccagatgcaagctattccagaagatgctgttcatgaagacagtggagatgaagatggagaagatccagacaagagaatttctattcgagcatcagacaagcggatagcttgtgatgaagaattctcagattctgaggatgaaggagaaggaggtcgaagaaatgtggctgatcataagaaaggagcaaagaaagctagaattgaagaagataagaaagaaacagaggacaaaaaaacagacgttaaggaagaagataaatccaaggacaacagtggtgaaaaaacagataccaaaggaaccaaatcagaacagctcagcaacccctgaatttgacagtctcaccaatttcagaaaatcattaaaaagaaaatattgaaaggaaaatgttttctttttgaagacttctggcttcattttatactactttggcatggactgtatttattttcaaatggctttttcgtttttgtttttcttggcaagttttattgtgagtttttctaattatgaagcaaaatttcttttctccaccatgctttatgtgatagtatttaaaattgatgtgagttattatgtcaaaaaaactgatctattaaagaagtaattggcctttctgagctgatttttccatcttttgtaattatctttattaaaaaattgtacttggattatcttttgtctgtttattactacaatatgaagtcttgtttcagtggctaatgacatcatttctgtagacttacaatacactctaggtgaaagataatgattacagcttgaaagataactatttgctgtttctttgggaagagtatttatagtaattattacttatctttgcaatagaaattctaccaccttgccctctatagcttagccagttagtatcagtgaagattaacatcccattacaatttatgaaataatacagactctgcaattgagatgtaggagttctttgagttgacccaaagattctcaaaattgaaatggaaattctgaattgaaagaagaaactgaccagaacttgtattgaccagacttgcctatagtatattgctggtttaaaatggaacctgcagacaaaacctgtttcttttactgcatttacatggcatccaggttccattattatttacgtgacatccaggtttctaactcaaggaaataaacacaactgatttatcattcagcaactacttattgtgtgtctgcccattttaagactgtaggagtgtaactgaatataatggaaaaatgctttcactcagagcttacactcagagcttacattctagtagcaggaagcagacaaatgggggtaactcctgctactaagatgtgcaaagaagacaaaacattttaggaacttgccaaaatcagtgaaatctccctttttgtcaggcccacattgattcttttgagattaaaaattacagaatgccagaagataattcagtcaaaagtatttctcttcagtgcagtaaaatattaaaagaaaaaatatttctctacaagcctcttaaatgtttcagacattcacaatagcacctagacttttgtaatgaacagctgtgcacccaccccgacttaacaaatattttacttttgctatatttgcttcggtgtttttttcttaaaatacaccgaaattgaagctctctttgtgtactttgtcgtttgtaatcctccctccctcccagccttaagaagtaatcaccattgtgattattttatccatgtttttgtgaatattttacccatgtttttgtacttttgctacatatttgttatcaatctgtaaacctttatgacattaggaactaagaaacttagtcccttcgttagggggataatgaaatgtatttagtgtttgtgaaacatagatggtatgtatttggacaattctgtaactttgctttttttatttttatttttccatagcttattggggaacaggtggtgtttggttacatgattaagttctttagtggtgatttgtgggattttggtggacccatcacccaagcagtgtacactgcaccctatttgtaatcttttatccctcgcccccctcccaccatgcctcccgtctaccatgatgatcctgttttaaataagaaaataccatttcgcaggctccagatgttctggcatcctccctgtggatttcccagtgcctgcagctcacaggacaacaggggctgtggtagagtcacctatgagatcctggagtagtggatggaggagatggaacagtgaagacggaaactgagctcagtatccgggtgccaggagacaaaggccctttgctttttttcatttaatattctgatctacccctgttgacacatgttaagtatagttcattttgactgctatgtattatgttccattgtgtgaacatactgaaattgtacacttcaatactatactggatctccttgggtgtatttaagaggttttgtttttctaagtagttggttatatacaactaaaacctcaagagaactatctaaagcaatttcagcaaggtgatttggtacagcattaataaacagaaatcagtaacacttagtgaccaagtctgttggaagaacaaagacccccatttgtaataacaaaatttttagaaataatatgtaaagaagctatggttcttgtgtctagtaaggtcaatgtaacatagtaagatgtcagaataccctaatactttaaaaaattcatataggataaaaatgatatttgaaattggcaaggaaagacattattttgtaagtggaattgggacaacaactggtaaccaaatggaaaacccagttttctgccctccactagaagatttaaataggaaaagataaaactaccaaaaacctaaactcttaaagcaaatggattgaagaaggcctaagtgtgacaccaaactcaactataaaagatatatttgataacaaaaaaaaaattagttcagtggaccaacaaaaacttagaagacaagtcaagaaaaatgacaaaagacagagtgggaggcagatttgtaactcatccaggtcaaaaggctcatatctaaagatagtagaggaacaaaatgtataaggatgtgaactgggaaacaaatacatataaatagtttgtaaatatgaaaagatctttaacctcagtaaataaaaagctatagagagacttattttttaacttagttttttaaacctattatgtttatttattttttctttttttgagacggagtctcgctgttgcccaggctggtgtgcaatggcgcaatctcggctcactgcaacctccgcctcccaggttgaagccattctcctgcctcagcctcctgagtagctgggattacaggcgcctgtcaccacgcccagctaattgttcgcatttttagtagagacggggtttcactatgttggccaggctggcctcgaactcctgacctcatgatccacccaccttggccttccaaagtgctgggattacaggtgtgagctgccgcacctggctgtttatctcttttttttagagaaaggatctcggtcacccaggatggagtgtggtagcctgatcatatctcactacatcttagaacttctaggcttagggtattctcccacctcagcctcccaagtagctgggactacaagtgtgcaccatcacacctagctgatttttacatttttattttggagagatggtgtctccctgtgttgcccaggctggtcacaaactcctaggctcaagcgattctcctgactcaggcatgagccaccgtacccggcctaaacctatcatgttacagacttagaaagcaactattgtcaagtgtttgaggaaactcaggtcaggtttggtaaactaagatattaactcaagtaaagctctttaattcatttaatgaaggtgccacattgtctcagttctctatggcatgggtgaatgctgttctaagtcagcattggtactctaagctagttacatcatatctaagctttgcccttctaccagagctgctagcattctgtcaatgggcaattatttgaagttcttacattgaagttagtcacctacatcttctgttttttatggttttgatgtagtaatactgctgaagtttttttgataactgcgattcataatatttgttattcatattgtgatataaatgataagggcttttgaaaacaagtagtaatcatttcaatagcttaggatctccaccataatcttaggaaaattactaacctctgtgcctcagttgcttcatcatttaaaatgaggaaaataatagtccctacttaataggtttgttgtgaggattgagttaataacatagttaatgctcagtaagggttagctgctatttttttttcttttttttttgaaagagtctcactctgttgcccaggttggagtgcagtggcatgatcttggctcactgcatcctctgcttcctaggttcaggtgattctcatgcttcagcctcccaagcagctgggagtacaggtgtgcaccaccacacctggctaatttttgtatatttagtagagacgggttctcaccatattgtccaggctggtcttgaactccttacctcaaatgatccacccgcctgggcctcccaaagtgctgggattacaagcatgagccaccgcgcctggcttgctattgttatgaggtaaaggtagatagatgggtgagagtggtgccaggggaagtgttaaatttttgagtgttcctttagatgccagatgggttgtatctgagccttttattgcagtttgatgcctactagtgtgaagactactaggtcatagtggatagagaagcaatcttttggagacctgattttagcaaggatacgaataatatttgacaactttggggggatcttgatgcctctgtaatttactcaaggataatctcaagaaaaatggcattaagtagattacagaaaaaatagaactatcatattgttattattggctatttacatgagcaatgcggagaaatgtttaggattacagcatttagaagcttctcaattgctgcatttcctcactgtaccacaagatggcagatactgcatttaaaatttttttttctgtgtgttttctcttatagtcacttggtggccatgtaacaagcagagcaacatgtattaacagattctttttgaatgcaatattggattaaaaactttgaattaaactacaa

SEQ ID NO: 365 - DNA, 8980 bp, Homo sapiens
ggaggttgtggggccgccgccgcggagcaccgtccccgccgccgcccgagcccgagcccgagcccgcgcacccgcccgcgccgccgccgccgccgcccgaacagcctcccagcctgggcccccggcggcgccgtggccgcgtcccggctgtcgccgcccgagcccgagcccgcgcgccggcgggtggcggcgcaggctgaggagatgcggcgcggagcgccggagcagggctagagccggccgccgccgcccgccgcggtaagcgcagccccggcccggcgcccgcgggccattgtccgccgcccgccccgcgccccgcgcagcctgcaggccttggagcccgcggcaggtggacgccgccggtccacacccgccccgcgcgcggccgtgggaggcgggggccagcgctggccgcgcgccgtgggacccgccggtccccagggccgcccggccccttctggacctttccacccgcgccgcgaggcggcttcgcccgccggggcgggggcgcgggggtgggcacggcaggcagcggcgccgtctcccggtgcggggcccgcgccccccgagcaggttcatctgcagaagccagcggacgcctctgttcaacttgtgggttacctggctcatgagaccttgccggcgaggctcggcgcttgaacgtctgtgacccagccctcaccgtcccggtacttgtatgtgttggtgggagtttggagctcgttggagctatcgtttccgtggaaattttgagccatttcgaatcacttaaaggagtggacattgctagcaatgagctcccaaagccatccagatggactttctggccgagaccagccagtggagctgctgaatcctgcccgcgtgaaccacatgcccagcacggtggatgtggccacggcgctgcctctgcaagtggccccctcggcagtgcccatggacctgcgcctggaccaccagttctcactgcctgtggcagagccggccctgcgggagcagcagctgcagcaggagctcctggcgctcaagcagaagcagcagatccagaggcagatcctcatcgctgagttccagaggcagcacgagcagctctcccggcagcacgaggcgcagctccacgagcacatcaagcaacaacaggagatgctggccatgaagcaccagcaggagctgctggaacaccagcggaagctggagaggcaccgccaggagcaggagctggagaagcagcaccgggagcagaagctgcagcagctcaagaacaaggagaagggcaaagagagtgccgtggccagcacagaagtgaagatgaagttacaagaatttgtcctcaataaaaagaaggcgctggcccaccggaatctgaaccactgcatttccagcgaccctcgctactggtacgggaaaacgcagcacagttcccttgaccagagttctccaccccagagcggagtgtcgacctcctataaccacccggtcctgggaatgtacgacgccaaagatgacttccctcttaggaaaacagcttctgaaccgaatctgaaattacggtccaggctaaagcagaaagtggccgaaagacggagcagccccctgttacgcaggaaagacgggccagtggtcactgctctaaaaaagcgtccgttggatgtcacagactccgcgtgcagcagcgccccaggctccggacccagctcacccaacaacagctccgggagcgtcagcgcggagaacggtatcgcgcccgccgtccccagcatcccggcggagacgagtttggcgcacagacttgtggcacgagaaggctcggccgctccacttcccctctacacatcgccatccttgcccaacatcacgctgggcctgcctgccaccggcccctctgcgggcacggcgggccagcaggacgccgagagactcacccttcccgccctccagcagaggctctcccttttccccggcacccacctcactccctacctgagcacctcgcccttggagcgggacggaggggcagcgcacagccctcttctgcagcacatggtcttactggagcagccgccggcacaagcacccctcgtcacaggcctgggagcactgcccctccacgcacagtccttggttggtgcagaccgggtgtccccctccatccacaagctgcggcagcaccgcccactggggcggacccagtcggccccgctgccccagaacgcccaggctctgcagcacctggtcatccagcagcagcatcagcagtttctggagaaacacaagcagcagttccagcagcagcaactgcagatgaacaagatcatccccaagccaagcgagccagcccggcagccggagagccacccggaggagacggaggaggagctccgtgagcaccaggctctgctggacgagccctacctggaccggctgccggggcagaaggaggcgcacgcacaggccggcgtgcaggtgaagcaggagcccattgagagcgatgaggaagaggcagagcccccacgggaggtggagccgggccagcgccagcccagtgagcaggagctgctcttcagacagcaagccctcctgctggagcagcagcggatccaccagctgaggaactaccaggcgtccatggaggccgccggcatccccgtgtccttcggcggccacaggcctctgtcccgggcgcagtcctcacccgcgtctgccaccttccccgtgtctgtgcaggagccccccaccaagccgaggttcacgacaggcctcgtgtatgacacgctgatgctgaagcaccagtgcacctgcgggagtagcagcagccaccccgagcacgccgggaggatccagagcatctggtcccgcctgcaggagacgggcctccggggcaaatgcgagtgcatccgcggacgcaaggccaccctggaggagctacagacggtgcactcggaagcccacaccctcctgtatggcacgaaccccctcaaccggcagaaactggacagtaagaaacttctaggctcgctcgcctccgtgttcgtccggctcccttgcggtggtgttggggtggacagtgacaccatatggaacgaggtgcactcggcgggggcagcccgcctggctgtgggctgcgtggtagagctggtcttcaaggtggccacaggggagctgaagaatggctttgctgtggtccgcccccctggacaccatgcggaggagagcacgcccatgggcttttgctacttcaactccgtggccgtggcagccaagcttctgcagcagaggttgagcgtgagcaagatcctcatcgtggactgggacgtgcaccatggaaacgggacccagcaggctttctacagcgaccccagcgtcctgtacatgtccctccaccgctacgacgatgggaacttcttcccaggcagcggggctcctgatgaggtgggcacagggcccggcgtgggtttcaacgtcaacatggctttcaccggcggcctggacccccccatgggagacgctgagtacttggcggccttcagaacggtggtcatgccgatcgccagcgagtttgccccggatgtggtgctggtgtcatcaggcttcgatgccgtggagggccaccccacccctcttgggggctacaacctctccgccagatgcttcgggtacctgacgaagcagctgatgggcctggctggcggccggattgtcctggccctcgagggaggccacgacctgaccgccatttgcgacgcctcggaagcatgtgtttctgccttgctgggaaacgagcttgatcctctcccagaaaaggttttacagcaaagacccaatgcaaacgctgtccgttccatggagaaagtcatggagatccacagcaagtactggcgctgcctgcagcgcacaacctccacagcggggcgttctctgatcgaggctcagacttgcgagaacgaagaagccgagacggtcaccgccatggcctcgctgtccgtgggcgtgaagcccgccgaaaagagaccagatgaggagcccatggaagaggagccgcccctgtagcactccctcgaagctgctgttctcttgtctgtctgtctctgtcttgaagctcagccaagaaactttcccgtgtcacgcctgcgtcccaccgtggggctctcttggagcacccagggacacccagcgtgcaacagccacgggaagcctttctgccgcccaggcccacaggtctcgagacgcacatgcacgcctgggcgtggcagcctcacagggaacacgggacagacgccggcgacgcgcagacacacggacacgcggaagccaagcacactctggcgggtcccgcaagggacgccgtggaagaaaggagcctgtggcaacaggcggccgagctgccgaattcagttgacacgaggcacagaaaacaaatatcaaagatctaataatacaaaacaaacttgattaaaactggtgcttaaagtttattacccacaactccacagtctctgtgtaaaccactcgactcatcttgtagcttatttttttttaaagaggacgttttctacggctgtggcccgcctctgtgaaccatagcggtgtgcggcggggggtctgcacccgggtgggggacagagggacctttaaagaaaacaaaactggacagaaacaggaatgtgagctgggggagctggcttgagtttctcaaaagccatcggaagatgcgagtttgtgcctttttttttattgctctggtggatttttgtggctgggttttctgaagtctgaggaacaatgccttaagaaaaaacaaacagcaggaatcggtgggacagtttcctgtggccagccgagcctggcagtgctggcaccgcgagctggcctgacgcctcaagcacgggcaccagccgtcatctccggggccaggggctgcagcccggcggtccctgttttgctttattgctgtttaagaaaaatggaggtagttccaaaaaagtggcaaatcccgttggaggttttgaagtccaacaaattttaaacgaatccaaagtgttctcacacgtcacatacgattgagcatctccatctggtcgtgaagcatgtggtaggcacacttgcagtgttacgatcggaatgctttttattaaaagcaagtagcatgaagtattgcttaaattttaggtataaataaatatatatatgtataatatatattccaatgtattccaagctaagaaacttacttgattcttatgaaatcttgataaaatatttataatgcatttatagaaaaagtatatatatatatataaaatgaatgcagattgcgaaggtccctgcaaatggatggcttgtgaatttgctctcaaggtgcttatggaaagggatcctgattgattgaaattcatgttttctcaagctccagattggctagatttcagatcgccaacacattcgccactgggcaactaccctacaagtttgtactttcattttaattattttctaacagaaccgctcccgtctccaagccttcatgcacatatgtacctaatgagtttttatagcaaagaatataaatttgctgttgatttttgtatgaattttttcacaaaaagatcctgaataagcattgttttatgaattttacatttttcctcaccatttagcaattttctgaatggtaataatgtctaaatctttttcctttctgaattcttgcttgtacatttttttttacctttcaaaggtttttaattatttttgtttttatttttgtacgatgagttttctgcagcgtacagaattgttgctgtcagattctattttcagaaagtgagaggagggaccgtaggtcttttcggagtgacaccaacgattgtgtctttcctggtctgtcctaggagctgtataaagaagcccaggggctctttttaactttcaacactagtagtattacgaggggtggtgtgtttttcccctccgtggcaagggcagggagggttgcttaggatgcccggccaccctgggaggcttgccagatgccgggggcagtcagcattaatgaaactcatgtttaaacttctctgaccacatcgtcaggatagaattctaacttgagttttccaaagaccttttgagcatgtcagcaatgcatggggcacacgtggggctctttacccacttgggtttttccactgcagccacgtggccagccctggattttggagcctgtggctgcaaggaacccagggacccttgttgcctggtgaacctgcagggagggtatgattgcctgaccaggacagccagtctttactctttttctcttcaacagtaactgacagtcacgttttactggtaacttattttccagcacatgaagccaccagtttcattccaaagtgtatattgggttcagacttgggggcagaagttcagacacaccgtgctcaggagggacccagagccgagtttcggagtttggtaaagtttacagggtagcttctgaaattaactcaaacttttgaccaaatgagtgcagattcttggattcacttggtcactgggctgctgatggtcagctctgagacagtggtttgagagcaggcagaacggtcttgggacttgtttgactttcccctccctggtggccactctttgctctgaagcccagattggcaagaggagctggtccattccccattcatggcacagagcagtggcagggcccagctagcaggctcttctggcctccttggcctcattctctgcatagccctctggggatcctgccacctgccctcttaccccgccgtggcttatggggaggaatgcatcatctcactttttttttttaagcagatgatgggataacatggactgctcagtggccaggttatcagtggggggacttaattctaatctcattcaaatggagacgccctctgcaaaggcctggcagggggaggcacgtttcatctgtcagctcactccagcttcacaaatgtgctgagagcattactgtgtagccttttctttgaagacacactcggctcttctccacagcaagcgtccagggcagatggcagaggatctgcctcggcgtctgcaggcgggaccacgtcagggagggttccttcatgtgttctccctgtgggtccttggacctttagcctttttcttcctttgcaaaggccttgggggcactggctgggagtcagcaagcgagcactttatatccctttgagggaaaccctgatgacgccactgggcctcttggcgtctgccctgccctcgcggcttcccgccgtgccgcagcgtgcccacgtgcccacgccccaccagcaggcggctgtcccggaggccgtggcccgctgggactggccgcccctccccagcgtcccagggctctggttctggagggccactttgtcaaggtgtttcagtttttctttacttcttttgaaaatctgtttgcaaggggaaggaccatttcgtaatggtctgacacaaaagcaagtttgatttttgcagcactagcaatggactttgttgtttttctttttgatcagaacattccttctttactggtcacagccacgtgctcattccattcttctttttgtagactttgggcccacgtgttttatgggcattgatacatatataaatatatagatataaatatatatgaatatatttttttaagtttcctacacctggaggttgcatggactgtacgaccggcatgactttatattgtatacagattttgcacgccaaactcggcagctttggggaagaagaaaaatgcctttctgttcccctctcatgacatttgcagatacaaaagatggaaatttttctgtaaaacaaaaccttgaaggagaggagggcggggaagtttgcgtcttattgaacttattcttaagaaattgtactttttattgtaagaaaaataaaaaggactacttaaacatttgtcatattaagaaaaaaagtttatctagcacttgtgacataccaataatagagtttattgtatttatgtggaaacagtgttttagggaaactactcagaattcacagtgaactgcctgtctctctcgagttgatttggaggaattttgttttgttttgttttgtttgtttccttttatctccttccacgggccaggcgagcgccgcccgccctcactggccttgtgacggtttattctgattgagaactgggcggactcgaaagagtccccttttccgcacagctgtgttgactttttaattacttttaggtgatgtatggctaagatttcactttaagcagtcgtgaactgtgcgagcactgtggtttacaattatactttgcatcgaaaggaaaccatttcttcattgtaacgaagctgagcgtgttcttagctcggcctcactttgtctctggcattgattaaaagtctgctattgaaagaaaaagaaagcgaacagtttttgtttgttttttttgccgtgtgtgctccatagtggaggcgctattttccaattgatgagaatgacaaacatatataatctatctatctatctatctatctatctatctatacagggggcttgaaccttactcacccaagagcttcttacggaatgtggtagaaaaccaagttgtaacgacactgtaacctacctgatgcctgttcgcgcccgccgtgagctgcgcactggccgtggccaccattcacctctgtaatttaatccgtttctcttggattgtctggacgtgcccgatggttctttcttttgctcagtggagttggaggttttgtgtttggttttctcattcttgtcttgttttgtgtgggtggattttcaccgaccaatgatatcctcttctgacggtcaccttctttccacttcactggagtccagtattctgtaccacatcacgcaacgtgttatcttgtggtgtaaataaagactgcgttacttgccctcccaaaaa

SEQ ID NO: 366 - DNA, 2064 bp, Homo sapiens
aaatggccccgtagggcaacaaggatggttagttttgaccctacttatttgtgccataaaaacaatcgatcctaattgacagctatttggacttttacatctgccaaacccttttccttgaactgtggtcactaaatgaggggagtctggtctgggaagtcccatccattccttcaataggatggggagcggtgatagtgtctccggcgatctcaagaataggagggaatgttgaccagggagcaccgctgcggccgatcagaggagcaggaactggaaccctggccgagtccgaaaaaagccagatctggaaggtggctgcggaacggttttaagcggaagatggaggagccggaggaaccggcggacagtgggcagtcgctggtcccggtttatatctatagtcccgagtatgtcagtatgtgtgactccctggccaagatccccaaacgggccagtatggtgcattctttgattgaagcatatgcactgcataagcagatgaggatagttaagcctaaagtggcctccatggaggagatggccaccttccacactgatgcttatctgcagcatctccagaaggtcagccaagagggcgatgatgatcatccggactccatagaatatgggctaggttatgactgcccagccactgaagggatatttgactatgcagcagctataggaggggctacgatcacagctgcccaatgcctgattgacggaatgtgcaaagtagcaattaactggtctggagggtggcatcatgcaaagaaagatgaagcatctggtttttgttatctcaatgatgctgtcctgggaatattacgattgcgacggaaatttgagcgtattctctacgtggatttggatctgcaccatggagatggtgtagaagacgcattcagtttcacctccaaagtcatgaccgtgtccctgcacaaattctccccaggatttttcccaggaacaggtgacgtgtctgatgttggcctagggaagggacggtactacagtgtaaatgtgcccattcaggatggcatacaagatgaaaaatattaccagatctgtgaaagtgtactaaaggaagtataccaagcctttaatcccaaagcagtggtcttacagctgggagctgacacaatagctggggatcccatgtgctcctttaacatgactccagtgggaattggcaagtgtcttaagtacatccttcaatggcagttggcaacactcattttgggaggaggaggctataaccttgccaacacggctcgatgctggacatacttgaccggggtcatcctagggaaaacactatcctctgagatcccagatcatgagtttttcacagcatatggtcctgattatgtgctggaaatcacgccaagctgccggccagaccgcaatgagccccaccgaatccaacaaatcctcaactacatcaaagggaatctgaagcatgtggtctagttgacagaaagagatcaggtttccagagctgaggagtggtgcctataatgaagacagcgtgtttatgcaagcagtttgtggaatttgtgactgcagggaaaatttgaaagaaattacttcctgaaaatttccaaggggcatcaagtggcagctggcttcctggggtgaagaggcaggcaccccagagtcctcaactggacctaggggaagaaggagatatcccacatttaaagttcttatttaaaaaaacacacacacacaaatgaaatttttaatctttgaaaattatttttaagcgaattggggaggggagtattttaatcatcttaaatgaaacagatcagaagctggatgagagcagtcaccagtttgtagggcaggaggcagctgacaggcagggtttgggcctcaggaccatccaggtggagccctgggagagagggtactgatcagcagactgggaggtggggagaagtccgctggtgttgttttagtgttatatatctttggtttttttaataaaatctttgaaaacctaaaaaaaaaaaaaaaaaaaaaaaaaaaaaaaaaaaaaaaaaaaaaaaaaaa

SEQ ID NO: 367 - DNA, 4273 bp, Homo sapiens
actcgtctggcaccagcccgggccgcgcccgggacctcatttcggacctcggtttccctttgcgtggggctcgcagctgccaccgcttccccgcggagcatggggctgcctcgccgggcaggggacgcggcggagctgcgcaagagcctgaagccgctgctggagaagcgccggcgcgcgcgcatcaaccagagcctgagccagcttaaggggctcatcctgccgctgctgggccgggagaactccaactgctcgaagctagagaaggcagacgtcctggaaatgaccgtgcgcttcctgcaggagctgcctgcgtcctcatggcccacggcagcgcccctgccttgcgacagctaccgcgagggctacagcgcctgtgtggcgcgcctggcccgcgtgctgcccgcctgccgtgtcctggagcccgccgtgagcgcgcgcctgctggagcacctgtggcggagagcggccagcgccaccctggacggcgggcgcgctggggattccagtggcccgtctgcccccgccccagcgcccgcgtctgccccagagcccgcatccgctccggtgccctcgccgccctcgcctccctgcggccctggcctctggcggccgtggtagcccctcggccgatccacagaccctgccgactgcttgggaccttggggcactggacaggttgaagctcttggtggcggctgctgttcccatcattaggggccagcccagtacccacacccaggccggaagccggctgtttgtgactggcgtggcagactgaaagccctggggctggggctcggctcagggaataaaaggagcgtccctgcttcacccccaacttggctggagaagaaaggacaagaggcagcagggtgaagaagaagccccccatcccagctggtggagatagttctggaactggaccccgcagctgcgtgggcagccgacacacccaccccagcactggcaccagaccagagccagagccaggacctgggcaaagtgcagccgtgcaccctgcctggtcactgctctcccagccctgcctgggcctacctcctgcccagctctgcttgggaccctctgggcatgcagcagcagtagcctaagggctctggtcacttccagggctctacagggcagcagagcagagcaaaagggtgcatatgctgggagctgtcacctccactcctaggcttttctgcctagagcagaattataggggcagtatacatccaggggtctgtgcggtggggctgggggattccttaagtgactttgggaaggatttgttttcccgagcatcaatttcacacctgggcattgcaccccaggctatgcagtctttcagtgtgaggaaggggcagaacaagaatgaggcggccccgtggcctcaaggaagcttgtggctttggaggatctgactccagcagagtctgtgccaatgtggggtgagcagggcccctgccatggagcagcaggaatttgagggatggagcaggttaaagaatgggaaacatcttcacttgtttttttttcttgcaaactactccctgctactcattgagactggttactggaagcaacttgttaagatttttctttctgggcgggcgcggtggctcacgcctgtaatcccagcactttgggaggccaaggcgggtggatcacctgaggtcaggagttcgagaccagcttagccaatatggtgaaaccccgtctctactaaaaatacaaaaattagccgggtgtggtggcatgtgccagctactcgggaggctgaggcaagagaatcacttgaacctcggaggctgaagttgcagtgagccaagattgagccattgctctccagcctgggtgacacagcaagactctgtctcaaaaaaaattttttatttctttcttttccatggaggcctagagtccctgtgaaggctaggaaggggctgctgatcccaggagtgcccacgaggagtggggggcactgttggcccataatcaggcaaacacccatcatttcatgggggattcatgaaatcatagtcaggcaaacacccgtcatttcatggctaagcatttgcagaaggtggaggattctcccccgagtccccaaatcagcagcctgtgctagggaccagagcaccgggggcaagaagacagaaccaatgtgggagtggggatggtcactaaatctgactgtgccacacaagcccatgatgaccttggcactggtttgggtggcaggatatgaaggaagctgtaggcattattgaaaaaatcattgttcagccaacagggtgaggctcccagcaaggccgtgccatcttcccacctccctgtgcccagagggttagactgtaagctcccggagggcgaggctggggctgagcgtgcctccacgtccccaaggcacagggtgcacagtgggtgctcactgaatatagtggactagtgagcagaggatgagaggactaccctgtaatgagccttggacagtctggcatttgccttaactcccactcccatgccctgggatcactgttggatatttactccatgaggacaaatactggggaggtgtggagaggagggagggcaggttcctcttactttcacccattgctgagaatgagcgcctgttggcactgcctttgtgagcctccgggagcaggtaacctgcggcccaagcccgcctaggactccacatcaggcaggcacaggactggccccttgtcctcataaaaactctcagtacagcttaaactctgtaagatctaaccagccaggaggaccctcgcttcctctccgccatgcttgccacctcttgcttctgagagtccatctcagttcgcagttctgtgacttgcattgacctggctccaatcaagctacaactcaagcagtcacggggagaaggattgtagatgggccagtgactcacagggtcaggcactcgggggagcctgagtcaggaggtcagtgggccctggaagggagggggcaagcctgggtgggtaaggttctgggccccaggcaagaaggcagagtttctccgcaggggtgtgtgcaagagctagctgcgcagaaggtctccgctggctctccaagccgggcttgtgaaataggaacgccaacatcctcctccacaggcagtggcaggcacctcctcctcaggtgccccccaagccctatctgatgggcaaaggtgaacgcagggcggtgggcttttcctgtgcagagggagactgattcaaagggtcatttatgacctttcacaagtcccacatcctgcccaatggccaggtcttgggatgctgttgcaagatggttctgtgactccatgtgactgtctgatgattgccccagctggggaaaaggctcccatgtctctttctcataaaaccagtgggcaaggccgggcgcagtggctcacgtctgtaatgccagcacttcgggagaccaaggtgggcggatcacctgaggtcaggagttcaagaccagcctgaccaacatggtgaaaccccgtctctacaaaaatatggaaattagctgggcatgacggcgggtgcctgtaaccccagctacttgggaggctgaggagggataatcagttgaacccaggaggtggaggttgcagtgagccgagatcgcgccactgcactccagcctgggtgacagagcaagactccatctcaaaaacaaacaaacaaaaaactagcgggtgaaatgattcagtgacctaaggacagccagagcactaagctgctgggaacccatctgtgctgaaatgtagatttcccaggaaactcaggcttgggacaggcgcctacctgctcctcgggcaccaggtgattaggagaggtcgaatctcatttccacgtgagtgaggataaagactgggctgccaaggaggactcctcataaacattgacaaattgctctgccccgcctgtgatcccagacgactcctgcagtctgggatcctgagtgtcctgtgggttcatctcggatgggcgctgcataaacagcctgcagggaacgtctgggagaaccagcttcacaacagatataataaggaagaagtttgaaatattgcaagaattgcgaaagtgtgacacacagatacaaagtgggcacatgctcgtgggaaaatgttgccaatagacttgcttgactctggagttaccccgaaccttcaatttgtttaaaaaaaaaaaaaggcaatatcttgacgtgcaataaagtgaactgcaataaaaaaaaaaaaaaa

SEQ ID NO: 368 - DNA, 992 bp, Homo sapiens
gcgcttggccttgcccgcgcccgctcgcctcgtctcgcccggcctccccgcgtcgcctcgtcgcctgttccgcgccaggcatggcccccagcactgtggccgtggagctgctcagccccaaagagaaaaaccgagtaagtaccagactcgcccggcgcgctgtccccgcggcctccggtcctcgggggtccctgcgccgtgccgggccagcctgacaccccctcctcccgcagctgcggaagccggtggtggagaagatgcgccgcgaccgcatcaacagcagcatcgagcagctgaagctgctgctggagcaggagttcgcgcggcaccagcccaactccaagctggagaaggccgacatcctggagatggctgtcagctacctgaagcacagcaaaggtgagcgcgcccgggccccccgcgccccgagttcccaccgcgccccggctcccccgcgccccgccggccgctcaccgccgccgcgtctccccgcagccttcgtcgccgccgccgggcccaagagcctgcaccaggactacaggcgaaggctactcgtggtgcctgcaggaagccgtggaagttcctggacgcttcccacgcccgccaggcgaacacgcaggattgaagactggctggtaaccccctttccaggcggggccccccgggggcgggggacctcggcccgggggcccggcccaaagggagccccaaagggggggccggggggcgcccggaggcccccccgggcccggggggttcttcccgcccaaggggcgaacccgtcgcgcgccgccgggcctgtccccgggaacaccaatccccaggccctgggggggcgctttttggcgggggacccctgggggggacccgcgggggggataataccggggggcttaaccgcgggcgcctgacccgaatcccgcggggggcggaaagcggggcgccccgttcccccgcttgggccactgtagaaaacgcacctatccccccca

SEQ ID NO: 369 - DNA, 1386 bp, Homo sapiens
ggaagccgcgaggagcgcggacggctgggctgctgctgggcggccgcggggcagcggagggcgccggcactccggtccccgccgctccccgtccccgctgctcctagcccctgccgcgtccccggcggagcgggcatggcgccacccgcggcgcctggccgggaccgtgtgggccgtgaggatgaggacggctgggagacgcgaggggaccgcaaggcccggaagcccctggtggagaagaagcggcgcgcgcggatcaacgagagcctgcaggagctgcggctgctgctggcgggcgccgaggtgcaggccaagctggagaacgccgaagtgctggagctgacggtgcggcgggtccagggtgtgctgcggggccgggcgcgcgagcgcgagcagctgcaggcggaagcgagcgagcgcttcgctgccggctacatccagtgcatgcacgaggtgcacacgttcgtgtccacgtgccaggccatcgacgctaccgtcgctgccgagctcctgaaccatctgctcgagtccatgccgctgcgtgagggcagcagcttccaggatctgctgggggacgccctggcggggccacctagagcccctggacggagtggctggcctgcggggggcgctccgggatccccaatacccagccccccgggtcctggggacgacctgtgctccgacctggaggaggcccctgaggctgaactgagtcaggctcctgctgaggggcccgacttggtgcccgcagccctgggcagcctgaccacagcccaaattgcccggagtgtctggaggccttggtgaccaatgccagccagagtcctgcgggggtgggcccggccctccctggatctcctccctcctcccaggggttcagatgtggtggggtagggccctggaagtctcccaggtcttccctccctcctctgatggatggcttgcagggcagcccctggtaaccagcccagtcaggccccagccccgtttcttaagaaacttttagggaccctgcagctctggagtgggtggagggagggagctacgggcaggaggaagaattttgtagagctgccagcgctctcccaggttcacccacccaggcttcaccagccctgtgcgggctctgggggcagaggtggcagaaatggtgctgggcactagtgttccaggcagccctgggctaaacaaaagcttgaacttgccacttcagcggggagatgagaggcaggtgcactgagctgcactgcccagagctgtgatgctctgtacatcttgtttgtagcacacttgagtttgtgtattccattgacatcaaatgtgacaattttactaaataaagaattttggagttagttacccttgaaaaaaaaaaaaaaaaaa

SEQ ID NO: 370 - DNA, 1684 bp, Homo sapiens
gaggagcaatggtcacccgggatcgagctgagaatagggacggccccaagatgctcaagccgcttgtggagaagcggcgccgggaccgcatcaaccgcagcctggaagagctgaggctgctgctgctggagcggacccgggaccagaacctccggaacccgaagctggagaaagcggagatattggagttcgccgtgggctacttgagggagcgaagccgggtggagcccccgggggttccccggtccccagtccaggacgccgaggcgctcgccagctgctacttgtccggtttccgcgagtgcctgcttcgcttggcggccttcgcgcacgacgccagcccggccgcccgcgcccagctcttctccgcgctgcacggctatctgcgccccaaaccgccccggcccaagccggtagatccgaggcctccagcgccgcgcccatccctggaccccgccgcaccggcccttggccctgcgctgcaccagcgccccccagtgcaccagggccaccctagcccgcgctgcgcatggtccccatccctctgctccccgcgcgccggggattctggcgcgccggcgcccctcaccggactgctgccgccgccaccgccgcctcacagacaagacggggcgcccaaggccccgctgcccccgccgcccgctttctggagaccttggccctgagccttggggggtggtgggggcggggtctaggggtggggtagagactccagcccgagggcagcagagggacccgggcgtccgggcgagcaggtgttggggagggcagtggggcgcgcgggctcagcgcgcgggtgagatgtggtctatattagagtatctatataaatatatatttccctggttcctgtcccttttccctgccccaacttctcccttgcgtctaggattgtactctctctgcccctcagcccagtcccagtcccttcccgagtccctagtgcatggaataaagtggttattaaatccccgtgtgtccccgagccaggggcctgcctttatctcgacgtccacgcccactttcccttcccttctgtctcccaccctcagtcctgctctccatggcccaagccccggggcagacaggtaagtaaagaagagagcagagcgggaactgagatcgaaattgaaaccaggtggaaagagagagatagggtagggggagaagggatgggggcctttaagaaaaaaacggataaaaaggaaaaattgaaataaaatcgactctggtgggattcgaacccacaacctttgaattgctctattcgtcactagaagtccaatgcgctatccattgcgccacagagccacccgacgaacggcggcgtcttgtagcttacgggtactagagtgggaatggggcagggttggggagcggggctaagggacttgggcgggacatgccaggagggcgcggtttggatctcagaggccaagccaggtagaggtagcgggcgcaaagcatgttagccaggtgagagagagggcgcacatgggtcgaaaaaacagggagggagagcaaccgaaaatggctgagcgagcgagtgcagagctccggctgcccgcttggggggtgtttccggctcaggcgctccccactcccagatatagtcccacccaaataaactagttttgttgtaaattaaaaaaaaaaaaaaaaa

SEQ ID NO: 371 - DNA, 1182 bp, Homo sapiens
ccacatttgtgcatcacttctttagagaaagttaagtctgtgttctgcttaggagagataacactttttgtccctgtaggtggcccccctggtgtagccattagttgctaattacttgcaaacaaataaacaattaactccttaagctgctggctgggcaagtgttcattgacatgctaaaactttctaagacaggattttaattagtgacgttctaaatccagcccccttgtcagcggagctataaggtgaactgcaggaagatcccagccctatacacgtggggcagagccagcagaggccagagctgttgctctgtgcagaccacgagaggatgtctcccagccttcaggaaggcgctcagctcggggaaaacaaaccctcaacttgctccttttcaattgagagaatcttaggactggaccagaagaaagactgtgttccattaatgaaaccccacaggccctgggcagacacctgcagctcatcagggaaagatggtaacttatgtctacatgtcccaaatcctcccagtgggatttcattccctagcgtggtggatcacccaatgccagaagaaagagcttcgaaatatgaaaattacttttcagcctcagaaagactgtctttgaaaagagagttgagttggtatagaggccgaagaccaagaactgcttttactcaaaaccagattgaagtgttagaaaatgtctttagagtaaactgctatcctggtatcgatattagagaagacttagctcaaaaattgaatctagaggaagacagaatccagatttggtttcaaaatcggcgtgcaaaactgaaaaggtcccatagagaatcacagtttctaatggcgaaaaaaaatttcaacacaaatctgctggaatagatagaaaactaaacaagtgaaattatcttctaattgcagagcatgaagaatcagtggaaatattaagtgttaaaatgtgatgttttctttcctgcatttaatctgaatattgtcattttttctgaaaatatattgtaaatactattatagcatggtacatatttgggcacttttagttatagtaaagaccttttatatatattttaataaacattttcagaaaagattgctattttttaagtaagccaaattaatctaataaattagtttgttaaaatcaaaaaaaaaaa

SEQ ID NO: 372 - DNA, 2319 bp, Homo sapiens
ttccccactcccccgccctccccagggccctgggaaggggctcagcgtgggaaaggatggttgagttttaaccagaggcaaagcgtgagcgggatcagtgtgtgcggaacgcaagcagccgagagcggagaggcgccgctgtagttaactcctccctgcccgccgcgccgaccctccccaggaacccccagggagccagcatgaagcgagctcaccccgagtacagctcctcggacagcgagctggacgagaccatcgaggtggagaaggagagtgcggacgagaatggaaacttgagttcggctctaggttccatgtccccaactacatcttcccagattttggccagaaaaagacggagaggaataattgagaagcgccgacgagaccggatcaataacagtttgtctgagctgagaaggctggtacccagtgcttttgagaagcagggatctgctaagctagaaaaagccgagatcctgcagatgaccgtggatcacctgaaaatgctgcatacggcaggagggaaaggttactttgacgcgcacgcccttgctatggactatcggagtttgggatttcgggaatgcctggcagaagttgcgcgttatctgagcatcattgaaggactagatgcctctgacccgcttcgagttcgactggtttcgcatctcaacaactacgcttcccagcgggaagccgcgagcggcgcccacgcgggcctcggacacattccctgggggaccgtcttcggacatcacccgcacatcgcgcacccgctgttgctgccccagaacggccacgggaacgcgggcaccacggcctcacccacggaaccgcaccaccagggcaggctgggctcggcacatccggaggcgcctgctttgcgagcgccccctagcggcagcctcggaccggtgctccctgtggtcacctccgcctccaaactgtcgccgcctctgctctcctcagtggcctccctgtcggccttccccttctctttcggctccttccacttactgtctcccaatgcactgagcccttcagcacccacgcaggctgcaaaccttggcaagccctatagaccttgggggacggagatcggagctttttaaagaactgatgtagaatgagggaggggaaagtttaaaatcccagctgggctggactgttgccaacatcaccttaaagtcgtcagtaaaagtaaaaaggaaaaaggtacactttcagataattttttttttaaagactaaaggtttgttggtttacttttatcttttttaatgtttttttcatcatgtcatgtattagcagtttttaaaaactagttgttaaattttgttcaagacattaaattgaaatagtgagtataagccaacactttgtgataggtttgtactgtgcctaatttactttgtaaaccagaatgattccgtttttgcctcaaaatttggggaatcttaacatttagtatttttggtctgtttttctccttgtatagttatggtctgtttttagaattaattttccaaaccactatgcttaatgttaacatgattctgtttgttaatattttgacagattaaggtgttgtataaataatattcttttggggggaggggaactatattgaattttatatttctgagcaaagcgttgacaaatcagatgatcagctttatccaagaaagaagactagtaaattgtctgcctcctatagcagaaaggtgaatgtacaaactgttggtggccctgaatccatctgaccagctgctggtatctgccaggactggcagttctgatttagttaggagagagccgctgataggttaggtctcatttggagtgttggtggaaaggaaactgaaggtaattgaatagaatacgcctgcatttaccagccccagcaacacaaagaatttttaatcacacggatctcaaattcacaaatgttaacatggataagtgatcatggtgtgcgagtggtcaattgagtagtacagtggaaactgttaaatgcataacctaattttcctgggactgccatattttcttttaactggaaatttttatgtgagttttccttttggtgcatggaactgtggttgccaaggtatttaaaagggctttcctgcctccttctctttgatttatttaatttgatttgggctataaaatatcatttttcaggtttattcttttagcaggtgtagttaaacgacctccactgaactgggtttgacctctgttgtactgatgtgttgtgactaaataaaaaagaaagaacaaagtaaaaaaaaaaaaaaaaaaaaaaaaaaa

SEQ ID NO: 373 - DNA, 2672 bp, Homo sapiens
gcgtggccggcgccggctcttgcggccgagcagagttgcggcgtgggaaagagccgctaggagcagaccgcgccgccgccggagccgcgcctgcccaggcccggggagggaggaggcgggcgtcagggtgctgcgccccgctcggcgtccgagcttccggccgggctgtgccccgcgcggtcttcgccgggatgaagcgcccctgcgaggagacgacctccgagagcgacatggacgagaccatcgacgtggggagcgagaacaattactcggggcaaagtactagctctgtgattagattgaattctccaacaacaacatctcagattatggcaagaaagaaaaggagagggattatagagaaaaggcgtcgggatcggataaataacagtttatctgagttgagaagacttgtgccaactgcttttgaaaaacaaggatctgcaaagttagaaaaagctgaaatattgcaaatgacagtggatcatttgaagatgcttcaggcaacagggggtaaaggctactttgacgcacacgctcttgccatggacttcatgagcataggattccgagagtgcctaacagaagttgcgcggtacctgagctccgtggaaggcctggactcctcggatccgctgcgggtgcggcttgtgtctcatctcagcacttgcgccacccagcgggaggcggcggccatgacatcctccatggcccaccaccatcatccgctccacccgcatcactgggccgccgccttccaccacctgcccgcagccctgctccagcccaacggcctccatgcctcagagtcaaccccttgtcgcctctccacaacttcagaagtgcctcctgcccacggctctgctctcctcacggccacgtttgcccatgcggattcagccctccgaatgccatccacgggcagcgtcgccccctgcgtgccacctctctccacctctctcttgtccctctctgccaccgtccacgccgcagccgcagcagccaccgcggctgcacacagcttccctctgtccttcgcgggggcattccccatgcttcccccaaacgcagcagcagcagtggccgcggccacagccatcagcccgcccttgtcagtatcagccacgtccagtcctcagcagaccagcagtggaacaaacaataaaccttaccgaccctgggggacagaagttggagctttttaaatttttcttgaacttcttgcaatagtaactgaatgtcctccatttcagagtcagcttaaaacctctgcaccctgaaggtagccatacagatgccgacagatccacaaaggaacaataaagctatttgagacacaaacctcacgagtggaaatgtggtattctcttttttttctctcccttttttgtttggttcaaggcagctcggtaactgacatcagcaacttttgaaaacttcacacttgttaccatttagaagtttcctggaaaatatatggaccgtaccatccagcagtgcatcagtatgtctgaattggggaagtaaaatgccctgactgaattctcttgagactagatgggacatacatatatagagagagagtgagagagtcgtgtttcgtaagtgcctgagcttaggaagttttcttctggatatataacattgcacaagggaagacgagtgtggaggataggttaagaaaggaaagggacagaagtcttgcaataggctgcagacattttaataccatgccagagaagagtattctgctgaaaccaacaggttttactggtcaaaatgactgctgaaaataattttcaagttgaaagatctagttttatcttagtttgccttctttgtacagacatgccaagaggtgacatttagcagtgcattggtataagcaattatttcatcagttctcagattaacaagcatttctgctctgcctgcaggcccccaggcacttttttttttggatggctcaaaatatggtgctgctttatataaaccttacatttatatagtgcacctatgagcagttgcctaccatgtgtccaccagaggctatttaattcatgccaacttgaaaactctccagtttgtaggagtttggtttaatttattcagtttcattaggactatttttatatatttatcctcttcattttctcctaatgatgcaacatctattcttgtcaccctttgggagaagttacatttctggaggtgatgaagcaaggagggagcactaggaagagaaaagctacaatttttaaagctctttgtcaagttagtgattgcatttgatcccaaaacaagatgaatgtatgcaatgggatgtacataagttatttttgcccatgcctaaactagtgctatgtaatggggttgtggttttgtttttttcgatttcgtttaatgacaaaataatctcttaatatgctgaaatcaagcacgtgagagtttttgtttaaaagataagagacacagcatgtattatgcacttcatttctctactgtgtggagaaagcaataaacattatgagaatgttaaacgttatgcaaaattatacttttaaatatttgttttgaaattactgtacctagtcttttttgcattactttgtaacctttttctatgcaagagtctttacataccactaattaaatgaagtcctttttgacta

SEQ ID NO: 374 - DNA, 4131 bp, Homo sapiens
ccgactgggagccttagccgcggggctgagaccaggcagcctgcgttcgccatgaagcgacccaaggagccgagcggctccgacggggagtccgacggacccatcgacgtgggccaagagggccagctgagccagatggccaggccgctgtccacccccagctcttcgcagatgcaagccaggaagaaacgcagagggatcatagagaaacggcgtcgagaccgcatcaacagtagcctttctgaattgcgacgcttggtccccactgcctttgagaaacagggctcttccaagctggagaaagccgaggtcttgcagatgacggtggatcacttgaaaatgctccatgccactggtgggacaggattctttgatgcccgagccctggcagttgacttccggagcattggttttcgggagtgcctcactgaggtcatcaggtacctgggggtccttgaagggcccagcagccgtgcagaccccgtccggattcgccttctctcccacctcaacagctacgcagccgagatggagccttcgcccacgcccactggccctttggccttccctgcctggccctggtctttcttccatagctgtccagggctgccagccctgagcaaccagctcgccatcctgggaagagtgcccagccctgtcctccccggtgtctcctctcctgcttaccccatcccagccctccgaaccgctccccttcgcagagccacaggcatcatcctgccagcccggaggaatgtgctgcccagtcgaggggcatcttccacccggagggcccgccccctagagaggccagcgacccctgtgcctgtcgcccccagcagcagggctgccaggagcagccacatcgctcccctcctgcagtcttcctccccaacaccccctggtcctacagggtcggctgcttacgtggctgttcccacccccaactcatcctccccagggccagctgggaggccagcgggagccatgctctaccactcctgggtctctgaaatcactgaaatcggggctttctgagctgccccttcaccaccccgccccaaggaataaggaaggttcttttaccaggagcccaaaaaagggcactgccttttctgctttgcttcatggactggctcatatgtgaaggcacgttctccagccatcagaggccccctcctcctccaacccatctctccttctcactgttatcccagcttatccacccagctctcctggagctgttctggtctcagaggcttggttccatttctcacctgaacagatgagtcctgggagagaccctcagagatccgcccagacccctctcctgccctctgcacaccagcagcaggcatgaaccttgggtctgggaaaaagctttaacctgcagggcaccaggacccaaggcaggctgttccttggggcggtcagaccccagtcaggagcaatgactgactggctgcagccttcccacgccaagaggctggaacatagtgtctgcctcgcttcctggagatagtaactgagcaggggctacaaagaggtctcctgggaaccctgtctgccccttcccacctgtccttgggccacaccatcacactgaaccacaggacagaccctttctccaccacagccaaggcctggagactgggggcccagcagagcctgctcccaccctcctcccagcagcagacacccaccctctcactgactaacaggtccctgcacacagctggcctggtaaacccagctgggaggtttctaggcagcagcaaaactctgtgacagggtgtcctcacaccaggccttggacagctctcccagacaggagccagggttgagcaatggagagcccagcccccacgtcttacagtcgccatcctccaggcgtgtggtccctccccattgggtgcacagtgcagaggggccgtggccccatgtgatggtgcgcagagaggaacctcttgggattcagcaccagacgtctgtgctgcctggtttgcatccggctcacagagcccagactgctggaacagccaaggactgtcaggctggacaaaaataactgcaaggaggggcaagagaaaggatgattcgaggcaccttggcccttcaaggtcatgcagtgggtcgagcgcctgagatcctgttcaccaggactccacagagctggctctgctcagaagccatttcattccccggctccaccctaggccactttttctaacagaggaaacaaatggtccagcagtcgttcccagcagaacagcggagcctggactgacacccagtgggaccagtgttgccacaccagttgataaaatgcagaaacccttctgtactcgttggtaaatatctactcccccaagtgactccaggtgccccccaccgcctggcacttcccccaggactcctacgatctggttactgcctggccgatccaaggctgtggagtcccagagccagcagttcactggtgctcattccacactggttagatacttcagttgtcacccctgggaagattctcccacctcctccctttgatggaaccaccctccccagaggctgcattgaggagactccacagactgaaaagtgagtttgcagaaaccttggggaaaagggccctttcaaagaagtggataagagggaggagatcattgagtgacccagaaagctcttttgaaaagacagactcctcaaggagagataaagaggaaagcacctctttcattttttagtgtgagctaattccatcagactgctgtcctcctggacccatctgagatgtgcagtagcaaggagaggggggatcattttagagagtgggtcattggcagggagtgctccggagggaggcagaggggagactgtggtagaaggaagacagaactcacacatgctcccaggattggggacagggacagaggaggtaacagaaggcaaaggccagtttccccgttatcatgaaggggcccactcaggacaggaacaaggacaactcctcctcctcctcctcctctcctgctgctcctgggataccaggtcagtgatgtagtcttgcagtttggcaacttcctagcctgagaatccctagtggggctgtgggaaacacatttccacgttgcaagcatgcaactccaaagaatctgtgatgccactgaaatgagatgggaatgatccagctctttcagcatcttggttgaacttgctttcattgtccctgggatattgtggaaggaaaggtgactgtgtgatctgattctgtggtcaaggacttgcatcttgtgtttctatccccaagccttcctggtgtctccaactcctaccccattgcatgggttgttgcggacatccaataaagatttttttagtgcttctggaaacttccagtagattctacttctaaactatctctggagtccatccacttctgtctgcacccacagccatcctggccaggccacatcacctcccccagatcactgccctggcctcagaaaggtcttccctcttgctttgtcaatcagttctcagtagcagcagagagaaattgaaagctgcaggtcatatcgtatcatctttagtttgaaaacctcactctcttaccctattgttctaaaggtcttcttttggtcccaacctcatttccagcctcatttcttgccagtcccagacttgctccctgagcttctgccacctgcccttccttcatttcctcgacattccagccttgttcccacctccagcactttgcatatgctgttccctttgccaagaatgctcttcccctaccctgtgcatggctgagttctgcagaccctcaggccttggcttcaacgttgcctcgtccaagaggccttcctcgactactttacttgtggagttcctctatcacaaggcctctgttctttcccttcatggagaatttgccactgcatatccatttgtgtaatttacttgttggttgactgtgcctcccactcgagtgtaagctcatgaggccaggtgccatgcctggttcagtctccactctgtacccagcattgagcacagggcctggtccatagttggcgttcaataaatacttgttgaagaagtgaactgaaaaaaaaaaaaaaaaaa

SEQ ID NO: 375 - DNA, 1772 bp, Homo sapiens
ggataaatgtagcgccgcggcgcgggccagcagctctgcgaggggccggagcgcggcggagccatgcagtacccgcaccccgggccggcggcgggcgccgtgggggtgccgctgtacgcgcccacgccgctgctgcaacccgcacacccgacgcccttttacatcgaggacatcctgggccgcgggcccgccgcgcccacgcccgcccccacgctgccgtcccccaactcctccttcaccagcctcgtgtccccctaccggaccccggtgtacgagcccacgccgatccatccagccttctcgcaccactccgccgccgcgctggccgctgcctacggacccggcggcttcgggggccctctgtaccccttcccgcggacggtgaacgactacacgcacgccctgctccgccacgaccccctgggcaaacctctactctggagccccttcttgcagaggcctctgcataaaaggaaaggcggccaggtgagattctccaacgaccagaccatcgagctggagaagaaattcgagacgcagaaatatctctctccgcccgagaggaagcgtctggccaagatgctgcagctcagcgagagacaggtcaaaacctggtttcagaatcgacgcgctaaatggaggagactaaaacaggagaaccctcaaagcaataaaaaagaagaactggaaagtttggacagttcctgtgatcagaggcaagatttgcccagtgaacagaataaaggtgcttctttggatagctctcaatgttcgccctcccctgcctcccaggaagaccttgaatcagagatttcagaggattctgatcaggaagtggacattgagggcgataaaagctattttaatgctggatgatgaccactggcattggcatgttcagaaaactggatttaggaataatgttttgctacagaaaatcttcatagaagaactggaaggctatataagaaagggaatcaattctctggtattctggaaacctaaaaatatttggtgcactgctcaattaacaaacctacatggagaccttaattttgacttaacaaatagtttatgtactgctcttaggttgttttgataaagtgacattatagtgattaaattcttccccctttaaaaaaacagttagtggttttcactatttataaaaaattaattttgaactttttgttaaatttttaagttatagctttaaaggttttaataggaccttcttgaacgacttttctgtaatctgtttatctcccacttaatggaaaggcaaaggggtaccccaaatccagaggtgcctacatttcaggcagccttggagtattttaaaaggaaaacattctttacttttatatgacattcttatactgctgtctcaaatccaaaaacatttcagagctcttgtctcagagatgtgtgttctttttgtcagagatatggttgatgagaatcttaaatgcttgttttgcactatcacttagtacctgtttgaccaaggtgttaaggggatagtacctcccaattcaagcagagaaactgacctgactaaagttaatcgcagatgaactagaagtcacaggttaattaaatgtaagtagattgtagatactgttttatatcaaacaatgtttataatgtgtatatagaattgttcactgtaaaaaaaatggccaaaatgtgttttttttttaataagtaacttgactataaaataaagccgtccgtgggacgactgacctcgttgcaaaaaaaaaaaaaaa

SEQ ID NO: 376 - DNA, 8891 bp, Homo sapiens
gcggccgccgccatcagcagcgcagctccagggccggctgcagcggcagcggctccgccgggcgtcctggcagcagcacatggattaattgatgtatgttgagtttatggagctgccttttggtggcttgctttatctgcagtttttaagaagaaaaagaaggccctgagtcaaagaagatgcctcgaactaaacaaattcatcccagaaatctaagagacaaaattgaagaagcacaaaaagaacttaatggggcagaagtttcaaaaaaagaaatcttacaggctggtgttaaaggaacttcggaatcccttaaaggtgtgaaacgcaaaaagatcgtagctgagaatcacctgaaaaaaataccaaaatccccactgagaaatcctcttcaggcaaaacataaacaaaatacagaagagtcatctttcgccgttcttcatagtgcttcggagtctcacaagaaacagaattatattcctgtaaaaaatgggaagcagtttaccaaacaaaatggagaaacacctggaataattgctgaagcctcaaaatctgaagaatctgtctccccaaagaagcccttgtttctgcagcaaccatctgaactgcgtagatggagatccgaaggcgctgatcctgccaaattcagtgacctcgatgaacaatgtgactcaagttccttgtcaagtaaaaccaggactgacaatagcgaatgcatctcttctcattgtggcactacgtccccctcctatacaaacactgcattcgatgtcttactgaaagcaatggagccagaactgagcaccttgtcacaaaagggctcaccttgtgcaattaagacagaaaaactgaggccaaataaaactgcacgttcccctcccaaattaaaaaacagttcaatggatgccccaaatcagacttcacaggaattggttgctgaatcacagtcttcttgtacctcatacacagtccatatgtctgctgctcagaagaatgagcaaggggcaatgcagtcagcttctcatttgtatcatcaacatgaacactttgttcccaaatccaaccaacataatcaacagcttccggggtgttcaggtttcacaggatcactgacaaatctgcaaaatcaagagaatgccaaacttgaacaggtttataatatagcagtgacatcatctgtaggcctaacttcaccttccagtagatctcaggttactcctcaaaaccagcaaatggattctgcttcacctttgtcaataagtccggctaattctacacagtcgccccccatgccaatctataattcaactcatgttgcctctgttgttaatcaaagcgtagagcaaatgtgcaatcttcttctgaaagatcagaagccaaaaaaacaaggaaaatatatttgtgagtattgcaatagagcatgtgcaaagcctagtgtgcttttaaagcatatccgctcccacactggagagcgaccctatccctgtgtgacttgtggattttcatttaagactaaaagtaatctgtataagcacaagaaatcccacgcacatactatcaaactgggtcttgtcttgcaaccagatgctggtggcttgttcttgtcccacgagtcccccaaagcacttagtattcattcagacgtagaagacagtggggagagcgaggaggaaggcgccactgatgagagacagcatgacctgggcgccatggagctgcagcctgtgcacataataaagaggatgtcaaatgctgaaactttactaaaatcaagcttcactccaagcagtccagaaaatgtgataggtgactttttgctacaggacagatctgcagaatcacaagctgtgacagagttaccgaaagttgtggtccaccatgtcactgtgtcccccttaagaactgacagtccaaaggccatggatcccaagcctgaactttctagtgcacaaaagcagaaggaccttcaggtgacaaacgtacagccactttcagccaacatgtcccagggtggagtctccaggttggagactaatgagaattcccaccagaaaggcgacatgaatccactggaaggaaagcaagactctcacgtaggaacggtacacgcccagctacaaaggcagcaggctaccgattactcccaagagcagcaaggaaagctcctgagtcctcgaagtttaggaagtacggattctggttacttttcacgttctgaaagtgccgatcaaacagtgagtccaccaactccctttgccagaaggttacccagcacagaacaagactctggaaggagtaacggaccctctgcagctcttgtcaccacgtcaacaccctctgctttgcccacaggggaaaaggcattgcttttaccaggtcagatgcgcccacctttggccacaaaaacacttgaggagcggatatcgaagcttatctcagacaatgaagctttggtagatgacaagcaactggatagtgtgaagccgcggagaacctcactgtcaagacgaggaagcattgattcccccaaatcatacatatttaaagattctttccagtttgatttaaaaccagtgggacggagaacaagttcaagctctgatataccgaagtcacctttcacccctactgaaaaatcaaagcaagtgtttcttctgtctgtaccttcacttgactgtttacctatcacaagaagtaattccatgccgaccacaggttattcagcagtacctgcaaatataatacctcctcctcatccactaagaggaagtcagtcatttgatgacaaaattggcactttctatgatgatgtctttgtatcgggacctaacgctcctgtgccccagagtgggcatccccgtacacttgtgagacaagcagccatagaagactcttcagcaaatgaaagtcatgttcttggtactggacagtccctggatgagagccaccaaggatgccatgctgctggtgaagccatgtcagtgaggagcaaggcactggcacaaggcccacatatagaaaaaaagaagtctcatcaagggcgagggacaatgtttgagtgtgaaacttgtagaaacaggtataggaaactggaaaattttgaaaatcataagaaattttactgttctgagttacatggaccaaaaacaaaggtagccatgagagaacctgagcacagccctgtgcccggcggtctgcagcctcagattctacactacagagtcgctgggtcctccggcatctgggaacagacgccccagataagaaaaaggaggaaaatgaaaagtgttggggatgatgaagaacttcagcaaaatgaaagtggaacatctccaaaaagttctgaaggccttcagtttcagaatgctctgggctgtaatcccagtttgcctaaacataatgttaccataagaagtgaccagcagcataaaaatatacagttgcaaaactcccatattcaccttgttgccaggggccctgagcagaccatggatcccaagctgtcgaccatcatggaacaacagataagttcagcagcccaggacaagatagaactgcagagacacggaactggaatctctgtcatccagcacaccaactccctgagcaggcccaactcatttgacaagcctgagccttttgaaagagcctccccagtttctttccaggagctgaatagaacggggaagtccgggtctctaaaagtgataggaatctcccaagaggaaagtcacccttctcgggacgggtctcatcctcaccagcttgcactatcagacgctctcagaggagaacttcaggaaagctccagaaagagtccaagtgaacgacatgtgttaggacagccctcaagacttgtccggcagcacaacatccaagttccagagattttggtcacagaagaaccagatcgagacctggaagctcaatgccatgatcaagaaaagtcagagaagttcagttggccccagcgtagtgaaaccttgtcaaaattgccaacagagaaactgccacccaaaaagaaaaggctccgtctggctgagatagaacattcctcaacagaatcgagctttgattccactctctccaggagtctaagtagggagagcagtttatctcacacttcaagtttctcagcctctttagacatagaggacgtttctaaaacggaggcttcccccaaaatcgattttctaaataaagccgagtttcttatgattccagctggcttgaatactctgaatgttcctggatgtcaccgggaaatgaggcgtactgcatcagaacagattaattgcacgcaaacgtcaatggaggtctctgatctcagaagcaaatcattcgattgtggaagcatcaccccaccccagacaacaccacttactgaattgcagcctccatcttcaccttctcgagtgggagtgactgggcatgtgcctctcttagaaagaaggagaggcccactggtacggcaaatatctttaaacatagccccagatagtcatctgtctcctgtacacccaacatctttccaaaatactgctcttcccagtgtgaatgcagtgccatatcaggggcctcagctcactagtacatctttagctgagttttctgcaaatactttgcactctcagactcaggttaaggatctgcaggcagaaacatcaaactccagctctaccaacgtttttcctgttcaacagctctgtgatatcaatttgttaaatcaaatccatgcaccgcctagccaccagagcacacagctatctctgcaagtgtctacgcagggtagcaagccagataaaaattctgttttatctgggtcttctaaaagtgaggattgctttgctcccaaataccaattgcattgtcaggttttcacttcaggcccatcttgctcttctaatcctgtgcattctttgccaaatcaagttatttcagatccagttggaacagatcattgtgtgacatcagcaacattaccaaccaaattaattgacagcatgtctaattcgcatcctctgctaccaccagagctcaggccccttggaagtcaggtgcagaaggtgccatcatcattcatgctgcccatacgcctgcagagtagtgttcctgcttactgttttgctacactcacatccctgccacaaatactagtgacccaagatctgcccaatcagccaatttgccagactaatcatagtgtagtgccaatcagtgaagaacaaaattctgtgccaacattacaaaaaggtcatcagaatgctttgccaaacccagagaaggaatttctatgtgaaaatgttttttcagagatgagccaaaattcttctctatcagaatccttgcccataactcagaaaatatctgttggtcgactttcccctcaacaagaatcttcagcttcgagtaaaaggatgctttccccagcaaatagtttagacattgccatggaaaagcaccagaagcgggccaaagatgaaaatggagctgtttgtgcaacagacgtgagacctttagaggctttgagttcgagagttaatgaagctagtaaacagaagaagcctattttagtgagacaggtttgtactacagagcccctggacggtgtgatgttggaaaaggatgttttttctcaacctgaaattagtaatgaggctgttaatttgacaaatgttttaccagctgataattcatcaacaggatgctctaaatttgtcgttatagaacctataagtgaattgcaggaatttgaaaacatcaagtcatccacatcattaactcttacagttcgaagttcacctgctccttcagaaaatactcatatttctcctttgaaatgtacagacaataaccaagaaaggaagtctccaggggttaaaaatcaaggtgacaaagtgaacatccaagagcaaagtcaacagccagtcacttctctttcattgtttaacatcaaggacacccagcagctggctttccctagcctgaaaactacaaccaactttacatggtgttatctcttaaggcagaagtcgttgcatttgcctcagaaggaccagaaaacttcagcctatactgattggacagtaagcgccagtaatccaaatccactcggtttgcccacaaaagttgcacttgctctccttaattcaaaacagaacactggaaaatcactatactgtcaagcaataactacccattccaagtcagacttattggtctattcaagcaagtggaaaagcagcttaagcaagagagcattaggtaatcaaaagtccacagtagttgaattcagcaataaagatgcctctgaaattaacagtgagcaagataaagaaaattccttaatcaaaagtgaaccaagaagaattaaaatatttgatggaggatataagtcaaatgaagagtatgtatatgtccgaggcaggggaagaggaaaatacatttgtgaagaatgtggaatacgttgtaagaaacctagcatgttaaagaaacacatacgaacccatacagatgtccgcccctaccactgcacttactgtaacttctcctttaagactaaaggaaatctgacaaaacacatgaagtccaaggcacatagcaagaaatgtgtggatttaggcgtctcagtaggtttaatagatgaacaggatacagaagaatcagatgaaaaacagagattcagttatgagcgatctggatatgatcttgaagaatctgatggcccagatgaggatgacaatgaaaatgaagacgatgatgaggacagccaggctgaatcagtcctgtcagccacaccctcagtcacagctagcccgcagcaccttccatctagaagtagccttcaggaccctgtgagtactgacgaggatgtcaggatcaccgattgcttttctggggtacacacggacccaatggacgttctgcccagggcgctgctcaccagaatgactgtcctgagcacagcacagtctgactacaataggaagacactctctccggggaaggccaggcagcgtgctgcgagagatgaaaacgacacaattccgtctgtagacacttccaggtccccgtgtcatcagatgtctgtggactaccctgagtcagaagaaattctgagaagttctatggcaggaaaagctgttgctataacacagagcccatcatctgtaagacttcctcctgctgcagctgagcacagcccccagacagcagcggggatgccttctgtggcctcaccacatcctgaccctcaagaacagaagcagcaaataactctacagccgactccaggcttgccttctccccacactcatttgtttagccaccttcctttgcattcccagcagcaatcgaggacaccttataatatggttccagttggggggatccatgtggtacctgctggcctcacatactccacgtttgtgccccttcaggctggaccagtgcagctcacgatccctgctgtcagtgtcgttcacagaactttgggtactcataggaatacggtcacagaagtgtctggcactacaaaccctgctggagtggctgaattaagcagtgttgtgccatgtattcctatcggccaaatccgcgtgccaggccttcagaacctaagtaccccaggcttgcagtcactcccctcgttaagcatggaaaccgtcaatattgtaggcctagccaatacaaatatggccccacaagtccatccaccaggactggctctgaatgctgtcggactgcaggttctgactgcaaacccttcatcacaaagcagccccgcccctcaggcacacattccaggtctccagatcttgaacatagcattgcccaccttaatcccctcagtcagtcaagtagccgttgatgcacagggagctccagaaatgccagcttcccaaagcaaagcatgcgagacacaacccaagcagacttctgtagccagcgcaaaccaggtcagcaggaccgagtctcctcaggggttacctacagtccagcgggaaaatgcaaaaaaagttctgaatccacctgcccctgcaggtgaccatgcaaggcttgatggcctgagtaaaatggacacagagaaggctgcctcggcaaatcacgtgaagcccaagcctgaactcacttccatacagggccaaccagcgtccacgtcacaacctctgctgaaggcacattctgaagtttttacaaagccctcaggccagcagactctctctccagacagacaggttcccaggcccacagcactaccgcggaggcagcccactgtgcacttcagcgacgtgagcagcgatgatgacgaggacaggcttgtgatagcaacctgatggattttattttttatttgctttttttttatataacacttaaaggtttctttgaaaaccctcctttccttaaagcacatttttctgacataaactcatgactaatctttgtgcaatcatgaacttttgaccaataattgttgttttgtgtcagctccagccatttttgtacatgttgtatagacaattgtgccttttaggagctttatgtttagaaactgtacagattgttgaatatctatatacataaaaatatattatatatgtatatgaaaaccaggtagttatttgtgtttagtaaggaaaacctgtcaaataaatcaaatgattaaattatatgttccactgttgaatataaattttatggctatggggcagagtttctgtgtataaattagtatgtaaactccatatttattgtattcatattagtctttgaaaatgggtctgtcctccttgtgtaagacagtaactttacacttcagacagattttctgtgttatgaaatgtttcagtaaaatattgtttactgactttaaaaaaaaaaaaaaaaaa

SEQ ID NO: 377 - DNA, 9732 bp, Homo sapiens
gctggaggcaggaatgtgcctgcttactaatgagcgacgtgcaccggcgcgcacggcccggccaccgctgcggctgcggcggccggcggcggcccgttgtcaggtggagcctttgaattttttaaaagaccatagtaatcagatctacttgaaaaattaagtgaattgatttggttggaatgctcttttaccgatgctttaacatacagccactagattcccagaagttgtgcatgagttcctgtgaggagagttggcatcttggaaatcaaagacggttgtgatgcagttttttgatatgaggataacaggaagcgtcaggacaatcatgcccataagaactctaaactgttcagatcattttatcttagtgaaactggcaattgaactttgctctagttgatgggcaaaatttctcctagactattcatcatcccaatttcatcctagttgaaaattttcaaatgccataagaaatctttatagatttgcacttagcttttggatggacgtttctacaatggagagaactgtgttatagccctggtccaaggacattactagctaatgcccatcgactgtggtgtgcgtgtggaaggttccaaagagaaggagcaatcagcaagtttgcagacaccctggaacatggaagcaaccaagctttaagaagcacagctttggagacactccatgagtctgcactgctttcaggggaactagcacttaagaccttgtgtaacaaaatggacactggggacacagctctaggacaaaaagctacctcaaggtctggagaaactgataaagcatcaggtagatggagacaggaacaatcagctgttattaagatgagcacttttggcagtcatgaaggacagcggcaaccacaaatagagcctgagcaaatcggaaacacagcatcagcacaactgtttggttctgggaaactggcctcccctagtgaagtggtgcagcaagtcgcagagaagcaatatccaccgcatcgtccgagtccttactcatgccaacactcactctctttccctcagcactcattgccacagggggtcatgcacagcaccaagccacatcagagcctcgaaggtcctccgtggcttttccctggccctttgccatccgttgcctctgaggacttatttccttttcctatacatggccacagtggtggttatcctagaaaaaagatttcaagtctgaaccctgcttatagccaatactcccagaaaagtattgaacaggcagaagaggctcacaagaaagagcacaaacccaaaaagcctggcaagtacatttgcccttactgcagcagagcgtgtgccaaacctagtgtactgaaaaaacacatcaggtcccatactggggagcggccatatccatgtataccttgtggtttctctttcaagacaaagagcaatttgtacaagcacaggaagtcacatgcccatgcaattaaggcaggattagtacctttcacagagtcagctgtatctaaattggacctagaggctggttttattgatgtagaagcagaaatacattcagatggtgaacagagtacagacacagatgaggagagttctttatttgccgaggcttctgacaaaatgagtcctggtccacccatcccactggacattgccagcagaggcggctatcatgggtcattggaagaatcattgggaggtccaatgaaggtgccgattttgattatccctaaaagtgggattcctctccctaatgaaagctctcagtatattggccctgatatgctaccaaatccatctttaaatactaaggctgatgattcgcacacagtcaaacagaaacttgcactaagactgtcagagaaaaaaggacaagattctgagccatcgctcaaccttctgagcccgcacagtaaaggaagcactgattctggttacttttctcgctcagaaagtgctgagcagcaaataagccctcccaacacaaatgcaaagtcttatgaagaaatcatctttggaaaatactgtcggcttagtccgagaaatgcactcagtgttacaaccacaagtcaggagcgtgccgcaatgggtaggaagggcataatggaaccattacctcacgttaacaccaggttagatgtcaagatgtttgaagatcctgtttcacagctgatcccaagcaagggagatgtcgaccccagtcaaacgagcatgctgaaatccactaagttcaacagtgagtccagacaaccccagattattccatcatctatcaggaacgaaggaaaactttatccagcaaacttccaaggcagcaacccggttctcttagaagctcctgtagactcttcaccccttattagaagcaactcagtgccaacttcttcagcaactaatctaactattcctccttctttgagaggaagtcactcatttgatgaaaggatgactggttccgacgatgtattctatccagggaccgtgggcataccccctcagcgcatgctaagaagacaagcggcatttgagctgccttcggtacaggagggccacgtggaagtcgagcaccatggcaggatgttgaagggtatcagcagttcatccctgaaggaaaagaaattgtctcctggggacagggttgggtatgactatgatgtctgtcggaaaccctataagaagtgggaggactctgaaacaccaaagcaaaactacagggacatttcctgcttgagttctttaaagcatggtggagaatatttcatggatcccgtggtgccattgcagggagtaccaagcatgtttggaactacctgtgaaaacaggaaacgccggaaagagaagagcgtaggggatgaagaggacacgcccatgatctgcagcagcattgtaagcactcctgtgggcatcatggcttccgattatgaccccaaactgcagatgcaggaaggagtcaggagtggatttgccatggctggacacgaaaacctttctcatggtcacacggaacgctttgacccatgtcggccccaactgcagcctggaagtccatctcttgtgtcagaggagtcaccttcagccattgattcagacaagatgtcagacctagggggcaggaaacctcctggaaatgtgatttctgtgattcagcacaccaactcactgagccgacccaattcatttgaaaggtctgagtcagccgaacttgtggcttgcacacaggataaagccccttccccttcagagacttgtgacagtgagatttcagaagccccagtgagtcctgagtgggctccacctggggatggtgcagaaagtggggggaaaccctctccatctcagcaggtgcagcagcagtcctatcacacacagcccaggctagttcggcaacacaacatccaggttcctgagattcgagtgaccgaggagcctgataaacctgagaaggagaaggaagcccagagcaaagagccagagaagcctgtggaagaatttcagtggccccagagaagtgagaccctttcccagctccccgcggagaagttgccacccaaaaagaagcgtctgcgacttgcagatatggagcactcctcaggggagtccagctttgaatccacaggcacaggcctctcccgcagccccagccaagaaagcaacttgtcccacagctccagtttctccatgtcttttgaaagagaagaaaccagtaagctttctgcacttcctaagcaggatgagtttgggaagcattcagagtttctgactgtccctgctggttcatactcattgtctgtcccaggccatcaccaccagaaagagatgcgacgctgctcatcagagcagatgccttgtcctcacccagcggaagtcccagaagttcggagcaaatcatttgattatgggaatctgtcccatgctcctgtgtcgggagcagcagcctccacggtatcaccgtccagggagaggaagaaatgctttctggtgcggcaagcttccttcagtggctccccagaaatctcccagggcgaggttggcatggatcagagcgtgaagcaagagcagctggagcacctgcatgctggcctccggtccgggtggcaccatggcccgcctgctgtgctgcctcctcttcagcaagaggacccagggaagcaggtggcgggtccttgtcccccgctgagctcggggccactgcacctggcccagccacagatcatgcacatggacagtcaggaatctttgagaaatcccttgatccaaccaacatcctatatgacaagcaagcacttacctgaacagccacacttatttccacatcaagagacaattccattttctccaatccagaatgccttgtttcagtttcagtatcctacagtttgtatggttcatttaccagctcagcagcctccctggtggcaggcacatttcccacatccctttgctcagcaccctcagaagagctatggcaagccctcttttcagacagaaatccattcgagctatcccttagagcatgtggcagagcacactggaaagaaacctgctgagtatgcacacacgaaagagcagacctacccatgttattcaggagcatcagggctacacccaaagaaccttcttccaaagtttccatcagaccagagcagtaagtcaactgaaacgccctctgagcaggttcttcaagaagattttgcctcggcaaatgctgggtctttgcagtccctcccaggaacagtggttcctgttcggatccagacgcacgtaccatcctatggaagtgtcatgtacacaagcatttctcagatacttgggcagaatagccctgccattgtcatatgcaaagtcgatgagaatatgacccaaaggacactggtcaccaacgcagccatgcaagggataggattcaacattgcccaggtgctggggcagcatgcgggcttggagaagtaccccatttggaaagcacctcagactttgcccctcggcttagaatcctccatccccttgtgtttaccttccacctctgacagcgtggccaccctgggaggtagcaagcgaatgctttctccagccagtagcttggagctcttcatggaaaccaagcagcagaaaagggtcaaagaagaaaagatgtacggacagattgtggaggagcttagtgctgtggagctgaccaactcagacatcaaaaaggacctctcccgcccccagaaaccccagctggttcgacaaggatgtgcttctgagccaaaagatggcttgcagtcagggtcatcttccttctcctcgctgtcgccctcctcatctcaagactatccttctgttagcccgtcttccagggagccattcctgcccagcaaggagatgctttccggttcccgggcaccacttccggggcagaagtccagtgggccttctgaaagcaaagaatcttcagatgaattagatatcgatgagacggcatcggacatgagcatgagcccacagagttcttcattaccagcaggagatggtcagctggaagaggaagggaagggccacaagcggcctgttggcatgctggtccgcatggcctctgcccccagcgggaacgtggcagactcaactcttcttctcacggacatggcagatttccagcagattcttcagttccccagtctgcggacaacaactactgtgagttggtgcttcttgaattatacaaaacccaattatgtgcaacaggccaccttcaaatcctcggtttatgcttcatggtgcattagttcctgtaatccaaacccatcaggattgaacaccaagaccacgctggctcttctgaggtccaagcaaaaaatcactgcagaaatttatactctggctgctatgcataggcctggaaccggcaagcttacatcatcaagtgcttggaagcagtttactcagatgaaacctgatgcgtcctttttatttggcagcaaactagaaaggaaactagtgggaaatatcttaaaggaaagagggaaaggagatattcatggagataaagatattggatccaaacaaactgagccaatccgaattaaaatatttgaaggagggtacaaatcgaatgaagattatgtatatgtcagaggacgtggccggggaaagtacatttgtgaagaatgtgggattcgctgtaagaagccaagcatgctcaaaaaacacatccgtacccatactgatgttcggccttatgtatgcaagttatgtaactttgccttcaaaacgaaaggaaacctaacgaagcatatgaaatctaaagcacacatgaaaaaatgcctggaattgggagtctcaatgacatcggtggatgatacagaaactgaggaagcagaaaatttggaagatttgcacaaagcagcagagaagcatagcatgtccagcatttcaactgatcatcagttctccgatgctgaggaatcagatggtgaggatggagatgataatgatgatgatgatgaagatgaagatgactttgacgaccagggagatttaacaccaaaaacaagatcaagaagcaccagtcctcagcctcctagattctcctccttgcctgtgaatgttggcgccgtaccccacggggttccttcagatagttccctgggacattcttcgttgatcagctatttggttactttgccaagtattcgagttactcagcttatgacacccagtgattcatgtgaagatacccagatgacagaataccagaggctattccagagcaaaagtacggactcagaaccagacaaagacagattggacatacctagttgtatggatgaggagtgcatgctaccttcagagccaagctcctctcccagggacttctcaccctcaagccaccattcctctccaggatatgattcttcaccctgtcgagataattcaccaaagaggtatctgatacccaaaggagatttatctcccaggagacatttatcacctaggagagatctgtcacccatgagacatctttcaccaagaaaggaagctgcattgagaagagagatgtcccaaagagatgtttcaccaagaaggcatttgtctccaaggaggccagtgtctcctgggaaagatatcacagcaagaagagacctctctcctagaagagagagaagatacatgaccacaataagagcgccatctcccagaagggctttataccataacccaccattgtccatgggacagtatttgcaagcagagccaattgtattggggcctcctaatttaagaagaggattacctcaggttccttacttcagtctctatggagaccaagaaggtgcttatgaacatccaggctccagccttttccctgagggtcctaatgactatgtcttcagtcatcttccactccactctcagcaacaagtgcgagcccctatccccatggtgcccgttggtgggatccagatggttcactccatgccgccagccctttccagtttacatccttcacccacattgcccctgccaatggagggctttgaggagaagaaaggcgcgtcaggggagtccttctccaaggacccctatgtgctttctaagcagcatgagaagcgaggtcctcacgctttgcagtcatctggtccacctagcactccctcctctcctcggctgttgatgaaacagagcacttcggaagacagcctaaacgcaacagagcgggaacaggaggaaaatatacagacttgtacaaaagccattgcctctctccggattgccacggaagaggcagctctgctcgggccagatcagccagcgcgggtgcaggagccccaccagaaccccctgggaagtgcacatgttagcattagacactttagtagacctgagccaggtcagccctgtacctcagccacccaccctgacttgcatgatggtgaaaaggacaattttggtacatcacagactccattagctcactccacgttttacagcaagagttgtgtggatgacaagcagttggactttcacagcagcaaggaattatcttcaagcacagaggaaagcaaagatccttcatcagaaaagagtcagctacattgatctatgatgcatggagactttcatttccacattttcccatttttttgtttttgtttttctagaaatggaggtaatccagtttatagcatgcctgtcctaagttacagtagtttgctattatatatacttttgttatatcaaaagaattaggtaaattaacaagtcatcatgagcctgaccaaaacaaaatttgaaattaacctattgggtctggtacttttaaaattgtacagatgtttgtgccttttctttactttgcttatattcttataagcattttttagcagtaatttgtacatattttagaatttgtgtatctgctttgtaataaatgtaatttctttccttttttggacacttggatctaaatgatgtaaagcaaaacagcatcaatatatatgtgaggttgcactaaaacatatttttatatgattaaaactgaacagcttttatgtacagctctgattctgtaatactaatatttatttactttgtttcataaattgtacattttttcttaatgttgtggattgcttttctatgtgaagcatgggatttactgttgcgtaactagaacaaaaatgtacattgtaaacaagatatttaaactagagtatcttattctgcacttatgcattagttaaaaaaagataaaggatgtatcagtcagttcttaactcttgtatatttttttgtctcttgtttgctggattgactataacttaagtgctgattgtgattttaaaatgatagtaccgtaaagcattaaagtaaacaatgtgctattgtgagttttttcaaagctttataaatcagttataaataatattaaaagtatttggtcttatgtgaacatgttgatctatatactcatctaaaaatatgggaaaacattccaccccatgtaaatatgtacaagtgcatcactggtacaattttatgtaactcagttggacactaggttgccacagacctatgctaggtgtctttaaaaaattaaggtgacaaagcacatgggactgtgtagagcttggttatcggccggcccggtggcttggcaggcagtgctgtgcgctgctcatggagaagacctgggcttagcaatctccttagttcttgctacacaggatggtgactggaactaaggctacacagagggtcgcacttggactctgagggttgggtgtggaagggggaaaaggagatggagacctgctccccagctcttcctgtcagccggtttacatgggaacagggttaacatctgtgttaggggaggtcaccttaccctttttcataggggaagagtgtcacactcctggctatctcagggggaatggggaaaagaatctttcaagggcaaagaactcgtgggaggatgtctgttgtatgtaatactcacaatggcttttggttagtgttgaaggtgggaagagcatttgtaggtccagaagagtgaaagagagggaggggtgcagcaacatgtgcacaggcacgcacatgtgtgcacgcacacatacaatctgggttatctttgtgctatatagtggattataattctgtgaaaccaagtttgtatattgaattacattaaggagtgttctttaaaaagagaaataaatatacaattacatgcttgaaaaaaaaa

SEQ ID NO: 378 - DNA, 8875 bp, Homo sapiens
attccgtgtttttcagcagcacgaattcaagagggatgcttctgtttgggtttctgatcgtgatttatatttattcagaggaataacagagggtggatctgttcccggcgcgagcatgctcacaaccagccgactctcccattatccagctgcctagtttggtgcttcaatgtacatggctattccgtgtgcatatgtgtgtatacaaacacgcatgcatgcctggatggacatacgtatgcacaggttattttttaaggacaattctttcaataaggtctttaccccttacttgaaacaggtgttcatgaaaaaaatgcacaaaatcctgcctggccggaataattcatgaagaaggggctggatccgtgggtcagagaacacaggaccagtttgccatcccaaggccgaaggcctccctccaacacagttctccaagctctagaaatctctgacacatcttgaccatgagaccacggctggtttttggcaggattcgaggcacaaacccagcagcctcaacctagttcatggaggagcctcgcggggtcctggccaagcaagcccgcccctctggtgggaagagcggcgcctaggtggagggtggctgccgtaggagtggacatgaatgctggctttcagagagaacagcgtttcagttttggtcatcggaagtggtgccttcagcacagaagaagagcgtgatttctcctccaaggccgttgatctccaacccagaactaaaggggagaagagccacccccagcatccagcgtggcatctcttgtgccaggaccagggatgactgggccatggacacagatgtctccaaccttcaaccgtttgcatagcacacgggggactcgtgggggccacctgccactgccagctgaaacaatacaatggcaatactgacatccttcatgacgttttcccgacagacattcaggcagaaagtgctggtgcgttttctgtctgcaaagtagagggccatgcctcaccaatagaatagcgtgggccctgatgacctgctccgagtccactcacagccagtgacacttgcaaaaaactcccaaagccgtcttgggtttggctcccacagctcttgaccaatgtggccaaagctggacacctccttgggacactgggattattcataaatgcagcccgccctgactctccctgaatagcatctgaagtctttgtgaaggtcatggatcctgaacaaagtgtcaagggcaccaagaaggctgagggaagtccccggaagcggctgaccaaaggagaggccattcagaccagtgtttcttccagcgtcccatacccaggcagcggcacagctgccacccaagagagccccgcccaagagctcttagccccgcagcccttcccgggcccctcatcagttcttagggaaggctctcaggagaaaacgggccagcagcagaagccccccaaaaggccccccatcgaagcatccgtccacatctcacagcttccgcagcaccctctgacaccagcattcatgtcgcctggcaaacctgagcatctcctggaggggtccacatggcaactggttgaccccatgagacctggaccctctggctccttcgtggcccctgggctccatcctcagagccagctccttccttcccacgcttccatcattccccccgaggaccttcctggagtccccaaagtcttcgtgcctcgtccttcccaggtctccttgaagcccacagaagaggcacacaagaaggagaggaagccccagaagccaggcaagtacatctgccagtactgcagccggccctgtgccaagcccagcgtgctccagaagcacattcgctcacacacaggtgagaggccctacccctgcggcccctgtggcttctccttcaagaccaagagtaatctctacaagcacaggaagtcccatgcccaccgcatcaaagcaggcctggcctcaggcatgggtggcgagatgtacccacatgggctggagatggagcggatccctggggaagagtttgaggagcccactgagggagaaagcacagattctgaagaggagactagtgccacctctggtcaccctgcagagctctccccaagacccaagcagccccttctctccagcgggctatacagctctgggagccacagttccagccacgaacgctgttccctgtcccagtccagcacagcccagtcactcgaagacccccctccatttgtggaaccctcatctgagcaccccctgagccataaacctgaagacacccacacgattaagcagaagctggccctccgcttaagcgagaggaagaaggtgatcgatgagcaggcgtttctgagcccaggcagcaaagggagtactgagtctgggtatttctctcgctccgagagtgcagagcagcaggtcagccccccaaacaccaacgccaagtcctacgctgagatcatctttggcaagtgtgggcgaataggacagcggaccgccatgctgacagccacctccacccagcccctcctgcccctgtccaccgaagacaagcccagcctggtgcctttgtctgtaccccggacgcaggtgatcgagcacatcacgaagctcatcaccatcaacgaggccgtggtggacaccagcgagatcgacagcgtgaagccaaggcggagctcactgtccaggcgcagcagcatggagtccccaaaatccagcctctaccgggagcccctgtcatcccacagtgagaaaaccaagcctgaacaatcactgctgagcctccagcacccgcccagtaccgccccccctgtgcctctcctgagaagccactcaatgccttctgccgcctgcactatcagcaccccccaccaccccttccgaggtagctactccttcgatgaccatatcaccgactccgaagccctgagccacagcagtcacgtgtttacctcccacccccggatgctgaagcgccagccggcaatcgaattacctttgggaggggaatacagttctgaggagcctggcccaagcagcaaagacacagcctccaagccctcggacgaagtggaacccaaggaaagcgagcttaccaaaaagaccaagaagggtttgaaaacaaaaggggtgatctacgaatgtaacatatgtggtgctcggtacaagaaaagggataactacgaagcccacaaaaaatactactgctcagagcttcagatcgcaaagcccatctctgcaggcacccacacatctccagaagctgaaaagagtcagattgagcatgagccgtggtcccaaatgatgcattacaaactgggaaccaccctggaactcactccactgaggaagaggaggaaagagaagagccttggggacgaggaagagccacctgcctttgagtccacaaaaagtcagtttggcagccccgggccatctgatgctgctcggaaccttcccctggagtccaccaagtcaccagcagaaccaagtaaatcagtgccctccttggagggacccacgggcttccagccaaggactcccaagccagggtccggttcagaatcagggaaggagaggagaacaacgtccaaagaaatttctgtcatccagcacaccagctcctttgagaaatctgattctctcgagcagccgagtggcttggaaggggaagacaaacctctggcccagttcccatcacccccacctgccccacacggacgctctgctcactccctgcagcctaagttggtccgccagcccaacattcaggttcctgagatcctagtaactgaggagcctgaccggccggacacagagccagagccgccccctaaggaacctgagaagactgaggagttccaatggccccagcgcagccagacacttgcccagctcccagctgagaagctgccacccaaaaagaagaggttgcgcctggcagagatggcccaatcatcaggggagtccagcttcgagtcctctgtgcctctgtctcgcagcccgagccaggaaagcaatgtctctttgagtgggtccagccgctcagcctcgtttgagagggatgaccatgggaaagccgaggcccccagtccctcatctgacatgcgccccaaacccctgggcacccacatgttgactgtccccagccaccacccacatgcccgagagatgcggaggtcagcctcagagcagagccccaacgtttcccattctgcccacatgaccgagacacgcagcaaatcctttgactatggcagcttgtccttgacaggcccttctgctccagccccagtggctccaccagcgcgggtggccccgccagagagaagaaaatgcttcttggtgagacaggcctctctgagcaggcctccagaatctgagttggaggttgcccccaagggaagacaggagagcgaagaaccacagccctcatccagtaaaccctctgccaaaagctcattgtcccagatttcctctgcggccacctcacatggtggacccccgggaggcaagggcccagggcaggacaggcccccattggggcccactgtgccctacacagaagcactgcaagtgttccaccaccccgttgcccagacacccctgcatgagaagccatacctgcccccaccagtctcccttttctccttccagcatctcgtgcagcatgagccaggacagtctccagaattcttctccacccaggccatgtccagcctcctgtcctcaccatactccatgcccccacttcctccctccttatttcaagccccaccgcttcctctccagcctactgttctgcacccaggccaactccatctcccccagctcatgcctcacccagccaacatccccttcaggcagcccccttccttcctccccatgccatacccgacctcctcagcactgtcttctgggtttttcctgcctctgcaatcccagtttgcacttcagctccctggtgatgtggaaagccatctgccccagatcaaaaccagcctggccccactggcaacaggaagtgctggcctctcccccagcacagagtacagcagtgacatccggctaccccctgtggctcccccagccagctcctcagcacctacatcagctcctccactggccctgcctgcctgtccagacaccatggtgtccctggttgtgcctgtccgtgttcagaccaatatgccgtcctatgggagcgcaatgtacaccaccctttcccagatcttggtcacccagtcccaaggcagctcagcaactgtggcacttcccaagtttgaggaacccccatcaaaggggacgactgtatgtggtgcagatgtgcatgaggttgggcccggcccttctgggttaagtgaagagcaaagcagagctttcccaactccatacctgagagtgcctgtgacattacctgaaagaaaaggcacttccctgtcatcagagagtatcttgagcctggaggggagttcatcaacagcagggggaagcaaacgtgtcctttcaccagctggcagccttgaacttaccatggaaacccagcagcaaaaaagagtgaaggaggaggaggcttccaaggcagatgaaaaacttgagctggtaaaaccatgcagtgtggtccttaccagcaccgaggatgggaagaggccagagaaatcccacttaggcaaccagggccaaggcaggagggagctagaaatgctgtccagcctgtcctcagatccatctgacacaaaggaaattcctcccctccctcaccctgcattgtcccatgggacagccccaggctcagaagctttgaaggaatatccccagccatctggcaaacctcaccgaagagggttgaccccactgagcgtgaagaaagaagattccaaggaacaacctgatctcccctccttggcacctccgagctctctgcctctgtcagaaacgtcctccagaccagccaagtcacaagaaggtacggactcaaagaaggtactgcagttccccagcctccacacaaccactaatgtcagttggtgctatttaaactacattaagccaaatcacatccagcatgcagataggaggtcctctgtttacgctggttggtgcataagtttgtacaaccccaaccttccgggggtttccactaaagctgctttgtccctcctgaggtctaagcagaaagtgagcaaagagacatacaccatggccacagctccgcatcctgaggcaggaaggcttgtgccatccagctcccgcaagccccgcatgacagaggttcacctcccttcactggtttccccggaaggccagaaagatctagctagagtggagaaggaagaagagaggagaggggagccggaggaggatgctcctgcctcccagagaggggagccggcgaggatcaaaatcttcgaaggagggtacaaatcaaacgaagagtatgtatatgtgcgaggccgcggccgagggaaatatgtttgtgaggagtgtggaattcgctgcaagaagcccagcatgctgaagaaacacatccgcacccacactgacgtccggccctatgtgtgcaagcactgtcactttgcttttaaaaccaaagggaatctgactaagcacatgaagtcgaaggcccacagcaaaaagtgccaagagacaggggtgctggaggagctggaagccgaagaaggaaccagtgacgacctgttccaggactcggaaggacgagagggttcagaggctgtggaggagcaccagttttcggacctggaggactcggactcagactcagacctggacgaagacgaggatgaggatgaggaggagagccaggatgagctgtccagaccatcctcagaggcgcccccgcctggcccaccacatgcactgcgggcagactcctcacccatcctgggccctcagcccccagatgcccccgcctctggcacggaggctacacgaggcagctcggtctcggaagctgagcgcctgacagccagcagctgctccatgtccagccagagcatgccgggcctcccctggctgggaccggcccctctgggctctgtggagaaagacacaggctcagccttgagctacaagcctgtgtccccaagaagaccgtggtccccaagcaaagaagcaggcagccgtccaccactagcccgcaaacactcgctaaccaaaaacgactcatctccccagcgatgctccccggcccgagaaccacaggcctcagccccaagcccacctggcctgcacgtggacccaggaaggggcatgggcgctctcccttgtgggtctccaagacttcagctgtctcctctcaccctctgccccctgggaagagaactggcccctcgagcacatgtgctctccaaactcgagggtaccaccgacccaggcctccccagatactcgcccaccaggagatggtctccaggtcaggccgagtcaccaccacggtcagcgccgccagggaagtgggccttggctgggccgggcagcccctcagcgggggagcatggcccaggcttggggctggacccacgggttctcttcccgcccgcgcctctacctcacaagctcctcagcagaagcccagagacctgcgcctccccgtggcagaaggccgagtcccgaagtccctcctgctcacccggccctgctcatcctctctcctcccgacccttctccgccctccatgacttccacggccacatcctggcccggacagaggagaacatcttcagccacctgcctctgcactcccagcacttgacccgtgccccatgtcccttgattcccatcggtgggatccagatggtgcaggcccggccaggagcccaccccaccctgctgccagggcccaccgcagcctgggtcagtggcttctccgggggtggcagcgacctgacaggggcccgggaggcccaggagcgaggccgctggagtcccactgagagctcgtcagcctccgtgtcgcctgtggctaaggtctccaaattcacactctcctcagagctggagggcggggactaccccaaggagagggagaggaccggcggaggcccgggcaggcctcctgactggacaccccatgggaccggggcacctgcagagcccacacccacgcacagcccctgcaccccacccgacaccttgccccggccgccccagggacgccgggcagcgcagtcctggagcccccgcttggagtccccgcgtgcaccgaccaaccccgagccttctgccaccccgccgctggaccgcagcagctctgtgggctgcctggcagaggcctctgcccgcttcccagcccggacgaggaacctctccggggaacccaggaccaggcaggactcccccaagccctcaggaagtggggagcccagggcacatccacatcagcctgaggacagggttccccccaacgcttagcctctctccaactgcttcagcatctggcttccagtgtccagcaacagacgtttccagccactttcctcgaatcatcccacttcctcagccccatctgtccctccgtccaggagctctcacggccccatctgttgtaccttcccatgtatgcagttacctgtgcctttttctacaccttttgttgcttaaaaagaaacaaaacaaatcacatacatacatttaaaaaaaaaacaacaacccacgaggagtctgaggctgtgaatagtttatggttttggggaaaggctgatggtgaagcctcctgaccctccccgctgtggttggcagccacccaccccagaggctggcagagggaaaggggtacactgagggagaaaggaaaaggaaacttcaaacaatatagaattaaatgtaaaaggaagcactcctgtgtacagaaaa

SEQ ID NO: 379 - DNA, 1989 bp, Homo sapiens
tagaagtctcaggatttggagaaatcaaatatgaagagtttgggccaggctttatcaaggagtcaaacctccttagcctccagaagacacaaactggggagacaccttacatgtacactgagtggggagacagctttggcagtatgtcagtcctcatcaaaaacccaaggacacactctgggggaaagccttatgtgtgcagggaatgtgggcgaggctttacgtggaagtcaaacctgatcacacatcagaggacacactcaggggagaaaccttatgtgtgcaaggattgtggacgaggctttacttggaagtcgaacctctttacacatcagcggacacactcagggctcaagccttatgtgtgcaaggaatgtgggcagagctttagcctgaagtcaaacctcattacccaccagagggcgcacactggggagaagccttatgtttgcagggaatgtgggcgtggctttcgccagcattcacacctggtcagacacaagaggacacattcaggagagaagccttacatttgcagggagtgtgagcaaggctttagccagaagtcacacctcatcagacacttaaggacacacacaggagagaagccttatgtatgcacagaatgtgggcgtcactttagctggaaatcaaacctcaaaacacaccagaggacacactcaggggttaaaccttatgtctgcctggagtgcgggcagtgctttagcctgaagtcaaaccttaacaaacaccagaggtcacacacgggggagaagccatttgtatgtacggagtgtgggcgaggctttacccggaaatcaaccctgatcacgcaccagaggacacactcaggggagaagccatttgtatgtgctgagtgtggacgaggctttaatgataagtccaccctcatttcacaccagaggacacattcaggggaaaagccttttatgtgcagggagtgtggcagaaggtttcggcagaagcctaacctgtttaggcacaagagggcacactcaggtgcctttgtgtgcagggagtgtgggcaaggcttttgtgctaagttaactctcattaaacaccagagagcacacgcaggggggaagcctcatgtgtgcagggagtgtgggcaaggctttagccggcagtcacacctcattagacaccagaggacacattcaggagagaagccttatatttgcagaaagtgtggacggggctttagtcggaagtccaaccttatcagacatcagaggacacactcaggatagaaactttatgtgtatagggaatgtggtacagcctttagccaggagtcatacttcatcagacaccagaggacacacacagtgctgtggctttttcagccattgctagataccaaagtggagacattctgtgtgtgattatgcatgagactgtactggtaagacttgtatctccatccacctgaaggagaattgctggctcattttcaggagccctgcccttcctcactgtggatggtgggttgtgaaacccggtcaggtaatgatagtggcaggaggcagtcaaatgcccaggcagataggggtgggtacctggtgaaacccaaccttaaagctgaagacagtcccggctaaatcctcatactgaattgagaacctgtcttcccatttggtgtgctttcctccgattgatcccaacccttcacctattttacgtatacctgccctttcctaattggtttttacactgctgtgcccaccttttgagtggtgcctttgcatacttacaaatcagtcaacgtgtattcccctattctgagcccataaaagacccagactcagctgcagtgaggagagaaatcaccctgctgtgggggttggggaccactccctgcatcccctctccactgagagctgttcttttgctcaataaaattcttttctacccatcctcaaaaaaaaaaaaaaaaaaaaaaaaaaaaaaaaaaaaaaaaaaaaaaaa

SEQ ID NO: 380 - DNA, 320 bp, Homo sapiens
cccaacaaaaggagaccctgtacgtgcgaagagtgtggcaaggcctttggacagagaagtcaccttgttcagcacaccagtgagaagctgtatgcatgccaggaatgtgggtgtaccttcagcaacaattcatctctagtcaagcactggcacgtccacacaggcgagaagccctacatgtgtggccactgtggcaagtgcttccgagagagctcatcccttgccaagcaccagcgtgtgcacacaggtgagaagccatacgtgtgtggtgagtgtggacgcaccttcagcgagagcacacaccttgtacagcactggtg

SEQ ID NO: 381 - DNA, 2412 bp, Homo sapiens
cgtcacgtccggcgcggagacggtggagtctccgcactgtcggcggggtacgcatagccgggcactaggttcgtgggctgtggaggcgacggagcagggggccagtggggccagctcagggaggacctgcctgggagctttctcttgcataccctcgcttaggctggccggggtgtcacttctgcctccctgccctccagaccatggacggctccttcgtccagcacagtgtgagggttctgcaggagctcaacaagcagcgggagaagggccagtactgcgacgccactctggacgtggggggcctggtgtttaaggcacactggagtgtccttgcctgctgcagtcactttttccagagcctctacggggatggctcagggggcagtgtcgtcctccctgctggcttcgctgagatctttggcctcttgttggactttttctacactggtcacctcgctctcacctcagggaaccgggatcaggtgctcctggcagccagggagttgcgagtgccagaggccgtagagctgtgccagagcttcaagcccaaaacttcagtgggacaggcagcaggtggccagagtgggctggggccccctgcctcccagaatgtgaacagccacgtcaaggagccggcaggcttggaagaagaggaagtttcgaggactctgggtctagtccccagggatcaggagcccagaggcagtcatagtcctcagaggccccagctccattccccagctcagagtgagggcccctcctccctctgtgggaaactgaagcaggccttgaagccttgtccccttgaggacaagaaacccgaggactgcaaagtgcccccaaggcccttagaggctgaaggtgcccagctgcagggcggcagtaatgagtgggaagtggtggttcaagtggaggatgatggggatggcgattacatgtctgagcctgaggctgtgctgaccaggaggaagtcaaatgtaatccgaaagccctgtgcagctgagccagccctgagcgcgggctccctagcagctgagcctgctgagaacagaaaaggtacagcggtgccggtcgaatgccccacatgtcataaaaagttcctcagcaaatattatctaaaagtccacaacaggaaacatactggggagaaaccctttgagtgtcccaaatgtgggaagtgttactttcggaaggagaacctcctggagcatgaagcccggaattgcatgaaccgctcggaacaggtcttcacgtgctctgtgtgccaggagacattccgccgaaggatggagctgcgggtgcacatggtgtctcacacaggggagatgccctacaagtgttcctcctgctcccagcagttcatgcagaagaaggacttgcagagccacatgatcaaacttcatggagcccccaagccccatgcatgccccacctgtgccaagtgcttcctgtctcggacagagctgcagctgcatgaagctttcaagcaccgtggtgagaagctgtttgtgtgtgaggagtgtgggcaccgggcctcgagccggaatggcctgcagatgcacatcaaggccaagcacaggaatgagaggccacacgtatgtgagttctgcagccacgccttcacccaaaaggccaatctcaacatgcacctgcgcacacacacgggtgagaagcccttccagtgccacctctgtggcaagaccttccgaacccaagccagcctggacaagcacaaccgcacccacaccggggaaaggcccttcagttgcgagttctgtgaacagcgcttcactgagaaggggcccctcctgaggcacgtggccagccgccatcaggagggccggccccacttctgccagatatgcggcaagaccttcaaagccgtggagcaactgcgtgtgcacgtcagacggcacaagggggtgaggaagtttgagtgcaccgagtgtggctacaagtttacccgacaggcccacctgcggaggcacatggagatccacgaccgggtagagaactacaacccgcggcagcgcaagctccgcaacctgatcatcgaggacgagaagatggtggtggtggcgctgcagccgcctgcagagctggaggtgggctcggcggaggtcattgtggagtccctggcccagggcggcctggcctcccagctccccggccagagactgtgtgcagaggagagcttcaccggcccaggtgtcctggagccctccctcatcatcacagctgctgtccccgaggactgtgacacatagcccattctggccaccagagcccacttggccccacccctcaataaaccgtgtggctttggactctcgtaaaaaaaaaaaaaaaaaaaaaaaaaaaaaaaaaaaaaaaaaaaaaaaaaaaaaaaaaaaaaaaaaaaaaaaaaaa

SEQ ID NO: 382 - DNA, 5607 bp, Homo sapiens
actcttgtcagggccgcggcacatgggcggccggatgcgctgagcccggcgctgcggggccgcggagcgctggggagcagcggccgccggcgcggggaggggggtggggtgggacggcgcaccgcctccggtgctggcactaggggctggggtcggcgcggtgtcttctgcccttctgcagccgtcgacatttttttttctttctttttttcaattttgaacattttgcaaaacgaggggttcgaggcaggtgagagcatcctgcacgtcgccggggagcccgcgggcacttggcgcgctctcctgggaccgtctgcactggaaacccgaaagtttttttttaatatatatttttatgcagatgtatttataaagatataagtaatttttttcttcccttttctccaccgccttgagagcgagtacttttggcaaaggacggaggaaaagctcagcaacattttagggggcggttgtttctttcttatttctttttttaaggggaaaaaatttgagtgcatcgcgatggagaaaatgtcccgaccgctccccctgaatcccacctttatcccgcctccctacggcgtgctcaggtccctgctggagaacccgctgaagctcccccttcaccacgaagacgcatttagtaaagataaagacaaggaaaagaagctggatgatgagagtaacagcccgacggtcccccagtcggcattcctggggcctaccttatgggacaaaacccttccctatgacggagatactttccagttggaatacatggacctggaggagtttttgtcagaaaatggcattccccccagcccatctcagcatgaccacagccctcaccctcctgggctgcagccagcttcctcggctgccccctcggtcatggacctcagcagccgggcctctgcaccccttcaccctggcatcccatctccgaactgtatgcagagccccatcagaccaggtcagctgttgccagcaaaccgcaatacaccaagtcccattgatcctgacaccatccaggtcccagtgggttatgagccagacccagcagatcttgccctttccagcatccctggccaggaaatgtttgaccctcgcaaacgcaagttctctgaggaagaactgaagccacagcccatgatcaagaaagctcgcaaagtcttcatccctgatgacctgaaggatgacaagtactgggcaaggcgcagaaagaacaacatggcagccaagcgctcccgcgacgcccggaggctgaaagagaaccagatcgccatccgggcctcgttcctggagaaggagaactcggccctccgccaggaggtggctgacttgaggaaggagctgggcaaatgcaagaacatacttgccaagtatgaggccaggcacgggcccctgtaggatggcatttttgcaggctggctttggaatagatggacagtttgtttcctgtctgatagcaccacacgcaaaccaacctttctgacatcagcactttaccagaggcataaacacaactgactcccattttggtgtgcatctgtgtgtgtgtgcgtgtatatgtgcttgtgctcatgtgtgtggtcagcggtatgtgcgtgtgcgtgttcctttgctcttgccattttaaggtagccctctcatcgtcttttagttccaacaaagaaaggtgccatgtctttactagactgaggagccctctcgcgggtctcccatcccctccctccttcactcctgcctcctcagctttgcttcatgttcgagcttacctactcttccaggactctctgcttggattcactaaaaagggccctggtaaaatagtggatctcagtttttaagagtacaagctcttgtttctgtttagtccgtaagttaccatgctaatgaggtgcacacaataacttagcactactccgcagctctagtcctttataagttgctttcctcttactttcagttttggtgataatcgtcttcaaattaaagtgctgtttagatttattagatcccatatttacttactgctatctactaagtttccttttaattctaccaaccccagataagtaagagtactattaatagaacacagagtgtgtttttgcactgtctgtacctaaagcaataatcctattgtacgctagagcatgctgcctgagtattactagtggacgtaggatattttccctacctaagaatttcactgtcttttaaaaaacaaaaagtaaagtaatgcatttgagcatggccagactattccctaggacaaggaagcagagggaaatgggaggtctaaggatgaggggttaatttatcagtacatgagccaaaaactgcgtcttggattagcctttgacattgatgtgttcggttttgttgttccccttccctcacaccctgcctcgcccccacttttctagttaactttttccatatccctcttgacattcaaaacagttacttaagattcagttttcccactttttggtaatatatatatttttgtgaattatactttgttgtttttaaaaagaaaatcagttgattaagttaataagttgatgttttctaaggccctttttcctagtggtgtcatttttgaatgcctcataaattaatgattctgaagcttatgtttcttattctctgtttgcttttgaacgtatgtgctcttataaagtggacttctgaaaaatgaatgtaaaagacactggtgtatctcagaaggggatggtgttgtcacaaactgtggttaatccaatcaatttaaatgtttactatagaccaaaaggagagattattaaatcgtttaatgtttatacagagtaattataggaagttcttttttgtacagtatttttcagatataaatactgacaatgtattttggaagacatatattatatatagaaaagaggagaggaaaactattccatgttttaaaattatatagcaaagatatatattcaccaatgttgtacagagaagaagtgcttgggggtttttgaagtctttaatattttaagccctatcactgacacatcagcatgttttctgctttaaattaaaattttatgacagtatcgaggcttgtgatgacgaatcctgctctaaaatacacaaggagctttcttgtttcttattaggcctcagaaagaagtcagttaacgtcacccaaaagcacaaaatggattttagtcaaatatttattggatgatacagtgttttttaggaaaagcatctgccacaaaaatgttcacttcgaaattctgagttcctggaatggcacgttgctgccagtgccccagacagttcttttctaccctgcgggcccgcacgttttatgaggttgatatcggtgctatgtgtttggtttataatttgatagatgtttgactttaaagatgattgttcttttgtttcattaagttgtaaaatgtcaagaaattctgctgttacgacaaagaaacattttacgctagattaaaatatcctttcatcaatgggattttctagtttcctgccttcagagtatctaatcctttaatgatctggtggtctcctcgtcaatccatcagcaatgcttctctcatagtgtcatagacttgggaaacccaaccagtaggatatttctacaaggtgttcattttgtcacaagctgtagataacagcaagagatgggggtgtattggaattgcaatacattgttcaggtgaataataaaatcaaaaacttttgcaatcttaagcagagataaataaaagatagcaatatgagacacaggtggacgtagagttggcctttttacaggcaaagaggcgaattgtagaattgttagatggcaatagtcattaaaaacatagaaaaatgatgtctttaagtggagaattgtggaaggattgtaacatggaccatccaaatttatggccgtatcaaatggtagctgaaaaaactatatttgagcactggtctctcttggaattagatgtttatatcaaatgagcatctcaaatgttttctgcagaaaaaaataaaaagattctaataaaatgtattctcttgtgtgccaggagaggtttcagaaacctacctcgtcttacaaatttaaacactttggagtctgtacaggtgccttatatgtaggtcattgtcacgatacacacacacgaacactccctctggactggctgcctctccatccagggcagttaactagcaaacaaggcagatctgcttcatggagcgggaggccatggcttgactctgagtgatttgggtcaaccggagtcagacgcatgtctgcacgctgcagctattatgagagtccctttgtcatttttcaccttttcatcctaagcatctttcagagattaattatttggccattaacaatgaatccaaatcatatcatactgacatcatctagacatgatttggaaggaacagcttaggacctcctgatgaggtcacattgttgtttcttttaactagacttggcaaagaaaggcaaaaattgaccagcctatctttctgctggtgctgccttaaggaggtagtttgttgaggggagggctgtagatcattacttctttctcttcaggaagtggccactttgaaccattcaaataccacattaggcaagactgtgataggccttttgtcttcaaatacaacaggcctccactgacccatccctcaaagcagaaggaccctttgaggagagtacagatgggattccacagtggggtgggtggaatggaaacctgtactagaccacccagaggttccttctaacccactggtttggtggggaactcacagtaattccaaatgtacaatcagatgtctagggtctgttttcggaagaagcaagaattatcagtggcaccctccccactgcccccagtgtaaaacaatagacattctgtgaaatgcaaagctattctttggtttttctagtagtttatctcattttaccctattcttcctttaaggaaaactcaatctttatcacagtcaattagagcgatcccaaggcatgggaccaggcctgcttgcctatgtgtgatggcaattggagatctggatttagcactggggtctcagcaccctgcaggtgtctgagactaagtgatctgccctccaggtggcgatcaccttctgctcctaggtacccccactggcaaggccaaggtctcctccacgttttttctgcaattaataatgtcatttaaaaaatgagcaaagccttatccgaatcggatatagcaactaaagtcaatacattttgcaggaggctaagtgtaagagtgtgtgtgtgtgtgtgtgcgtgcatgtgtgtgtgtgtgtatgtgtgtgaataagtcgacataaagtctttaattttgagcaccttaccaaacataacaataatccattatccttttggcaacaccacaaagatcgcatctgttaaacaggtacaagttgacatgaggttagtttaattgtacaccatgatattggtggtatttatgctgttaagtccaaacctttatctgtctgttattcttaatgttgaataaactttgaattttttcctttcaaaaaaaa

SEQ ID NO: 383 - DNA, 2308 bp, Homo sapiens
aaaactttgggagtttttagagacgagtttttttttttttctattacttttccccccccctaactaacggactattattgttgttgttttaaatttagctcttagggcttagctatttgggttttcttgcggtgtccggctcccgtctccctggctcccccgcccgccctgcggccccagcgcccctcgctctcatccagcccgcgaggagtgcgggcgccgcgccgcctttaaagcgaggccagggagcgaggcggtgaccggccgagatccggccctcgcctcctccctcggtggcgctagggctcccggcctctcttcctcagtgcgggcggagaagcgaaagcggatcgtcctcggctgccgccgccttctccgggactcgcgcgcccctccccgcgcgcccacccacccagtccggctggactgcggcagccgcgcggctcaccccggcaggatgttcgcagccgggctggctcccttctacgcctccaacttcagcctctggtcggccgcttactgctcctcggccggcccaggcggctgctccttccccttggaccccgccgccgtcaaaaagccctccttctgcatcgcagacattctgcacgccggcgtgggggatctgggggcggccccggagggcctggcaggggcctcggccgccgccctcaccgcgcacttgggctcggttcacccgcacgcctctttccaagcggcggccagatccccgcttcgacccaccccagtggtggcgccctccgaagtcccggctggcttcccgcagcggctgtctccgctctcagccgcctaccaccaccatcacccgcaacaacaacagcagcagcaacagccgcagcagcaacagcctccgcctccgccccgggctggcgccctgcagcccccggcctcggggacgcgagtggttccgaacccccaccacagtggctctgccccggccccctccagcaaagacctcaaatttggaattgaccgcattttatctgcagaatttgacccaaaagtcaaagaaggcaacacgctgagagatctcacttccctgctaaccggtgggcggcccgccggggtgcacctctcaggcctgcagccctcggccggccagttcttcgcatctctagatcccattaacgaggcttctgcaatcctgagtcccttaaactcgaacccaagaaattcagttcagcatcagttccaagacacgtttccaggtccctatgctgtgctcacgaaggacaccatgccgcagacgtacaaaaggaagcgttcatggtcgcgcgctgtgttctccaacctgcagaggaaaggcctggagaaaaggtttgagattcagaagtacgtgaccaagccggaccgaaagcagctggcggcgatgctgggcctcacggacgcacaggtgaaggtgtggttccagaaccggcggatgaagtggcggcactccaaggaggcccaggcccaaaaggacaaggacaaggaggctggcgagaagccatcaggtggagccccggctgcggatggcgagcaggacgagaggagccccagccgttctgaaggcgaggctgagagcgagagcagcgactccgagtccctggacatggcccccagcgacacggagcggactgaggggagtgagcgttctctgcaccaaacaacagttattaaggccccggtcactggcgccctcattaccgccagcagtgctgggagtggtgggagcagcggcggcggcggcaatagtttcagcttcagcagcgccagcagtcttagtagcagcagcaccagtgcgggttgcgccagcagccttggcggcggcggcgcctcggagcttctccctgcaacacagcccacagccagcagcgctcccaaaagccccgagccagcccaaggcgcgcttggctgcttatagactgtactagggcggaggggatccgggccttgcgtgcagcctcccaaccatgggctgggttttgtgcttactgtatgttggcgacttggtagggcaggagacgcagcgtggagcctacctcccgacattcacgcttcgccccacgctgctccgactggctgcagcggacactgcccaaagcagaggggagtctcagtgtcctgctagccagccgaacacttctctccggaagcaggctggttcgactgtgaggtgtttgactaaactgtttctctgactcgccccagaggtcgtggctcaaaggcacttaggacgccttaaatttgtaaataaaatgtttactacggtttgtaaaaaaaaaaaaaaaaaaaaaaaaaaaaaaaa

SEQ ID NO: 384 - DNA, 2176 bp, Homo sapiens
cagcggcctccgcgcggtcgcctgagggctgcagcgcaaagaaccgggctcccgggcccggacgcggggaagcactcgcgtgggagtttgtgcgagcgcggcccggggcggggcccgcacggaggaggcgccgggaccatggtcaccctcggctgagtttccggcggcgactttgattattggcaaataaccaccataacaataccgagcccccgggcttgcaccgcacgcactgactccgcgagcccgcacacggccgcgtcgcccgccaccgggccctgagcgccagccccaaacgagccgatggaaaaatccaaaaatttccgcatcgacgccctgctggcggtggaccccccacgagccgcctctgcgcagagcgcgccgctggccttggtcacgtcgctcgccgccgccgcatctggcaccggaggtggcggcggcggcggcggggcgagcggcgggactagcggcagctgcagccccgcgtcctcggagccgccggctgcgcccgccgaccgcctgcgcgccgagagcccgtcgccgccgcgcctgctggccgcgcactgcgcgctgctgcccaagccgggcttcctgggcgcgggcggcggcggcggcggcacgggcggcgggcacggggggccccaccaccacgcgcatccgggcgcagcggccgctgccgccgccgccgccgccgccgccgccgctgggggcctggcgctggggctgcaccctgggggcgcgcagggcggcgcgggcctcccggcgcaggcggcgctctacggccacccggtctacggctactccgcggcggcggcggcggctgcgctggcgggccagcacccggcgctctcctactcgtacccgcaggtgcaaggcgcgcaccccgcgcaccccgccgaccccatcaagctgggcgccggcaccttccagctggaccagtggctgcgcgcgtccaccgcgggcatgatcctgcctaagatgcccgacttcaactcccaggcgcagtcgaacctcctggggaagtgccgccggccgcgcaccgccttcaccagccagcagctgctggagctggagcaccagttcaagctcaacaagtacctgtcgcggcccaagcgcttcgaggtggccacctcgctcatgctcaccgagacccaggtgaagatttggttccagaaccggcggatgaaatggaaacgcagcaaaaaggccaaagagcaggcggcgcaggaagcggagaaacagaagggcggcggcgggggcgcggggaagggcggcgcggaggagccgggagccgaggagctgctggggccgccagcgcccggagacaagggcagcggacgccgcctgcgggacttgagggacagtgaccccgaggaggacgaggacgaggacgacgaggaccatttcccctacagcaacggcgccagcgtccacgccgcctcctccgactgctcctcggaggacgactcgccgcccccgcggcccagccaccagcccgcgccccagtaggagccccgcggcccagcaggtgcggcgcgcacggagcgccccggccggcggcttctcccggaggccccggcgcccgcacccacccggcccggccccgagagcaggctcgaccgccgccccatggacccctcgcccaggccggggctggagggattcggccgcggctccggtcctgggcgcttcccttttaagcaagggcgcctcacctgctcttcaagaaacagcgagagggagacccagggggctgaaacttgaactctggttcttttaaaattaattttggttggtgttgggggaggcgcgagtgcgtgtgagaagaaccgacccaccccgcgcaaggggaagcctcctgtctcccctttccccgcgtccgagaaggcggaaacccacagtgttacctgacttatgaaacttgaaaccgcctctggagccgccattctgcagagtatttggaaaaagaaaaaagggtttatgcttacgtctctggggtcggggggattatgtcacgagcgttcaaactgctggaaatctcaaaactgtactgtctttatttttgtatattgtatttatatataaaaagaaacgtctacgtatgcatgctaaattattatttagcttctcccatcgcccacgatggaatgtaaaataaattggttttgtactggat

SEQ ID NO: 385 - DNA, 3898 bp, Homo sapiens
cgagtgcgtgaagtgaaggcgattgagaggggctgagggaattgtcctctgtggaagggactttcttttggccctaggccccttcctgcccctgtcgtcagcagagtctctacaaggaagataacggactgtaaaattctataaagcaaagctacacatcacttgacaccatacaccatcttggttacataatgaagagagatggaaaacttgatgactagctccaccctaccgcccctttttgcagatgaagacggttccaaggagagtaatgatctggctaccactgggttaaatcacccagaggttccatacagtagtggcgccacatcatccaccaacaatccagaatttgtggaggatctctctcaaggtcagttgcttcagagtgagtcttcaaatgcagcagaaggcaatgaacagaggcatgaagatgagcaacgaagtaaacgaggaggttggtccaaaggaagaaagaggaagaaacctcttcgagacagcaatgcacccaaatccccccttacaggatatgttcggttcatgaatgagcgtcgagaacaacttcgagcaaagagaccagaagtcccatttccagaaatcacaaggatgttaggcaatgaatggagtaaactgcctcctgaggaaaaacagcgctaccttgatgaagcagacagagataaggagcgttacatgaaggaactggaacagtatcagaaaacagaggcctacaaggtcttcagtaggaaaacccaggaccgtcagaaaggcaaatctcataggcaagatgcagcccggcaggccactcatgatcatgagaaagaaacagaggtaaaggaacggtctgtttttgacatccctatatttacagaggaattcttgaaccatagcaaagctcgggaagcagagctccgccagcttcgcaaatccaacatggagtttgaggagaggaatgcagccctgcaaaagcacgtggagagcatgcgcacagcagtggagaagctggaggtggatgtgatccaggagcggagccgcaacacagtcttacagcagcacctggagaccctgcggcaggtgctgaccagcagctttgccagcatgcccttgcctggaagtggagagacacctacagtggacaccattgactcatatatgaacagactgcacagtattattttagctaatccccaagacaatgaaaacttcatagctacagttcgagaagttgtgaacagactcgatcgttagggaatggtcttagaactccaagatgttccataagtgtttttacttgtgaggaatgagaagccatccatggaaatttgaactgagtgggggcagagaaagagtgcagatccctttgcttgtgaaagaattatcagtgagtgaaaggccatcaccccaggaagccaaatgagggagcagcaacatgtatatgagcttcctatggaattgtccttatgtgaagctttgaaggtgtacagccactctcccgggtcttcaggttcctaccatttccatttctgttaaagtggatctgcatatcttcagcttactaggtgacccggatgctgacatctgctgctgcagaaaggaagacttttcattgtaatttcgcttagacccttttatcagtggagctccagttttcttacctagctgtcacttttttaaatgcctctgggggttatttttgctttccttggcccccaccaatttatacatctccattttctgacctctggactaactggttgctcagcaaggttctgaaggagagtttcttgcattggacaggcccagtcttctcccatcattgccctgctgtgactccaaagaaaggagcttcttgctgacagtgccctgtggagcaaggctgtgtttcctaccccacacggtgctcagtgggtgccagccctcagtgtggctttgtgattgctgccctaaaggagaatgctctttccttcctcactggtactgcctgctgttttctaagcattgctcctgcacagacatggagtcccagccccagcaaggctcttctgttcccatctgttgacaatgtcttgtggagcatttttgctgaggaaaaggtcacttgtaaacagaggagaaagggaaagagtacaaagccctaagtttattgtaagtgaaaactgagggaattcctgtcttctttaggagtaatgattcatagatctagataggtggaaatatcattcaaaatagtcacttgagctcacaaaaaaagcaaggaagaattctcatgtcctttgtcttccttctgtagccattaactgctgaatccatgtgaggaagacaggcttcccttccttccccctccttagtgattttttctttaacagcataagtaaagaggactttctggttcatttttgtttgttttgttttgttttgttttgtttacagatgaggtcttgctgtgttgcccaggctggagtgcggtggctattcacagatgctatcatagcacactacagcctccaactcttgggctcaagcatcacgcctagcagtttctggttcctttaacagcaaaaggaaagagaggttctgattcttacctcagggttttttggttgttcattgtttttgtttttgtttttgttttgacactgcagagcacaaggctaaaggttacagctgagatctttggaaccaaaggcagagcaagcagagcccgttgtctgggccccacaccactgcaggcaggtggatagaagtgcggcccctctcatagtatgcccataagtcagggcatagggcagaactacctgtcatgttgctacaccatcctgtcttctcagcatctccttgcctgttttctttattagtccaaaggaaaacaacagcaacaaaatctgtttttaaaatgtcttatatgaacatatatcaaatatccatgcgctgaaacccacataccatcacttggcaattttttagaataagaccccattattatctattgctataaacctagccagttctcttgctcttctgtattttcctatttccctgccatcatctgctatttctgccacttctcttagactccttgtctgcaaagcccaagctagaactcactgtctatggcagaaggacatccagagcccattctggagttttgttttttccttctgccagatgctttgtgtcctgtcttccttcctcctcatatttctgtttctcatttgtgttcagttttgtgcagcattgctagcactgcttttgtgaccagaaaaggccataacatggtccaggatcatcattcttctgactctagatgggacacttgacagtgacttgaaacatttgcatattcaggaatgcatgagatttcaagagagcctacagtatgaaatcattttcacaaaataagcagcttgcttctgaaatgctgtctttcccagtagctactcacctgcctctggtggctgggattcagatgccacaaaactgtcagtatctatagaccaggtctgtgccacctcctctctcctctgtgctcagtgaggaggcagtaaatgaagttacaggctagcacaatacctaattcatgtttcccagtacacctgtagatattactgtacttttatgttctcaagaaataagttgttgcctattcagtgttacagatttctttgtttctttttaattaaaatacaagaagcagctgaggaaagggagacaaggtattttatttctgactgattttagaaaaaacttgtgtacatgtgtttggaactgttgaaatgccaagttttctgtataagtgtttttgtaattaaactttcagattttctttgttttttaagaagttgatgtgcttgtttgacatttgtctcattaaaacttttctacgttgaaaaaaaaaaaaaaa

SEQ ID NO: 386 - DNA, 1584 bp, Homo sapiens
gttggttggagcgtcgcgcagtcgggaggtccgggaaagtttctttggaggtccggcccggagcggccatgtcccacggccccaagcagcccggcgcggccgccgcgccggcgggcggcaaggctccgggccagcatgggggcttcgtggtgactgtcaagcaagagcgcggcgagggtccacgcgcgggcgagaaggggtcccacgaggaggagccggtgaagaaacgcggctggcccaagggcaagaagcggaagaagattctgccgaatgggcccaaggcaccggtcacgggctacgtgcgcttcctgaacgagcggcgcgagcagatccgcacgcgccacccggatctgccctttcccgagatcaccaagatgctgggcgccgagtggagcaagctgcagccaacggaaaagcagcggtacctggatgaggccgagagagagaagcagcagtacatgaaggagctgcgggcgtaccagcagtctgaagcctataagatgtgcacggagaagatccaggagaagaagatcaagaaagaagactcgagctctgggctcatgaacactctcctgaatggacacaagggtggggactgcgatggcttctccaccttcgatgttcccatcttcactgaagagttcttggaccaaaacaaagcgcgtgaggcggagcttcggcgcttgcggaagatgaatgtggccttcgaggagcagaacgcggtactgcagaggcacacgcagagcatgagcagcgcgcgcgagcgtctggagcaggagctggcgctggaggagcggaggacgctggcgctgcagcagcagctccaggccgtgcgccaggcgctcaccgccagcttcgcctcactgccggtgccgggcacgggcgaaacgcccacgctgggcactctggacttctacatggcccggcttcacggagccatcgagcgcgaccccgcccagcacgagaagctcatcgtccgcatcaaggaaatcctggcccaggtcgccagcgagcacctgtgaggagtgggcgggcccacgatgcagaggagaagctgtgggcgcggccctgccacaccccaccccgtggacgagaggctgggggtccaccctttggggcctggtcccatcctgcaccttgggggctccagcccccctaaaattaaatttctgcagcatccctttagctttcaatctccccagccccctgaacccggaaaaagcactcgctgcgcgatacacccagaagaacctcacagccgagggtgcccctcctcggaggacagccacgcgctacactggctctccgggccacccccaggacacagggcagacgaaacccacccccagcacacggcaggaccccccaaattactcactacggggggctgtgccataggccacacaggaagctgccttgtggggacttacctggggtgtcccccgcatgcctgtaccccagatgggtgggggccggctttgcccatcctgctctcctccagccgagggaccctggtgggggtggctccttctcactgctggatccggactttttaaataaaaacaagtaaaatttgtgttttaa

SEQ ID NO: 387 - DNA, 1998 bp, Homo sapiens
catttgcatggccccgccccctgagtgacacggctggcgcgggcgggcccgtcccccctgcccctgggtcgctctttttaagctcccctgagccggtgctgcgctcctctaattgggactccgagccggggctatttctggcgctggcgcggctccaagaaggcatccgcatttgctaccagcggcggccgcggcggagccaggccggtcctcagcgcccagcaccgccgctcccggcaacccggagcgcgcaccgcaggccggcggccgagctcgcgcatcccagccatcactcttccacctgctccttagagaagggaagatgagtgagtcgagctcgaagtccagccagcccttggcctccaagcaggaaaaggacggcactgagaagcggggccggggcaggccgcgcaagcagcctccgaaggagcccagcgaagtgccaacacctaagagacctcggggccgaccaaagggaagcaaaaacaagggtgctgccaagacccggaaaaccaccacaactccaggaaggaaaccaaggggcagacccaaaaaactggagaaggaggaagaggagggcatctcgcaggagtcctcggaggaggagcagtgacccatgcgtgccgcctgctcctcactggaggagcagcttccttctgggactggacagctttgctccgctcccaccgcccccaccccttccccaggcccaccatcaccaccgcctctggccgccacccccatcttccacctgtgccctcaccaccacactacacagcacaccagccgctgcagggctcccatgggctgagtggggagcagttttcccctggcctcagttcccagctccccccgcccacccacgcatacacacatgccctcctggacaaggctaacatcccacttagccgcaccctgcacctgctgcgtccccactcccttggtggtggggacattgctctctgggcttttggtttgggggcgccctctctgctccttcactgttccctctggcttcccatagtggggcctgggagggttcccctggccttaaaaggggcccaagccccatctcatcctggcacgccctactccactgccctggcagcagcaggtgtggccaatggaggggggtgctggcccccaggattcccccagccaaactgtctttgtcaccacgtggggctcacttttcatccttccccaacttccctagtccccgtactaggttggacagcccccttcggttacaggaaggcaggaggggtgagtcccctactccctcttcactgtggccacagcccccttgccctccgcctgggatctgagtacatattgtggtgatggagatgcagtcacttattgtccaggtgaggcccaagagccctgtggccgccacctgaggtgggctggggctgctcccctaaccctactttgcttccgccactcagccatttccccctcctcagatggggcaccaataacaaggagctcaccctgcccgctcccaacccccctcctgctcctccctgccccccaaggttctggttccatttttcctctgttcacaaactacctctggacagttgtgttgttttttgttcaatgttccattcttcgacatccgtcattgctgctgctaccagcgccaaatgttcatcctcattgcctcctgttctgcccacgatcccctcccccaagatactctttgtggggaagaggggctggggcatggcaggctgggtgaccgactaccccagtcccagggaaggtggggccctgcccctaggatgctgcagcagagtgagcaagggggcccaaatcgaccataaagggtgtaggggccacctcctccccctgttctgttggggaggggtagccatgatttgtcccagcctggggctccctctctggtttcctatttgcagttacttgaataaaaaaaatatccttttctggaaaaaaaaaaaaaaaaaaaaaaaaaaaaaaaaaaaaaaa

SEQ ID NO: 388 - DNA, 4150 bp, Homo sapiens
cttgaatcttggggcaggaactcagaaaacttccagcccgggcagcgcgcgcttggtgcaagactcaggagctagcagcccgtccccctccgactctccggtgccgccgctgcctgctcccgccaccctaggaggcgcggtgccacccactactctgtcctctgcctgtgctccgtgcccgaccctatcccggcggagtctccccatcctcctttgctttccgactgcccaaggcactttcaatctcaatctcttctctctctctctctctctctctctctctctctctctctctctctctctctctctcgcagggtggggggaagaggaggaggaattctttccccgcctaacatttcaagggacacaattcactccaagtctcttccctttccaagccgcttccgaagtgctcccggtgcccgcaactcctgatcccaacccgcgagaggagcctctgcgacctcaaagcctctcttccttctccctcgcttccctcctcctcttgctacctccacctccaccgccacctccacctccggcacccacccaccgccgccgccgccaccggcagcgcctcctcctctcctcctcctcctcccctcttctctttttggcagccgctggacgtccggtgttgatggtggcagcggcggcagcctaagcaacagcagccctcgcagcccgccagctcgcgctcgccccgccggcgtccccagccctatcacctcatctcccgaaaggtgctgggcagctccggggcggtcgaggcgaagcggctgcagcggcggtagcggcggcgggaggcaggatgagcgcacgcggtgagggcgcggggcagccgtccacttcagcccagggacaacctgccgccccagcgcctcagaagagaggacgcggccgccccaggaagcagcagcaagaaccaaccggtgagccctctcctaagagacccaggggaagacccaaaggcagcaaaaacaagagtccctctaaagcagctcaaaagaaagcagaagccactggagaaaaacggccaagaggcagacctaggaaatggccacaacaagttgttcagaagaagcctgctcaggaggaaactgaagagacatcctcacaagagtctgccgaagaggactagggggcgccaacgttcgatttctacctcagcagcagttggatcttttgaagggagaagacactgcagtgaccacttattctgtattgccatggtctttccactttcatctggggtggggtggggtggggtgggggaggggggggtggggtggggagaaatcacataaccttaaaaaggactatattaatcaccttctttgtaatcccttcacagtcccaggtttagtgaaaaactgctgtaaacacaggggacacagcttaacaatgcaacttttaattactgttttcttttttcttaacctactaatagtttgttgatctgataagcaagagtgggcgggtgagaaaaaccgaattgggtttagtcaatcactgcactgcatgcaaacaagaaacgtgtcacacttgtgacgtcgggcattcatataggaagaacgcggtgtgtaacactgtgtacacctcaaataccaccccaacccactccctgtagtgaatcctctgtttagaacaccaaagataaggactagatactactttctctttttcgtataatcttgtagacacttacttgatgatttttaactttttatttctaaatgagacgaaatgctgatgtatcctttcattcagctaacaaactagaaaaggttatgttcatttttcaaaaagggaagtaagcaaacaaatattgccaactcttctatttatggatatcacacatatcagcaggagtaataaatttactcacagcacttgttttcaggacaacacttcattttcaggaaatctacttcctacagagccaaaatgccatttagcaataaataacacttgtcagcctcagagcatttaaggaaactagacaagtaaaattatcctctttgtaatttaatgaaaaggtacaacagaataatgcatgatgaactcacctaattatgaggtgggaggagcgaaatctaaatttcttttgctatagttatacatcaatttaaaaagcaaaaaaaaaaaaggggggggcaatctctctctgtgtctttctctctctctcttcctctccctctctcttttcattgtgtatcagtttccatgaaagacctgaataccacttacctcaaattaagcatatgtgttacttcaagtaatacgttttgacataagatggttgaccaaggtgcttttcttcggcttgagttcaccatctcttcattcaaactgcacttttagccagagatgcaatatatccccactactcaatactacctctgaatgttacaacgaatttacagtctagtacttattacatgctgctatacacaagcaatgcaagaaaaaaacttactgggtaggtgattctaatcatctgcagttctttttgtacacttaattacagttaaagaagcaatctccttactgtgtttcagcatgactatgtatttttctatgtttttttaattaaaaatttttaaaatacttgtttcagcttctctgctagatttctacattaacttgaaaattttttaaccaagtcgctcctaggttcttaaggataattttcctcaatcacactacacatcacacaagatttgactgtaatatttaaatattaccctccaagtctgtacctcaaatgaattctttaaggagatggactaattgacttgcaaagacctacctccagacttcaaaaggaatgaacttgttacttgcagcattcatttgttttttcaatgtttgaaatagttcaaactgcagctaaccctagtcaaaactatttttgtaaaagacatttgatagaaaggaacacgtttttacatacttttgcaaaataagtaaataataaataaaataaaagccaaccttcaaagaaacttgaagctttgtaggtgagatgcaacaagccctgcttttgcataatgcaatcaaaaatatgtgtttttaagattagttgaatataagaaaatgcttgacaaatattttcatgtattttacacaaatgtgatttttgtaatatgtctcaaccagatttattttaaacgcttcttatgtagagtttttatgcctttctctcctagtgagtgtgctgactttttaacatggtattatcaactgggccaggaggtagtttctcatgacggcttttgtcagtatggcttttagtactgaagccaaatgaaactcaaaaccatctctcttccagctgcttcagggaggtagtttcaaaggccacatacctctctgagactggcagatcgctcactgttgtgaatcaccaaaggagctatggagagaattaaaactcaacattactgttaactgtgcgttaaataagcaaataaacagtggctcataaaaataaaagtcgcattccatatctttggatgggccttttagaaacctcattggccagctcataaaatggaagcaattgctcatgttggccaaacatggtgcaccgagtgatttccatctctggtaaagttacacttttatttcctgtatgttgtacaatcaaaacacactactacctcttaagtcccagtatacctcatttttcatactgaaaaaaaaagcttgtggccaatggaacagtaagaacatcataaaatttttatatatatagtttatttttgtgggagataaattttataggactgttctttgctgttgttggtcgcagctacataagactggacatttaacttttctaccatttctgcaagttaggtatgtttgcaggagaaaagtatcaagacgtttaactgcagttgactttctccctgttcctttgagtgtcttctaactttattctttgttctttatgtagaattgctgtctatgattgtactttgaatcgcttgcttgttgaaaatatttctctagtgtattatcactgtctgttctgcacaataaacataacagcctctgtgatccccatgtgttttgattcctgctctttgttacagttccattaaatgagtaataaagtttggtcaaaacagaaaaaaaaaaa

SEQ ID NO: 389 - DNA, 3428 bp, Homo sapiens
tggagagtaatgttacagagcggagagagtgaggaggctgcgtctggctcccgctctcacagccattgcagtacattgagctccatagagacagcgccggggcaagtgagagccggacgggcactgggcgactctgtgcctcgctgaggaaaaataactaaacatgggcaaaggagatcctaagaagccgagaggcaaaatgtcatcatatgcattttttgtgcaaacttgtcgggaggagcataagaagaagcacccagatgcttcagtcaacttctcagagttttctaagaagtgctcagagaggtggaagaccatgtctgctaaagagaaaggaaaatttgaagatatggcaaaagcggacaaggcccgttatgaaagagaaatgaaaacctatatccctcccaaaggggagacaaaaaagaagttcaaggatcccaatgcacccaagaggcctccttcggccttcttcctcttctgctctgagtatcgcccaaaaatcaaaggagaacatcctggcctgtccattggtgatgttgcgaagaaactgggagagatgtggaataacactgctgcagatgacaagcagccttatgaaaagaaggctgcgaagctgaaggaaaaatacgaaaaggatattgctgcatatcgagctaaaggaaagcctgatgcagcaaaaaagggagttgtcaaggctgaaaaaagcaagaaaaagaaggaagaggaggaagatgaggaagatgaagaggatgaggaggaggaggaagatgaagaagatgaagatgaagaagaagatgatgatgatgaataagttggttctagcgcagttttttttttcttgtctataaagcatttaacccccctgtacacaactcactccttttaaagaaaaaaattgaaatgtaaggctgtgtaagatttgtttttaaactgtacagtgtctttttttgtatagttaacacactaccgaatgtgtctttagatagccctgtcctggtggtattttcaatagccactaaccttgcctggtacagtatgggggttgtaaattggcatggaaatttaaagcaggttcttgttggtgcacagcacaaattagttatatatggggatggtagttttttcatcttcagttgtctctgatgcagcttatacgaaataattgttgttctgttaactgaataccactctgtaattgcaaaaaaaaaaaaaaagttgcagctgttttgttgacattctgaatgcttctaagtaaatacaattttttttattagtattgttgtccttttcataggtctgaaatttttcttcttgaggggaagctagtcttttgcttttgcccattttgaatcacatgaattattacagtgtttatcctttcatatagttagctaataaaaagcttttgtctacacaccctgcatatcataatgggggtaaagttaagttgagatagttttcatccataactgaacatccaaaatcttgatcagttaagaaatttcacatagcccacttacatttacaaactgaagagtaatcaatctactcaaagcatgggattattagaatcaaacattttgaaagtctgtccttgaaggactaatagaaaagtatgttctaacctttacatgaggactctattctttaactcccattaccatgtaatggcagttatattttgcagttcccacattaaagaagacctgagaatgtatccccaaaagcgtgagcttaaaatacaagactgccatattaaattttttgttgacattagtctcagtgaagactatgaaaatgctggctatagatgtcttttcccatttatctaaatatggactgctcaggaaacgagactttccattacaagtatttttaattaattgggccagcttttcaaacaaagatgccacattcaaaatagggtatattttcctatattacggtttgcccctttataaatccaagtagataggaagaaagaagacaaactttgcatctcagtatgaattattcaatttatttgaatgatttttctttacaaaacaaactcattcattagtcatgtttatctgcttaggagtttagggaacaatttggcaattttgtggttttcgagattatcgttttcttaaagtgccagtattttaaaatagcgttcttgtaattttacacgcttttgtgatggagtgctgttttgttatataatttagacttggattctttccatttgcatttgtttatgtaatttcaggaggaatactgaacatctgagtcctggatgatactaataaactaataattgcagaggttttaaatactagttaaatggctttcacttaagaacttaagattttgttacatatttttaaatcttgtttctaataatacctcttagcagtaccttttaaataagtataagggatggcaaagtttttccctttaaaaatactcactttatgcttataaataggttaatgggctgataaaaggttttgtcaaacattgcaagtattcggtgctatatataaaggaggaaaaactagttttactttcagaatgatttaaacaagatttttaaaaacaagatacatgcaagcgaacagcagggttagtgataggctgcaattgtgtcgaacatcagattttttgttaagaggagcaaatgactcaatctgatttagatggaagtttctactgtatagaaatcaccattaatcaccaacattaataattctgatccatttaaaatgaattctggctcaaggagaatttgtaactttagtaggtacgtcatgacaactaccatttttttaagatgttgagaatgggaacagtttttttagggtttattcttgaccacagatcttaagaaaatggacaaaacccctcttcaatctgaagattagtatggtttggtgttctaacagtatcccctagaagttggatgtctaaaactcaagtaaatggaagtgggaggcaatttagataagtgtaaagccttgtaactgaagatgattttttttagaaagtgtatagaaactattttaatgccaagatagttacagtgctgtggggtttaaagactttgttgacatcaagaaaagactaaatctataattaattgggccaacttttaaaatgaagatgctttttaaaactaatgaactaagatgtataaatcttagtttttttgtattttaaagataggcatatggcatattgattaacgagtcaaatttcctaactttgctgtgcaaaggttgagagctattgctgattagttaccacagttctgatgatcgtcccatcacagtgttgttaatgtttgctgtatttattaattttcttaaagtgaaatctgaaaaatgaaatttgtgtgtcctgtgtacccgaggggtaatgattaaatgataaagataagaaaa

SEQ ID NO: 390 - DNA, 1527 bp, Homo sapiens
ggggatgtggcccgtggcctagctcgtcaagttgccgtggcgcggagaactctgcaaaacaagaggctgaggattgcgttagagataaaccagttcacgccggagccccgtgagggaagcgtctccgttgggtccggccgctctgcgggactctgaggaaaagctcgcaccaggtggacgcggatctgtcaacatgggtaaaggagaccccaacaagccgcggggcaaaatgtcctcgtacgccttcttcgtgcagacctgccgggaagagcacaagaagaaacacccggactcttccgtcaatttcgcggaattctccaagaagtgttcggagagatggaagaccatgtctgcaaaggagaagtcgaagtttgaagatatggcaaaaagtgacaaagctcgctatgacagggagatgaaaaattacgttcctcccaaaggtgataagaaggggaagaaaaaggaccccaatgctcctaaaaggccaccatctgccttcttcctgttttgctctgaacatcgcccaaagatcaaaagtgaacaccctggcctatccattggggatactgcaaagaaattgggtgaaatgtggtctgagcagtcagccaaagataaacaaccatatgaacagaaagcagctaagctaaaggagaaatatgaaaaggatattgctgcatatcgtgccaagggcaaaagtgaagcaggaaagaagggccctggcaggccaacaggctcaaagaagaagaacgaaccagaagatgaggaggaggaggaggaagaagaagatgaagatgaggaggaagaggatgaagatgaagaataaatggctatcctttaatgatgcgtgtggaatgtgtgtgtgtgctcaggcaattattttgctaagaatgtgaattcaagtgcagctcaatactagcttcagtataaaaactgtacagatttttgtatagctgataagattctctgtagagaaaatacttttaaaaaatgcaggttgtagctttttgatgggctactcatacagttagattttacagcttctgatgttgaatgttcctaaatatttaatggtttttttaatttcttgtgtatggtagcacagcaaacttgtaggaattagtatcaatagtaaattttgggttttttaggatgttgcatttcgtttttttaaaaaaaattttgtaataaaattatgtatattatttctattgtctttgtcttaatatgctaagttaattttcactttaaaaaagccatttgaagaccagagctatgttgatttttttcggtatttctgcctagtagttcttagacacagttgacctagtaaaatgtttgagaattaaaaccaaacatgctcatatttgcaaaatgttctttaaaagttacatgttgaactcagtgaactttataagaatttatgcagttttacagaacgttaagttttgtacttgacgtttctgtttattagctaaattgttcctcaggtgtgtgtatatatatatacatatatatatatatatatat

SEQ ID NO: 391 - DNA, 3556 bp, Homo sapiens
ggctctcgtggaggcagctagcgcgaggctggggagcgctgagccgcgcgtcgtgccctgcgctgcccagactagcgaacaatacagtcaggatggctaaaggtgaccccaagaaaccaaagggcaagatgtccgcttatgccttctttgtgcagacatgcagagaagaacataagaagaaaaacccagaggtccctgtcaattttgcggaattttccaagaagtgctctgagaggtggaagacgatgtccgggaaagagaaatctaaatttgatgaaatggcaaaggcagataaagtgcgctatgatcgggaaatgaaggattatggaccagctaagggaggcaagaagaagaaggatcctaatgctcccaaaaggccaccgtctggattcttcctgttctgttcagaattccgccccaagatcaaatccacaaaccccggcatctctattggagacgtggcaaaaaagctgggtgagatgtggaataatttaaatgacagtgaaaagcagccttacatcactaaggcggcaaagctgaaggagaagtatgagaaggatgttgctgactataagtcgaaaggaaagtttgatggtgcaaagggtcctgctaaagttgcccggaaaaaggtggaagaggaagatgaagaagaggaggaggaagaagaggaggaggaggaggaggaggatgaataaagaaactgtttatctgtctccttgtgaatacttagagtaggggagcgccgtaattgacacatctcttatttgagaagtgtctgttgccctcattaggtttaattacaaaatttgatcacgatcatattgtagtctctcaaagtgctctagaaattgtcagtggtttacatgaagtggccatgggtgtctggagcaccctgaaactgtatcaaagttgtacatatttccaaacatttttaaaatgaaaaggcactctcgtgttctcctcactctgtgcactttgctgttggtgtgacaaggcatttaaagatgtttctggcattttctttttatttgtaaggtggtggtaactatggttattggctagaaatcctgagttttcaactgtatatatctatagtttgtaaaaagaacaaaacaaccgagacaaacccttgatgctccttgctcggcgttgaggctgtggggaagatgccttttgggagaggctgtagctcagggcgtgcactgtgaggctggacctgttgactctgcagggggcatccatttagcttcaggttgtcttgtttctgtatatagtgacatagcattctgctgccatcttagctgtggacaaaggggggtcagctggcatgagaatattttttttttttaagtgcggtagtttttaaactgtttgtttttaaacaaactatagaactcttcattgtcagcaaagcaaagagtcactgcatcaatgaaagttcaagaacctcctgtacttaaacacgattcgcaacgttctgttattttttttgtatgtttagaatgctgaaatgtttttgaagttaaataaacagtattacatttttaaaactcttctctattataacagtcaatttctgactcacagcagtgaacaaacccccactccattgtatttggagactggcctccctataaatgtggtagcttcttttattactcagtggccagctcacttagggctgagatgaaggagagggctacttgaagctactgtgtgattttgtttgtgtctgagtggcattcagatgaagtctggaggagttaggagaacgacataggcaaggttcagcagccttccaaggtataggaaggtgggtgattaggactgaggctatctaggtttaacttttgtcccacctccaccccctattttgtggggccaaatgcattgctaaacagcaatttcagagtgtatggtgtgtcaaaaattaaggccttattgtttttctctttcacccctaccccccgtgctcctggcacatatcacattatttgtggtgcccaacatttggggtcttgagcctgctgctggtctcctggatgccagtgagggtatgtgggatggggtggtggggtaggggacggtatcctttttttgctcctacttggaaacaccaaacaccccaaggaagatgataggctccatcttgggccacctgagctatagggcaggctaatggaatcaaccatttctgagcactaaatgtatcatgaaaagttgaatggcctgctcataagtttagctcattcactggaaatgtagattgatgttcaatgttaaactggaaggagcttggtttgtgtgtcagtggttatattagtgggtagtgtaacattttatccaggttggggtgaggggagatggccacagtagcaagtggtgacactaaataccattttgaaggctgatgtgtatatacatcattactgtccgtagcaatgaaggatacagtactgtgttgtgggtgagtgttgctattgcccagcattaatatttgggtgtgtatgtttgaggctatgaaacacgcaggagtgtttttgtgctattaattttaagagaaagcagctttttcttaaaattcactgttgagaaacttgcatgtctggaggcggtgtcctctccgccctgtcgggtcctggatgagtacgagttatggtcacggtcacagcctgatctcttatgtgttcatagccattcgctctcccatcagaactgtttgtcctgaatgtgttcctctagttctagaaaatgaccactaatttaaaaaactcggttgtgaggtttgcccagaggcacttgttccagaatttcccctcctgcttcagccatgtccttgtcacttggcattctaagctaaagctttagcttcccaattcgtgatgtgctaggccaagattcgggagctgttgccagcctcgtcaaatatggaagagaaacaacctgcggtcaaaagggagtgatttgttaagtggtgcgcgtctatctcataactagatgtaccaaccagggaagggccaaggatggaaaggggtaacttttgtgcttccaaagtagctaagcagaagtgggggagcagtttagccagatgatctttgattaggcaaacattgagttttaaagaggctgtcaagttgaggccacttggtccattagctggggcagcaagatcactactcaacgttttcacactgtggcaagattgctcttctagtggaataatgccctagtttctctgagatgatgtaagtggcatgatgttacctaaggcttaggcttagcttgatttctgggcccactgtctgtgttcttaagatgccaacctgttgctttttttttttttttcccccatttaaaaggatagtacctactccctctaaccacctcaccccattcttgaatgacattttatccttcggaaagaacaaggctgtgatgtagtgactattgtctgtgtctcctgtgtgtgtctgttcttgtcacaaatgtatttggggacgttggatgcattcattttctgtaataaagtttcttaatcactcttcccaaaaagtaa

SEQ ID NO: 392 - DNA, 1989 bp, Homo sapiens
agctgggccaatgaacggcggcgggaggtgaaatccggttctaaccggtccggggctcccagcgctataaaaactttataaaccccccggagcccgagcagtgtgaagaagaggcgagaacgacccccggaccgaccaaagcccgcgcgccgctgcatcccgcgtccagcacctacgtcccgctgccgtcgccgccgccaccatgcccaagagaaaggctgaaggggatgctaagggagataaagcaaaggtgaaggacgaaccacagagaagatccgcgaggttgtctgctaaacctgctcctccaaagccagagcccaagcctaaaaaggcccctgcaaagaagggagagaaggtacccaaagggaaaaagggaaaagctgatgctggcaaggaggggaataaccctgcagaaaatggagatgccaaaacagaccaggcacagaaagctgaaggtgctggagatgccaagtgaagtgtgtgcatttttgataactgtgtacttctggtgactgtacagtttgaaatactattttttatcaagttttataaaaatgcagaattttgttttactttttttttttttttaaaagctatgttgttagcacacagaacacttcattgttgtttttgggggaaggggcatatgtcactaatagaatgtctccaaagctggattgatgtggagaaaacacctttcccttctagttttgagagacttcctcttggctcccaggaggagggattccctgactttgacacacatggccaccttggcacaaaagccttgtggtatagaaaaacaaatttgtttttatgtcctcttctccctttccatcgttcagcatagacttaactcccttaagcccagacatctgttgagacctgacccctagtcattggttaccagtgtgtcaggcaatctggactttccagtgatgccactgagatggcacctgtcaaaagagcagtggttccatttctagattgtggatcttcagataaattctgccattttcatttcacttcctgaaagtcagggtcggcttgtgaaaagttgttaaacaacatgctaaatgtgaaatgtcaaccctcactctaaactttccctgttcagagcatcagatgaagacttcattgggttttatagtggctttctgatttttggtagtccattgaagaagggagtttgaaagttgttgtatactgttaacgattgtctgcccatgtcctgcctgaaataccatgattgtttatggaaagtatctttaataaagctggatacagtttggcttggaatgctgcctctgatcttttcccacaagtggggtaacctggtttatccaagtctcttggaacagggtacgttctgctttgaggtactccatgtacagtctaatgatgatctttcactgatttatagtcagcttccaaaacacacagtgctaggtgcagttaggaaggattccaggagtagacttagctgatggtgaaaggctgggagtatggagtgatttctgtacttggttatgcagcattccctgcagtgtttgttttttgcatgactccgaatacatgaagtgtattaaatgcagatttttggtagatctgcggttttggctgggtagctgacaggagcctctctacttccatctgcatttgcaacttctataaaattagcaaattaatagactcatgtcagagagtgtctctgtgaatgtgtacacagttgtccatttgtaaggtagatgacactttgctcctaagtagacctgcaaacaaagacaatggggtctttcctgattcctttagtttggagatgcagagaaccccacgtttctctaagtgaaatggcaagaagttatttgttagaatatggaactggtaacaaattcatgtttgcaccttgaatttgctttcacagacctggctgtattgttggacaggaataaagtaaattggagactaaaaaaaaaaaaaaaaaaaaaa

SEQ ID NO: 393 - DNA, 1896 bp, Homo sapiens
ccgatcagctgtcggcgcgcactcgctcccggcccggcccagcccagcccggcgcggaggccgccgcctgccctgcggggcccgacgccagcggtccgggtagcagctccagggccggcccgcgcgtgcgcccgggagccgcgcgccaccatccccagcggggaccgaggagcccggccgagcccgagaagcccgcggccgcgatgcctgacgagctgacggagcccgggcgcgccacgccggcccgcgcctcctccttcctcatcgagaacctgctggcggccgaggccaagggcgcagggcgcgcgacccagggcgacggcagccgggaggacgaggaggaggacgacgacgaccccgaagacgaggacgccgagcaggcgcggcggcgacggctacagcggcggcgacagttgctcgcgggcaccgggcccggcggggaggcgcgggcccgtgcgctgctcgggccgggcgcgctgggcctcggtcctcggccgccccccggtcccgggccgcccttcgctctgggctgcggaggcgcagcgcgctggtacccacgggcgcacggtggctatggaggcggcctcagtcctgacaccagcgaccgggactcaccggagacgggcgaggagatgggccgtgcggagggcgcctggccgcgaggccccgggccgggagcggtgcagcgggaggcagcggagctggcggcgcgtggcccggcggccggcacggaggaggcgtcggagctggccgaggtccctgcggcggctggggagacacgcggcggcgttggcgtgggcggcggccgaaagaagaagacgcgcacagtcttctcccgcagccaggtcttccagctggaatccaccttcgacctgaagcgctacctgagcagcgccgagcgcgccggcctggccgcctccctgcagctcaccgagacgcaggttaagatctggttccagaaccgccgcaacaagtggaagcggcagctggcagccgagctggaggcggccagcctgtccccgccgggagcgcagcgcctggtccgcgtgccggtgctctaccacgaaagccccccggccgcagccgccgctgggcccccggccaccctgcccttcccgctggcgcccgccgcgcccgcgccgcccccaccgctgctcggcttctccggggccctcgcctacccgctggccgccttcccggccgccgcctccgtgccctttctgcgggcgcagatgcctggcctggtgtgagccccgcctgccgggccctctccccacgaccctgtggacctgtgtggacgcgcgattcagcggcaggcgcagggctcagggggcgttagggaagggatggtcgctcctgcggcctcctagatacctcgggagcgcaggccgcggccgggcgggcctcagcttctgtggggagcgcctctagaatgtaatgggacgccccacccatttgccaggctggatccccactcgaacagggggccatgcagagactctgggctgcgcagcccccggcgccacggccaccccccggcctcagcgaggagcggtcggccatggccacccggggcagctgccctcaggccaagcccagcgcaacaaaggaaaactacgaaccggctgtccaaggctgagcggtgactgtccccacagactgcccccaacactaaacgtccctttcctgggacccagacagcaggccggcccggagggctgtgctacccctctcgcgggtgctggtggagaaaggaccctggacctgtgggtcccatcgtccgttccaggagcaggcaggctggggctctctgcagacgtcgcagcctccgggttgttgtttttttaaatgaatctacttatttgcgtatggaataaaaagggacattttctggac

SEQ ID NO: 394 - DNA, 1628 bp, Homo sapiens
cgggcgaggaaggggcatttgcaccggggctgggcgggcgcacccagagccaggcgggcaggaacccctgcgcagccatccggtgcctgcatgtccctggcgcggaagggacgcctcaccagcctcggcgccccctccccctagatttcctccccgcccctccccactgcctgcctgctgcaccaccttccacccagatcacccagatcgtctctaaagggagttcttggtttccttcgatttcttatgaacccaggatgggcagcaaagaagatgcgggcaaggggtgtccggcggccggtggcgtctccagcttcaccatccagtccatcctgggcgggggcccctcggaggcaccgcgggagcccgtcggctggccagccaggaagcgcagcctgtccgtgtcctcggaggaggaggagccggacgacggctggaaggcgcccgcctgcttctgcccagaccagcacggccctaaggagcagggccccaagcaccatccccccatcccttttccttgcctgggtacccccaagggcagcggaggctcgggcccgggcggcttggagcgcacgcctttcctctctccttcgcactcggactttaaagaagagaaagagaggctcctgcccgcgggctcgccctcgccggggtccgagcggccgcgggacggcggcgctgagcggcaggccggcgcggccaagaagaagacgcgcaccgtcttttcgcgcagccaggtgtaccagctcgagtccaccttcgacatgaagcgctacctgagcagctcggagcgcgcctgcctcgcctccagcctgcagctcacggagacccaggtaaagacttggttccagaaccgccgcaacaagtggaagcggcagctctcggctgagctggaggcggccaacatggcgcacgcgtcggcgcagactctggtgagcatgccgctggtgttccgggacagttcgctgctgcgcgtgccggtgccgcgctcgctcgcctttcccgcgccgctctactacccgggaagcaacctctcggccttacctctctacaacctatacaacaagctcgactactgaccggcccgccgccccgcgccgcccccagctgcccgcagagccgggcgcgtactgtactgtaagcagggctccggagcaaggcggcgtgtttccagaaatatgaagaaatacaccatgtgtattcattagctcttatttatggtctctgccctactttttgttttgattgtttcgggtatttattggcattccctaagtcagagagcctgcttcctacctagaccgaaccagtacgctttgaaaaccattcggagtgagatgttctcgggtggtggtgggaaagggagttttggccagacaggctgtggttggtagggaaaaaaatcaggaaaacacctacaaaaccaggtacactcctcccccatatatacacctgtatatatgtacatgcatacacgctcggccaagccaggccctcagaggctttggacaattactaaattgcttcttttcgtttccctcatcccgaggatggtagggacgaaaaggggagagttcagatctgtaaatatttttaaaaagaaaaaaaaataaaacattttaaacatc

SEQ ID NO: 395 - DNA, 1335 bp, Homo sapiens
atgagtcttaaatgtctgcctcatgggcttctcgtgcgaaccggggagctgtttttaaagccagtggagtggaatgtcctttcactaagccgttctgcaaaggtccagtgtggttctctaaggacttcgctgccgtcgagacgcgcagcggatgccgctgcttgccgcggcggaggaagctacgccgctgcgccttcggttcaccttgcccccattaaagcgttagttagacagctccaaacgccagctggccggagagacttcctgggagaaagtgctgtcgtcggggtcacagactcggagttgatccgcgagccttgggcaccggcggccagagcagaggggtgcccttccgagagcagccgtcggtgccgagaagctgttgccccagcagccccaccgagtgacgcgcgggttttggccgggtcagcgcgcatacgcacacaggcacacccactcctggtcccgggggaaggctcactcttcggttttccagggctaaaggccaaggccacgcggatttctgagtccgaagacgcagtgcgaggacttacacctggattcccttactatcggctggatgttgagttccgtttatggtctgatttccggcctctcgcctgctcgccccgccgcccgcctgtgggcgacctggctttccctcgctttgagatcccggcgcagaggtttgccctgcccgcgcactacctggagcgctccccagcctggtggtacccctacaccctgacccccgccggcggccacctcccgcgacctgaagcctcggagaaggccttgctgagagactcctcccccgcctccggcacagaccgcgactctccggagccactgctcaaggccgaccccgatcacaaggagctggactccaagagcccggacgagatcattctggaggagagcgactccgaggaaagcaaaaaggaaggcgaagcggcgccaggcgcggccggggcgagcgtaggggcggcggcggccactccgggcgcagaagactggaagaagggcgctgaaagtccagagaagaagccggcgtgccgcaagaagaagacgcgcacagtcttctcgcgcagccaggtcttccagctcgagtccaccttcgacatgaagcgctatctgagcagctcggagcgagccggcctggccgcgtccctgcacctcaccgagacgcaggtcaagatctggttccagaaccgccgcaacaagtggaagcggcagctggcggcggagctggaggcggccaacctgagccatgccgcggcgcagcgcatcgtgcggtgcgttgctaggctcctcaaattcaatcgacacaattga

SEQ ID NO: 396 - DNA, 3239 bp, Homo sapiens
gggaggaggcagtgggagggcggagggcgggggccttcggggtgggcgcccagggtagggcaggtggccgcggcgtggaggcagggagaatgcgactctccaaaaccctcgtcgacatggacatggccgactacagtgctgcactggacccagcctacaccaccctggaatttgagaatgtgcaggtgttgacgatgggcaatgacacgtccccatcagaaggcaccaacctcaacgcgcccaacagcctgggtgtcagcgccctgtgtgccatctgcggggaccgggccacgggcaaacactacggtgcctcgagctgtgacggctgcaagggcttcttccggaggagcgtgcggaagaaccacatgtactcctgcagatttagccggcagtgcgtggtggacaaagacaagaggaaccagtgccgctactgcaggctcaagaaatgcttccgggctggcatgaagaaggaagccgtccagaatgagcgggaccggatcagcactcgaaggtcaagctatgaggacagcagcctgccctccatcaatgcgctcctgcaggcggaggtcctgtcccgacagatcacctcccccgtctccgggatcaacggcgacattcgggcgaagaagattgccagcatcgcagatgtgtgtgagtccatgaaggagcagctgctggttctcgttgagtgggccaagtacatcccagctttctgcgagctccccctggacgaccaggtggccctgctcagagcccatgctggcgagcacctgctgctcggagccaccaagagatccatggtgttcaaggacgtgctgctcctaggcaatgactacattgtccctcggcactgcccggagctggcggagatgagccgggtgtccatacgcatccttgacgagctggtgctgcccttccaggagctgcagatcgatgacaatgagtatgcctacctcaaagccatcatcttctttgacccagatgccaaggggctgagcgatccagggaagatcaagcggctgcgttcccaggtgcaggtgagcttggaggactacatcaacgaccgccagtatgactcgcgtggccgctttggagagctgctgctgctgctgcccaccttgcagagcatcacctggcagatgatcgagcagatccagttcatcaagctcttcggcatggccaagattgacaacctgttgcaggagatgctgctgggagggtcccccagcgatgcaccccatgcccaccaccccctgcaccctcacctgatgcaggaacatatgggaaccaacgtcatcgttgccaacacaatgcccactcacctcagcaacggacagatgtgtgagtggccccgacccaggggacaggcagccacccctgagaccccacagccctcaccgccaggtggctcagggtctgagccctataagctcctgccgggagccgtcgccacaatcgtcaagcccctctctgccatcccccagccgaccatcaccaagcaggaagttatctagcaagccgctggggcttgggggctccactggctccccccagccccctaagagagcacctggtgatcacgtggtcacggcaaaggaagacgtgatgccaggaccagtcccagagcaggaatgggaaggatgaagggcccgagaacatggcctaagggccacatcccactgccacccttgacgccctgctctggataacaagactttgacttggggagacctctactgccttggacaacttttctcatgttgaagccactgccttcaccttcaccttcatccatgtccaacccccgacttcatcccaaaggacagccgcctggagatgacttgaggccttacttaaacccagctcccttcttccctagcctggtgcttctcctctcctagcccctgtcatggtgtccagacagagccctgtgaggctgggtccaattgtggcacttggggcaccttgctcctccttctgctgctgcccccacctctgctgcctccctctgctgtcaccttgctcagccatcccgtcttctccaacaccacctctccagaggccaaggaggccttggaaacgattcccccagtcattctgggaacatgttgtaagcactgactgggaccaggcaccaggcagggtctagaaggctgtggtgagggaagacgcctttctcctccaacccaacctcatcctccttcttcagggacttgggtgggtacttgggtgaggatccctgaaggccttcaacccgagaaaacaaacccaggttggcgactgcaacaggaacttggagtggagaggaaaagcatcagaaagaggcagaccatccaccaggcctttgagaaagggtagaattctggctggtagagcaggtgagatgggacattccaaagaacagcctgagccaaggcctagtggtagtaagaatctagcaagaattgaggaagaatggtgtgggagagggatgatgaagagagagagggcctgctggagagcatagggtctggaacaccaggctgaggtcctgatcagcttcaaggagtatgcagggagctgggcttccagaaaatgaacacagcagttctgcagaggacgggaggctggaagctgggaggtcaggtggggtggatgatataatgcgggtgagagtaatgaggcttggggctggagaggacaagatgggtaaaccctcacatcagagtgacatccaggaggaataagctcccagggcctgtctcaagctcttccttactcccaggcactgtcttaaggcatctgacatgcatcatctcatttaatcctcccttcctccctattaacctagagattgtttttgttttttattctcctcctccctccccgccctcacccgccccactccctcctaacctagagattgttacagaagctgaaattgcgttctaagaggtgaagtgattttttttctgaaactcacacaactaggaagtggctgagtcaggacttgaacccaggtctccctggatcagaacaggagctcttaactacagtggctgaatagcttctccaaaggctccctgtgttctcaccgtgatcaagttgaggggcttccggctcccttctacagcctcagaaaccagactcgttcttctgggaaccctgcccactcccaggaccaagattggcctgaggctgcactaaaattcacttagggtcgagcatcctgtttgctgataaatattaaggagaattca

SEQ ID NO: 397 - DNA, 4101 bp, Homo sapiens
gagggtatcagaaccaatactggacatggacatggcaaattacagtgaagttttggacccaacttacacaactttggagtttgaaactatgcagattctatataattcaagtgatagttctgccccagagacaagtatgaataccacagacaacggtgtcaactgtctgtgtgctatctgtggggacagagcaacaggaaaacactatggggcatccagctgtgatgggtgcaagggtttcttcagacgcagcattcgtaagagtcacgtttattcttgcaggttcagtcggcaatgtgttgttgacaaggacaaaaggaatcaatgtagatattgtcgattaagaaagtgttttagagcgggaatgaaaaaagaagctgtacaaaatgaacgtgacagaataagcaccagaagaagcacatttgatggcagcaacatcccctccattaacacactggcacaagctgaagttcggtctcgccagatctcagtctcaagccctgggtcaagcactgacataaacgttaagaaaattgcaagtattggtgatgtctgtgaatctatgaaacagcagctcttagtcttggtggaatgggctaaatatattcctgccttctgtgaattaccattggatgatcaggtggcactgttgagagctcacgcaggggagcacttactgcttggagctacaaagagatccatgatgtataaagatattttgcttttgggaaacaactatgttattcaccgcaacagctgtgaagttgagattagccgtgtggccaatcgtgttctagatgagctggttagaccatttcaagaaatccagattgatgacaatgagtatgcttgtttaaaggcaattgtattttttgatccagatgcaaaagggctaagcgatccagtaaaaattaagaacatgaggttccaagtgcagatcggtttggaggactacatcaatgatcggcagtatgactcccgggggaggtttggagagttgcttctgctcctgcccacactgcagagcatcacgtggcaaatgattgagcaaatacagtttgttaaactttttgggatggttaaaattgacaatctacttcaggaaatgctattaggtggggcttccaatgatggcagtcatctccatcatccaatgcatccacatttgtctcaagacccattaactggacaaactatacttttaggtcccatgtcaacactggttcatgcagaccagatctcaactcctgaaaccccactcccttccccaccacaaggctctgggcaagaacagtacaaaatagctgcaaaccaagcatcagtcatttcacaccagcatctctccaaacaaaagcaattgtgaaaatgtgtttacttcagaacggcactacataaatgtgaaaagttgttgatcttgaaatatctcaggatagcacttttggcaaactcttagccaaggcttcttcattggtgctgttataagatggtgtcctattttcttgtttatacgttcattctgtttgttattgctactatgtaaaactttcacatgcaaccaatgtatatctgagtttgaagatgtttatatagggtattttttccaactgcccctgcattgtgcctgaaccaattgaatcttatgtatgagtttcatttgttttattaatgttaatttaaatctgtaaataattgctttattgtgatgtgatacagaacaaagtgttcgtttttgactgaaaatagtagatcagaaatctcagtttaatataaaatgagctaagtttttaaaaataaattataaacttggagattagaaaaataaagcagttgctgtagaataggctgtatctttttcaagaagaatctcttatggacagtctgtggtaaagaagcaactctttgctttagagttaaatattcctatcttaagtttagaaaaatacaaaaaaccattccaaggatgactggatactttttgaaatctgactttctttgaagatgtatgttaagcaaaaacatgttgcttttatcagttaggatacagggtgaactgtaacaaagaaacccctaaaacagtgactaaatcaagagaggaatctatttctttctcctgaaacaatttagaaaatagttatccattgactagaaattagtacatgcccacagctggctcccacggtagccaggagaattatctataggtggaaagtctgtgtcagccaaagccatgtcactctgagagaactgattctgaggacaagttagccatctaccacccatgtcccttatttggtcctcacaataacactttaggagagatatcattatcgctgttttataaataagggaaactttagcttgagggtttaaggaacataaccaaagttcacaaacataacgagtgagagaaacacattcaagcccaggtctagttgactttaatgaatctttggtgtggaatgaaaaatgtgaacttcttactcatagtgtggtttttaaatatatgcagttgagtgatgattggatactattcatcatattgcctataatatatatttaccgataagcagtgagtgtaaaattgttgtagcttgaataagaaaccacttttgtagttttaaccagactttctcttaaaaacattagataaaataaaagattcaccggatggattctgatgaaaacgaaaacaaagtaaaatgactggcttagcagattctttgaaatgtagcagcccagggatgtaccaaatgtcgaattctagactgaggagtagagttcattggagtcttaaactctctgatatcacttaaagctggagtttattttaaaacaaatgaagcatgggccacctcatgatgcagtggctcctctctggttgaggagagggaaaattggaaaaactggtcgagtaattatcaataattttttttaaaaagaggatcccaaactgtaaaagattgaaataatctttctcaggattttttaaatgtctaagattatgatgtcatatctcccacttaccttataagtaaaaaggttaatatcaagtaacttattagctcttaaagtaaaattgaacttattaaaagctatctatgatttaatagatttaataaaattccttcacgacctggtacccttgtgaaactgtaaaatatatcatatggggggagttttttaactcttattttttgaaaatttactgtagcttctatttcgtgaataagaatgttttgattttgatcatacaaataacttttgtagatttttgtttacttttgggggggttcccttagaagacattaaaaaaaaatactgccttggtctgtgcaggctgctgtaatgaaatactatgaacttggcagcttataaacaacagaaatttatttctcgctgttctcaatggtgggaagtccaagattaagggatcaacaaattaggcctctggatcatacatggcattttctagctgtgtccttatacataaaaggaaaaaggtagctctctcgagtctctttaataaagatactaattctcatgactgaatcaccctccaaaggccccacctcctaataccatcactctggggactaggtgtcagcatgtgaattttggaaaacacaaaaattcagaacatagcaaatacctttgaagtataaaagataaaattcatttttagtgaaccctgtaatttattcgtgtatatttactaaacagctgtatctttgaaattgttagtaatgattctgcttcaataactatggtcagggaatttataatattatatttttatatactgaactgccatagatgctggaaaaaaggaactgatgttttcagcatattttcaaaatattgataagggaagttattacttttatatagtattcaacttttttcaggtaatagaagtgaataatttattgtgaaataattcattttataaatgtataattatttttataaattttattgttggaaatcaaaaattagtagattttttaccatgttaaattatagtgagattaaagtattactaaactgtgatgctatgtttgtttcactaaactttctaaataaaaactgagaaaaaaaaaa

SEQ ID NO: 398 - DNA, 1552 bp, Homo sapiens
gcaccagatctacgctttgaaatgaggcaacatctaactggaaactcgctcaaagtaaggaagtggatgagaagactcagggtcccttttctcttccccgtcttctctcagccacatctctcttatcctatcttggtgaagaagcttgcttggctaggagagaggtcagggacgagaagatagtgacgagaaagttccatgagactctcagaagtcccagcctgaacatcaaacctgaataaccaggagagacgtaacctcggcatactttcagtggtttacctcctgcccacgctgcaggtttttcaggtccttgctcgagtgtgtgctcataggcgtaaataaacgtgctatcagcagcctgcgtcagccagcccagctatttaagcaggctggcatcagcaaacacagcttccaaacccagggcttgcgcttgcctttgcctcttccacactaatgacagactgccccactgagaagggtctagcggagcacaggtcaccagctgggcaacattcagaaagttagtcttcctatgctcattttcctgggctgttacagaagaagactggaagagcgcgcagggaccatgtcggcggagaccgcgagcggccccacagaggaccaggtggaaatcctggagtacaacttcaacaaggtcgacaagcacccggattccaccacgctgtgcctcatcgcggccgaggcaggcctttccgaggaggagacccagaaatggtttaagcagcgcctggcaaagtggcggcgctcagaaggcctgccctcagagtgcagatccgtcacagactaaggagatggcaggcattgacagcttcactccatgaaggccatctctgtttctctcctccgcttaaccaagctgttgtggtttttcagcatagtgttgtatgttccattgctagctgtcctgctgtttaacacagtgttgtattttttttctaaatgtacataattagaaaagaaaataacaataggaagctatgtgtatcttctgtgtaaagcagtggcttcactggaaaaatggtgtggctagcatttccctttgagtcatgatgacagatggtgtgaaaaccatctaagtttgcttttgaccatcacctcccagtagcaatttgctttcataatccatttagcaatccaggcctctgttgaaaagataatatgagggagaagggaacacatttccttctgaacttacttccctaagtcactttccttatgtatcatctaatacaatgatggttgagtgaaaatacagaaggggtgtttgagtattcagatttcataaaacacttccttggaatatagctgcattaacttggaaagaagcctgttgggccagaagacagaaactccaactggcaaaaaagcaagcatctaagaaaaaaaaccaccaaagttcttgaatttactatatttaaatgcattggttaagtttattttgctaaataaagtgaactgctttttgtctctaaaatgatattctaaataaaaccttaactttttgttgaagatgcactgaaaaaaaaaa

SEQ ID NO: 399 - DNA, 2561 bp, Homo sapiens
attcatatcatttttcttctccggccccatggaggaagtgagaaagttggcacagtcacgccgggcttcgcaggaccaggtcactcagtgacagatggacaatgcaagaatgaactccttcctggaataccccatacttagcagtggcgactcggggacctgctcagcccgagcctacccctcggaccataggattacaactttccagtcgtgcgcggtcagcgccaacagttgcggcggcgacgaccgcttcctagtgggcaggggggtgcagatcggttcgccccaccaccaccaccaccaccaccatcaccacccccagccggctacctaccagacttccgggaacctgggggtgtcctactcccactcaagttgtggtccaagctatggctcacagaacttcagtgcgccttacagcccctacgcgttaaatcaggaagcagacgtaagtggtgggtacccccagtgcgctcccgctgtttactctggaaatctctcatctcccatggtccagcatcaccaccaccaccagggttatgctgggggcgcggtgggctcgcctcaatacattcaccactcatatggacaggagcaccagagcctggccctggctacgtataataactccttgtcccctctccacgccagccaccaagaagcctgtcgctcccccgcatcggagacatcttctccagcgcagacttttgactggatgaaagtcaaaagaaaccctcccaaaacagggaaagttggagagtacggctacctgggtcaacccaacgcggtgcgcaccaacttcactaccaagcagctcacggaactggagaaggagttccacttcaacaagtacctgacgcgcgcccgcagggtggagatcgctgcatccctgcagctcaacgagacccaagtgaagatctggttccagaaccgccgaatgaagcaaaagaaacgtgagaaggagggtctcttgcccatctctccggccaccccgccaggaaacgacgagaaggccgaggaatcctcagagaagtccagctcttcgccctgcgttccttccccggggtcttctacctcagacactctgactacctcccactgaggcggctccagccccagacaacagcccaggcatctccttgggctgggacttcttacccaaagcacatgcttagcttatctttctttccatttacagtctctttcttcctttctaatcctatctggggagctcctggccaggataatatatttgcagataattctggaccagagacttggtgcggggttaacaccttcatccagattgggtgccagcatacattttctggtgggccttaacatccctcctgcttttaggagaattcacagaacctactgttcctttcagatgaccttttggaaaatagttccctttgccaacagaaacatgccagaaggaatcttctcatcttttatctaactatatgtacagctctcccctcccttgtccttgaaagtaggatatagcgaaaggcgagtccaggagctcaggaagaagagatgcactatatgtttacacaattaattcatcccttaatttaagtcattttcatgtgtgtgagtttgctggttgtaaatactttgtcctaagagatttatctttatacagattttctagaaatgtttaggttactaaaacagggtgggcaaactctctaaactggtacaattttataggtgaaagaaaaaattccctcatttaaacccaatcagatgcctcagagggtagccttgatttgttcttacagttaagaagccctgcagagcacaaacttcagaaacccggcttcctgtgctaagtctttcccaatctctacccctttcttctcgggccaccctctgtttaaaatttgtgctgggttattcagaacctaaaagtattattcaaaccaatttcttccttccacagttatcttagctggatataatgtattttcagctcaattgttaatgtgatggatggcacaatgaatgtatattttgtgttattcgtgaatagtcttttgcatgtcgcacaatgtttgatgtccccaaagtaccacactgagttctatcagttatcctttgtgagcctatgatattccccatttcctgtacaatcatgaacagctctgagatcctggagtgatatgatccagagcagagtttacgggtcttaggatgtctgtaataaataaatatactcaagtttcaggtatgcttaagcatccgtgtatttggctgggctacaatttgttaattcctatgaagttggcacatttcatgaggggaaagggagaagggtggtaaatattttcaaagagatgggccttttcttgaataaaagttaataacagctcctttattataatcaaagctcataatggaaaaaaagactgatgaagaaatttatgaagcagatttatttttgaaacaaacatggatacttcctgggtcaagtgctaaccttttcacctccaactggatgttgacgtatatataaacagaactcccttcaaaagccaaaaaaaaaaaaaaaa

SEQ ID NO: 400 - DNA, 2648 bp, Homo sapiens
taatcgtattcagcatgttttgcacaagaaatgtcagccagaaagggctatctgctcccttcgccaaattatcccacaacaatgtcatgctcggagagccccgccgcgaactcttttttggtcgactcgctcatcagctcgggcagaggcgaggcaggcggcggtggtggtggcgcggggggcggcggcggtggcggttactacgcccacggcggggtctacctgccgcccgccgccgacctgccctacgggctgcagagctgcgggctcttccccacgctgggcggcaagcgcaatgaggcagcgtcgccgggcagcggtggcggtggcgggggtctaggtcccggggcgcacggctacgggccctcgcccatagacctgtggctagacgcgccccggtcttgccggatggagccgcctgacgggccgccgccgccgccccagcagcagccgccgcccccgccgcaaccaccccagccagcgccgcaggccacctcgtgctctttcgcgcagaacatcaaagaagagagctcctactgcctctacgactcggcggacaaatgccccaaagtctcggccaccgccgccgaactggctcccttcccgcggggcccgccgcccgacggctgcgccctgggcacctccagcggggtgccagtgcctggctacttccgcctttctcaggcctacggcaccgccaagggctatggcagcggcggcggcggcgcgcagcaactcggggctggcccgttccccgcgcagcccccggggcgcggtttcgatctcccgcccgcgctagcctccggctcggccgatgcggcccggaaggagcgagccctcgattcgccgccgccccccacgctggcttgcggcagcggcgggggctcgcagggcgacgaggaggcgcacgcgtcgtcctcggccgcggaggagctctccccggccccttccgagagcagcaaagcctcgccggagaaggattccctgggcaattccaaaggtgaaaacgcagccaactggctcacggcaaagagtggtcggaagaagcgctgcccctacacgaagcaccagacactggagctggagaaggagtttctgttcaatatgtaccttactcgagagcggcgcctagagattagccgcagcgtccacctcacggacagacaagtgaaaatctggtttcagaaccgcaggatgaaactgaagaaaatgaatcgagaaaaccggatccgggagctcacagccaactttaatttttcctgatgaatctccaggcgacgcggttttttcacttcccgagcgctggtcccctccctctgtcttcaggctctgcccaggaactcgcacctgtgctggagccctgttcctccctcccacactcgccatctcctgggccgttacatctgtgcagggctggtttgttctgactttttgtttctttgtgtttgcttggtgctggtttatttgttgttttctgggggaaaaagccatatcatgctaaaattctatagagatagatattgtcctaagtgtcaagtcctgactgggctgggtttgctgtcttggggtcccactgctcgaaatggcccctgtcttcggccgagctggtttcctgcccagcctggggcaaacctagccggaaggccgaggtcccattgttggcgctgaggtgtctggcctgaggtcaatggtgcaaaggagccgccaccgggcatgtctgcctggagtgctgtgctgtgtttaatcaggggatacaggcccctgggtttcttttttctttcttcctttcttccttggccaagagaagggcttacaggcatggacatgcaggttggcaaacgggcttgactttggctgatttaaaaagtgagaaagaaagtaaaaaaggttaatttttccttcctctgtaagatatcccagctttaaaaagaaaaaaaaagaattaccaagagaaggggacttctcttccagtttctgtaaggtcttacattgcctgactaaaatgtttcatttacctctaaatttccatatccttctggctgtagataaataatgtagttttgtttatgcatttggaattagtggatttttttgtcattaaaattgttaccactggtaacatgtgacaagcacaccacaattctccctatcttgtgaagttgtttttttaaatcgccttgaacaaaaagttttttttttgtttgtttttgctttctgaaattcacagaagcctaggaggactggggtaagcggaataaactagagaagggagacattgtttggatttcctttatactgtgaagttacatgcataaaagggtcaaacctgtagatgcagaaaaagaaaaaaactataaatacaaatctgtataaatgtctattattatgaagaattgccaatcttgttttaagcaaatgcattctatcgttattataaatgttagttctagctctatttacttctaatcttaaatcagaataaattaatattgtattgctgctgtgcgtggaaaaagacgatgtttatgttcttatagaataaaagctgtggaatgaagctttttaattttaaaaaaaaaaaaaaaaaaaaaaaaaaaaaaaaaaaaaaaaaaaaaaaaaaaaaaaaaaaaaaaaaaaaaaaaaaaaaa

SEQ ID NO: 401 - DNA, 2653 bp, Homo sapiens
cttcaaagaggcagctgcagtggagaatcatgttaagctcggctactgcggagagcccaaggtagcccaataatggattttgatgagcgtggtccctgctcctctaacatgtatttgccaagttgtacttactacgtctcgggtccagatttctccagcctcccttcttttctgccccagaccccgtcttcgcgcccaatgacatactcctactcctccaacctgccccaggtccaacccgtgcgcgaagtgaccttcagagagtacgccattgagcccgccactaaatggcacccccgcggcaatctggcccactgctactccgcggaggagctcgtgcacagagactgcctgcaggcgcccagcgcggccggcgtgcctggcgacgtgctggccaagagctcggccaacgtctaccaccaccccacccccgcagtctcgtccaatttctatagcaccgtgggcaggaacggcgtcctgccacaggctttcgaccagtttttcgagacagcctacggcaccccggaaaacctcgcctcctccgactaccccggggacaagagcgccgagaaggggcccccggcggccacggcgacctccgcggcggcggcggcggctgcaacgggcgcgccggcaacttcaagttcggacagcggcggcggcggcggctgccgggagacggcggcggcagcagaggagaaagagcggcggcggcgccccgagagcagcagcagccccgagtcgtcttccggccacactgaggacaaggccggcggctccagtggccaacgcacccgcaaaaagcgctgcccctataccaagtaccagatccgagagctggaacgggagttcttcttcagcgtctacattaacaaagagaagcgcctgcaactgtcccgcatgctcaacctcactgatcgtcaagtcaaaatctggtttcagaacaggagaatgaaggaaaaaaaaattaacagagaccgtttacagtactactcagcaaatccactcctctaagactccagcggctggaattgggtggggggcttcatacacatgagataatatgcagattttgcccttgacaaagtcaagccacatggtgacttttgaaaagaggtgtgcaagagagggatgcatggagatagccccacaggaggtggtctgggactctcttgattaagatctcagtggttaagattcctaataatcattggattctgagagctgtgcatcagctagaatgacaggtttgggacccctggtggttcactcttggagcctgcagagctgcgggctgggtgtggtctccactggggattgggcccctgccagaccccctggagactaaccccaccacaccctccctctactgggagcctacccacccccaggacccctgagtaaaaaagctgtgtgctctccaagcccagttcagcttggggacaggggcaggaggaaggggtaggattactaggtgcccagaatgaggctgctttccaaagccaatgtgaacagcggctggacttggaggtagctttgaggtggaagagggctgcaaatccttgtgggaaaagaaatctatgattccaggtggcatcagtgtctttccactcctcctagccacccaccacactgatccagccctgagttcctagccaccgcctcctacagcccacctggcttttctttctaccaaatgagggtcttggttccagcctgccactcaggcccaaagcctcgacacagagtggactgttccctgaggtgggagatgtggaaaagccaagaggctgcagccaggccactggcccctgagatctctgcaggaaatggctgtggagtgtggcagtttggcaaactctccaccacacgtaatgaaacttggatttgctcagtgtctggctgcagagcagtgggcctggccagcaggtccccagctttggctatgagggccttgagtcccccaaaacaccgggttccagcaccacactcagccctcattggctcttgaactgagcttggaagcttctggtgaccttccaagagcctgagagtgaggtggaattattttaaaagataaatattatattatatatatatatatttccctgaaggaaccaaagcgaattttaaaagatgcaatgtagaggggaaaagagatgatgaaaatatttaaaggccctatctgtttacagtgttccgtggttaaactcgctcactgctaagaatatttgaatgtatgcttcatacagggatggtgttcaaaaaacttgtaaataaaggaaccataatcaattttcttttctttctttctctttttcttttttcttttgccattagttgatttcctttagggtgttggagggggtggaaaaggtattgagaatggtctttttaatctcttgcaacatttggaaagagttagggaaatgctcagaggcagtcggcctggccggcctggggatctcatctgggaaagccaggcaccctcccattgaatctcctttgcctccctgtgttaagaaatgtctgttggctccatttgtactgggagtgttggcctgtcctcaattctggttcttacccaccgtgtgtgttgcagcacttatacaggcaactgggcacaaggaaaataaagacggtggaaatttga

SEQ ID NO: 402 - DNA, 2514 bp, Homo sapiens
actggggtcttctccatgcggctcgggctatgacagcctccgtgctcctccacccccgctggatcgagcccaccgtcatgtttctctacgacaacggcggcggcctggtggccgacgagctcaacaagaacatggaaggggcggcggcggctgcagcagcggctgcagcggcggcggctgccggggccgggggcgggggcttcccccacccggcggctgcggcggcagggggcaacttctcggtggcggcggcggccgcggctgcggcggcggccgcggccaaccagtgccgcaacctgatggcgcacccggcgcccttggcgccaggagccgcgtccgcctacagcagcgcccccggggaggcgcccccgtcggctgccgccgctgctgccgcggctgccgctgcagccgccgccgccgccgccgcgtcgtcctcgggaggtcccggcccggcgggcccggcgggcgcagaggccgccaagcaatgcagcccctgctcggcagcggcgcagagctcgtcggggcccgcggcgctgccctatggctacttcggcagcggctactacccgtgcgcccgcatgggcccgcaccccaacgccatcaagtcgtgcgcgcagcccgcctcggccgccgccgccgccgccttcgcggacaagtacatggataccgccggcccagctgccgaggagttcagctcccgcgctaaggagttcgccttctaccaccagggctacgcagccgggccttaccaccaccatcagcccatgcctggctacctggatatgccagtggtgccgggcctcgggggccccggcgagtcgcgccacgaacccttgggtcttcccatggaaagctaccagccctgggcgctgcccaacggctggaacggccaaatgtactgccccaaagagcaggcgcagcctccccacctctggaagtccactctgcccgacgtggtctcccatccctcggatgccagctcctataggagggggagaaagaagcgcgtgccttataccaaggtgcaattaaaagaacttgaacgggaatacgccacgaataaattcattactaaggacaaacggaggcggatatcagccacgacgaatctctctgagcggcaggtcacaatctggttccagaacaggagggttaaagagaaaaaagtcatcaacaaactgaaaaccactagttaatggattaaaaatagagcaagaaggcaacttgaagaaacgcttcagaactcgttgctttgcccagataatgataataatgcttaataataattgaagaatgggaaagagaaagagacagagactggcattttcctctcccgaaggagatctctttctctttaatggaatctacaactgttttaaaactttaagaaaggtaaagactgccagttcttccgccaaccccatcagcccagcccgttaaatgtcaaacgtcaacccccaaaatacgcaatttcagataagttacgcagttactgaaatcttgtaagtatttaagtgatcgttacattttaggacactgcgttagatggtaataatctggaagttggttacaaacgcaagaggccattgtaaacatctgcttgtccttcttaggtcgccattccctttgcatgttaagcgtctgctcaggtaaatcttagtgaaattcctaccgttgttgtacgttctgcaaaacattttatgtatagatttagaggggaaacgagaaggtactgaaataatgatcttggaatatttgctgtgaagggagaaagggagagaaaactcttctgaggatcatttgtcttggtagtatagtaaaaccaaccagctgaacctttcaggctacaagagaacccgggtcggtaatgtctttttaagaataatttttaattgcttataacaagcatattttgtggcatttgaactatatttactgctccaatatccgttattttccaaaggattttgtatctttttgaaaatgtttacatcatcagatgatccacagaattcactttatgtgagatctcccgagagtttccatcccaacatgatggactttggtttgaacacaattcgttttttcatttgaattggcatttcccaatatttgctaaacatttgctggagaaatcatttttcttttttcttttttagaaaactcagaatgaaaattcattcccctgaaatatttaggtgtctatattctatattttgatctattaagggattagtatttttccatgtttattgtgttatcagagtgcattagaaagattagtgattcatcttcacagcacatttttaatcaagcagttatttcaaccagcacattcgttttgttcatattcactatagaatgatatcttgtaaataaagacattcagcacactgtgaaaatgtatttgtgcacctgctttttaaatatttctactaaaaatgaaaaaaaaaaacccttagacctgtagatagtgatatcgtaatattaattgttaataaaatagtcactgcc

SEQ ID NO: 403 - DNA, 1791 bp, Homo sapiens
tcttttgattaaagcccaaattgtcattgggcagaagcaatcatgtgacagccaattcggtccaatttcaaccttgtctccatgaattcaatagtttaatagtagcgcggtccccatacggctgtaatcagtgaattagaaaaaaaacaccctagcagcgatattctatgatagattttttttcctctgcgctcgcctttttcctaggccttgcccccccaaagcccctccaaaagagggaactttttctctgagggggctccaaggagaaggccatgaattacgaatttgagcgagagattggttttatcaatagccagccgtcgctcgctgagtgcctgacatcttttccccctgtcgctgatacatttcaaagttcatcaatcaagacctcgacgctttcacactcgacactgattcctcctccttttgagcagaccattcccagcctgaaccccggcagtcaccctcgccacggcgctggcggccgccccaagccgagccccgcgggcagccgcggcagcccggtgcccgccggcgccctgcagccgcccgagtacccctggatgaaggagaagaaggcggccaagaaaaccgcacttctgccggccgccgccgccgccgccaccgccgcagccaccggccctgcttgcctcagccacaaagaatccctggaaatcgccgatggcagcggcgggggatcgcggcgcctgagaactgcttacaccaacacacagcttctagagctggaaaaagaatttcatttcaacaagtacctttgcagaccccgaagggtggagattgcagcgctgctggatttgactgagagacaagtgaaagtgtggtttcagaaccggaggatgaagcacaagaggcagacccagtgcaaggaaaaccaaaacagcgaagggaaatgtaaaagccttgaggactccgagaaagtagaggaggacgaggaagagaagacgctctttgagcaagcccttagcgtctctggggcccttctggagagggaaggctacacttttcagcaaaatgccctctctcagcagcaggctcccaatggacacaatggcgactcccaaagtttcccagtctcgcctttaaccagcaatgagaaaaatctgaaacattttcagcaccagtcacccactgttcccaactgcttgtcaacaatgggccagaactgtggagctggcctaaacaatgacagtcctgaggcccttgaggtcccctctttgcaggactttagcgttttctccacagattcctgcctgcagctttcagatgcagtttcacccagtttgccaggttccctcgacagtcccgtagatatttcagctgacagcttagacttttttacagacacactcaccacaatcgacttgcagcatctgaattactaaaaacattaaagcaaaacaaagcatcaccaaacaaaaactcctttgaccaggtggttttgccttcttttatttgggagtttattttttattttcttcttgacctaccccttccctcctttaagtgttgaggattttctgtttagtgattccctgacccagtttcaaacagagccatcttttacagattattttggagttttagttgttttaaacctaactcaacaaccctttatgtgattcctgagagcagtatgaggcctgcaagaaagtgatcatataattgtatcttcactttctttttatttttgtattacattgggatgcattgtcatgcatattttttgtagaataaattctcctttgctataagtaaaaaaaaaaaaaa

SEQ ID NO: 404 - DNA, 3257 bp, Homo sapiens
tctcactagcctcagagcactctcagaagttcagaaactaagaccagaaaagagaagatttttagacagctcatgaaacggtctgcgcggggcggccattggcggcggagtgtcacgtgaccgcgggggcgtgccaatgtgcgccctcacgggtgtcaaacccctgtcagagtgtgcgatcaagatcgtgaaacaacgcgatgcaaaaagcgacctactacgacagctcggcgatctacggtggctacccctaccaggcagccaacgggttcgcttataatgccaatcagcagccgtacccggcgtccgccgctttgggcgccgacggcgagtaccaccgacccgcctgctccctccagtctccctccagcgccgggggccaccccaaggcacacgaactgagtgaggcgtgcctgcgcaccctgagcgccccacctagccagcctccaagcctgggagagccgcccctgcacccgccgccgccccaggccgcgccccctgccccacagccgcctcagcccgcacctcagccccctgcacctacccctgccgcgcccccgcctccctcttctgcctcccctcctcagaatgccagcaacaaccctacccctgccaacgcggccaagagccccctgctcaactcacccacagtggccaaacaaatcttcccctggatgaaagagtctcgacaaaacacaaagcagaaaaccagcagctccagctcaggcgaaagctgcgctggcgacaagagcccgccggggcaggcttcgtccaagcgcgcgcgcacggcctacacgagcgcgcagctggtggagctggagaaagagttccacttcaaccgctacctgtgccggccgcgccgggtggagatggccaatctgctgaacctcactgagcgccagatcaagatctggttccagaatcgccgcatgaagtacaaaaaggatcagaagggcaagggcatgctaacgtcatcggggggccagtctccaagtcgcagccccgtgccccccggagccggtggctatctgaactctatgcattcgctggtcaacagcgtcccgtatgagccccagtcgcccccgcccttctccaagcccccccagggtacctacgggctgccccccgcctcctaccctgcgtccctgcccagctgcgcacccccgccacccccacagaagcgctacacggcggcaggggcgggcgcagggggcacccccgactatgacccgcacgctcatggcctgcagggcaacggcagctatgggaccccacacatacagggaagccccgtcttcgtggggggcagctatgtggagcccatgagcaactccgggccagccctctttggtctaactcacctcccccacgctgcctcgggcgccatggactatgggggtgccgggccgctgggcagcggccaccaccacgggccggggcctggggagccgcaccccacctacacggaccttaccggccaccatccttctcagggaagaattcaggaagcacccaagctcacccacctgtgatagtgggcttggggctacgcgccaggagagtctccccccacccaccttttttctttggttgcttttttttttttttttttttaggttcttcctgccctttccttccttccttttctctcttctccgccccgcactccgtttcccggtttcccccctcgttggtaaggcgtttttatagtttatgtgacgtagcaatcttggttgctggaatggctgtatcatagcgatatttatctcttcctgctcctcgataggccactggccctgcaccctttaccttctccactctttgatcagaaacagggtatatgaacaaattttctagtcgagttttcaatgtgaatttgttcttacattatggctcccgaggggaagcgattactttttttaattttaaattttttttttaattgcacttcttgtaaagagtgagaaaaaaaatcaaaggcgctttgaaacaggggctctctgtgcaaggatgactaagtgtacgtctttccgtgtgtgtatgctggtgaacagtcagatttatttatatttttttgcaagcattgaataatctaagttttaaatattatttatccccatccgttcgtatttatattaaagaattctgtaccctgatggttcagaagggttcttgggccttttgttcaattgtgtattggcgtacttagaattttttttatttgaaagagaaatataattcctttaaacggtaacgatacaataaaaccagagaagatccagcttttgaaaacagtgatttaggtttgtaacatccggcaaaactgaaaaaaaaaatctgtaaacgcgaaaaatactagatttgttttgagagttcttcattccttgctgctcacattctgagaaacaaaaagaaataaagtttttattctgaataatatccgtgttaagaaggggttctttggccgaagacgtgggtctgcgtggaattcaggccgaggcgagccggcagagcaggccggacgcagcagccctctggctccagcatggggcctggccaggctattcgcctggaagctcggcgaattctcaggatggcggctggggctccaggcggctgcggcagctctggtaacgccgtgcggcgggccagctgggctgcccggttcccagctgctgcggaggcaggctgagggcgcaggggctgccgagtgctgtgcacggaagaaacaaagacatcccggcccaaggcgcagcgggagcgcacaggtgccccgcggcccagccgggggataacgcagggcggtcttctgctccatgctcttcctcgggtcaaagcggaccaactaacgcctaaacctcggtattagccagccgcgcagaggatgccgagcactttccgggagcaatcggactcctggtctcctccggggatgcttcgcggtctgttatcgcgtcaggaggaaagaattgctccaaaaatctgcacgcggagcgaaacagtttgaaagggactgaggctcacccaggtctccagcaaacggaggactgaactggggagagtcaccctgagccagcccttccctggactgccggaatcccagcattagcttcctgctgaatgtagtatttggcattctctgaatttatttcctctccttcccccacccagctttctttttatggccccagggggagggggagagagcaaggagatcggtatctttgtaataaaactgcaattttataaatttttca

SEQ ID NO: 405 - DNA, 1728 bp, Homo sapiens
aaaacgacaacgcgagaaaaattagtatttttgcacttcacaaattaatgaccatgagctcgtttttgataaactccaactacatcgagcccaagttccctcccttcgaggagtacgcgcagcacagcggctcgggcggcgcagacggcggcccgggcgggggccccggctaccagcagcccccagcgcccccgacccagcacctgccgctgcagcagccccagctccctcacgcgggcggcggccgagagcccactgcctcctactacgcgccgcggaccgcccgcgagcccgcctaccctgctgccgcgctgtaccccgcgcatggggccgcggacaccgcctacccctatggctaccgcggcggcgccagccccgggcggccgccccagcccgagcagcccccggcgcaagccaagggcccagcgcacggcctgcatgcgagccacgtcctgcagccccagctgccgccgcccctgcagcctcgcgccgtgcccccagcggccccgcggcgctgcgaggcggcccccgccaccccaggcgtcccggcagggggcagcgcccccgcgtgcccgctgctcttggccgacaagagcccgctgggcctgaagggcaaggagcccgtggtgtacccctggatgaagaagatccatgtcagcgccgttaaccccagttataacggaggggagcctaagcgctctcgaaccgcctacacccggcagcaggtcttggagctggagaaggagttccacttcaatcgatacctgacccggcggcgccgcatcgagatcgcccacacgctctgtttgtctgagcgccaggtcaagatctggtttcagaaccggaggatgaagtggaagaaagaccacaaactgcccaacaccaagatgcgatcctccaattcggcctcggcctctgccggcccaccagggaaagcacaaactcagagcccacacctccatccccacccccacccgagcacctccacacccgttccctcctccatataatcttctagagatcttaaccagtttctatcccttacctgcttttctcttctcttctcctgctccgttcctcatccacccctccccatctggaccataatagacaccaaaacaaacccaaattggtgaaaagaataatcaaaaagaagacattatccggttaagagtctgtgctggttgccacccaagagagaacagttgtccaggatgctggctggtggaacaacctgctggcccgaaacaaggctgccaggtgtggatacctgagaaggactacttggtatcaaatacttttgagatggctacagtcagctagctggacagcccatgctgagtggggacatacacttgcatctttgttgaaagcagaagaagacagaccctttccccaccttccttacctcctcttcccccattaaggcagctcatccaagcttgtatttaactgaataaatgagtagacattgtggacctcacaagattatttaattcttaagatgtgtagaccttgatggtaggtgtgacatgttagtttttcttacttgcatttatttaagacactgttacagagatactgttgtccccttctggggcacggtctttggggagaggggagtgcatttagacttatgtggaactgtacaaattgtgatgtggctacatagaaagccatgtgctaagaataaactccatttaaaaaacattaaaaatctaagattca

SEQ ID NO: 406 - DNA, 1332 bp, Homo sapiens
gggtgctatagacgcacaaacgaccgcgagccacaaatcaagcacacatatcaaaaaacaaatgagctcttattttgtaaactcattttgcggtcgctatccaaatggcccggactaccagttgcataattatggagatcatagttccgtgagcgagcaattcagggactcggcgagcatgcactccggcaggtacggctacggctacaatggcatggatctcagcgtcggccgctcgggctccggccactttggctccggagagcgcgcccgcagctacgctgccagcgccagcgcggcgcccgccgagcccaggtacagccagccggccacgtccacgcactctcctcagcccgatccgctgccctgctccgccgtggccccctcgcccggcagcgacagccaccacggcgggaaaaactccctaagcaactccagcggcgcctcggccgacgccggcagcacccacatcagcagcagagagggggttggcacggcgtccggagccgaggaggacgcccctgccagcagcgagcaggcgagtgcgcagagcgagccgagcccggcgccgcccgcccaaccccagatctacccctggatgcgcaagctgcacataagtcatgacaacataggcggcccggaaggcaaaagggcccggacggcctacacgcgctaccagaccctggagctggagaaggagttccacttcaaccgttacctgacccgcagaaggaggattgaaatagcacatgctctttgcctctccgagagacaaattaaaatctggttccaaaaccggagaatgaagtggaaaaaagataataagctgaaaagcatgagcatggccgcggcaggaggggccttccgtccctgagtatctgagcgtttaaagtactgagcagtattagcggatcccgcgtagtgtcagtactaaggtgactttctgaaactcccttgtgttccttctgtgaagaagccctgttctcgttgccctaattcatcttttaatcatgagcctgtttattgccattatagcgcctgtataagtagatctgctttctgttcatctctttgtcctgaatggctttgtcttgaaaaaaaatagatgttttaacttatttatatgaagcaagctgtgttacttgaagtaactataacaaaaaaagaaaagagaaaaaaaaacacacaaaaagtcccccttcaatctcgtttagtgccaatgttgtgtgttgcactcaagttgtttaactgtgcatgtgcgtggaagtgttcctgtctcaatagctccaagctgttaaagatatttttattcaaactacctatattccttgt

SEQ ID NO: 407 - DNA, 2711 bp, Homo sapiens
attttgcaaggagagctgagacgggctgctccactgtactttgttggctgagaagttgagcagggggtgggggtgggagggtggggggctgggggggtcgcgtccgaaagccctcacaccggtccgggtgccacctctccctgcttgggcgccgccgcgcgagcgcttcccttccccctgcaagcgcccggataatgtctgagaatgtccatttctgggacgcttagcagctattatgtcgactcgatcataagtcacgagagtgaggacgcgcctccagccaagtttccttctggccagtacgcgagctcgcggcagccgggccacgcggagcacctggagttcccctcgtgcagcttccagcccaaagcgccggtgttcggcgcctcctgggcgccgctgagcccgcacgcgtccgggagcctgccgtccgtctaccacccttacatccagccccagggcgtcccgccggccgagagcaggtacctccgcacctggctggagccggcgccgcgcggcgaagcggccccggggcagggccaggcggcggtgaaggcggagccgctgctgggcgcgcctggggagctgctcaaacagggcacgcccgagtacagtttggaaacttcggcgggcagggaggccgtgctgtctaatcaaagacccggctacggggacaataaaatttgcgaaggaagcgaggacaaagagaggccggatcaaaccaacccctccgccaactggctgcacgctcgctcttcccggaaaaagcgctgtccctacaccaaataccagacgctggagctagagaaggagtttctgttcaatatgtacctcaccagggaccgtaggcacgaagtggccagactcctcaatctgagtgagagacaagtcaaaatctggtttcagaaccggcggatgaaaatgaagaaaatgaataaggagcagggcaaagagtaaagattaaagattacccccagtcctccctagctcttccccatctcactcttagttatgtgacgactgcaaagccagtgctgtctgggatgtattcaagtgaatggggaagggagtctctcttccaagtcctttatctgcacctagaacctccctcctttcctttgcccttacctgtctctctcttctctctaggtgtcaggagaaagttttgttgatttagaagatagaaatagttggttcctaagaatgtgatgggccacaaggaaagagagaccccagtcaagctcctagtatgccctgtaatttttctgggaagtcctagcccctcacttccagcttgcctgtttcttctctacacccacccaaaagtcacccagggacactccaactctacacagctcagcagacatccacacacagtaatggggtgagctcacaaccaccattcagtcaagtgaggtgacactccagttgcagaccatcgcacaccaaatttggcaaaacagccctcagactgtcaggcaagcccgggttctacccctaatgcaaatacccaccagggagatgtctagaggcagactcctgagtgaggtgttgcagcccaaaggctgcagcattgccataccattcccatggagttgccaactattctcaggccaagggccatggggaagatggagcaaacctagcccccaagccggtgggctagaaagtacaagaaaaggcagcacgtggttttatgaagctatcttaggtggagctactccccacctcccaccaacatatacattttgttgcaggaaatgtttaattccgcatgatgtttccctctccttccaacaaaagaaggtcaaactgtgggtcgtagagccttgacaatgttgtcctcctgttcatctgtgcaccacttgacagactgtagcttctcttgctctcgaccggccctgcattcttccgcaccctccctagctctgaaatcaactctcttcggtcgtatccaccttgcacccgcaagtcaagccgccccttgtagaaaaatccctccaccttccgttccccgctaggtcaaccccactgtagacaggaaagccaggccaggagagtccgaatgagaatttattgtgaatcgattcccaagctcccttccgggacaagtggtctgggacagggaggagcaacggccccagcgcgcaacgctctgcgcgttcctccgaatcccgtcggcttctcgacccacgcagagaagccccgggcttggcggctctagccccagcgccaaaggagacccgccccagggccgggcttggcctcctgcttcatgggcctggatgcagatctgcgtggctggtgcgtgcgcgcgcttctgggaaacagtcccgcgtgcaaaggaaaggggcaaaatggcacctaagcatcagatggaagcttactctctgcttccgttcctccccctgctcccctacttctcagtccccttcaatttgtagactcttgctcctgcttctcctgatcctgcaaggggacattccagtagaagttttttgctttgtcggtggctgtcgtgaaattgtgcttgtgtttcgtgatttctttgggggtgattgtctcgcttgttttcagttgtcgattatatgggagggttctgggtgggagtggggagggcgaggggcctagagctctaattgtttgttttggaagaaaaaaagaaaaagaacaaaaaatatatatcactctagaaaataaaaaaaaaaaaa

SEQ ID NO: 408 - DNA, 2017 bp, Homo sapiens
cctcccctccaaccgcgccccccctcccggatggggaaaaaaaaagatgtcagctcctccgctgtagtattgctccttaaaaacccctctctctgaaaatgacatgccctcgcaatgtaactccgaactcgtacgcggagcccttggctgcgcccggcggaggagagcgctatagccggagcgcaggcatgtatatgcagtctgggagtgacttcaattgcggggtgatgaggggctgcgggctcgcgccctcgctctccaagagggacgagggcagcagccccagcctcgccctcaacacctatccgtcctacctctcgcagctggactcctggggcgaccccaaagccgcctatcgcctggaacaacctgttggcaggccgctgtcctcctgctcctacccacctagtgtcaaggaggagaatgtctgctgcatgtacagcgcagagaagcgggcgaaaagtggccccgaggcagctctctactcccaccccttgccggagtcctgccttggggagcacgaggtacccgtgcccagctactaccgcgccagcccgagctactccgcgctggacaagacgccccactgttctggggccaacgacttcgaagcccctttcgagcagcgggccagtctcaacccgcgcgccgaacatctggaatcgcctcagctggggggcaaagtgagtttccctgagacccccaagtccgacagccagacccccagccccaatgaaatcaagacggagcagagcctggcgggccctaaagggagcccctcggagagcgaaaaggagagggccaaagctgccgactccagcccagacacctcggataacgaagcgaaagaggagataaaggcagaaaacaccacaggaaattggctgacagcaaagagcggaaggaagaagaggtgcccctatactaaacaccagacgctggaattggagaaagaatttctgttcaatatgtatttgacgcgagagcgccgcctggagattagcaagaccattaaccttacagacagacaagtcaaaatctggtttcaaaatcgcagaatgaaactcaagaaaatgaaccgagagaatcggatccgggaactgacctccaattttaatttcacctgagagcgcggcctctcctcctcccttcccgctccttcctctccccgcccctcctccctttgtgcctggtgatatatttttttttcctccctgagtataaatgcaatgcgactgcaaaaaaggcaaagacctcagactctccttccaagggacctgtggttcgtgctgcgaagatgcttccacttaaagcatgagaaatggggtgccgggatgtggggtgtggtgtgtgccctcatagatgggggtgggagtgtggctggtgtgtgtgtcaagccctcactcacccacgcactcacacacagcattctgttctccatgcaaagttaagatcgaatccatccgcttgtaggggaaaaaaaggaaaaaaattaaccagagagggtctgtaatctcgcagagcacaggcagaatcgttccttccttgctgcatttcctccttagactaatagacgttttggaaagttcggctagtgttcgtgtgtttgtcgtagcacccagagcctccaccaaaccctctccatgtctttacctcccagtcgctctaagaatctgcttgaagtctcgtatttgtactgctttctgcttttctcccacccctcctagcacccccacatcccccatctagtaacatctcagaaatttcatccagaggaacaaaaaaattaaaaatagaacatagcaaagcaaagacagaatgcccccccccccaaatattgtcctgtccctgtctgggagttgtgttatttaaagatattctgtatgttgtatcttttgcatgtagcttccttaatggagaaaaaaaaacctaataaatttccagaatcataatcctcaaaaaaaaaaaaaaaaaaaaaaaaaaaaaaaaaaaaaaaaaaaaaaaaaaaaaaaaaaaa

SEQ ID NO: 409 - DNA, 2100 bp, Homo sapiens
gtgctcagagagagagagactaagacggataacgcgtcatctcgccttcccaaattttcccccctcgctagaccgggtccaaaacctccatccggagccggcaggagaggagaacgatgtttaactcggtcaacctgggcaacttctgctctccgtcgcgcaaggagaggggcgcagatttcggcgagcgagggagctgcgcctccaacctctatctgcccagttgcacttactacatgcccgagttctccacggtctcctccttcctgccccaggccccctctcgtcagatctcctatccctactcggcccaagtgcccccggtccgggaggtctcctacggcctggagccatccggcaagtggcaccatcggaacagctactcctcctgctatgcggcggccgacgagcttatgcaccgggagtgcctgcctccttccaccgtcaccgagatcctcatgaaaaacgaaggctcctacggcggccaccaccaccccagcgccccgcacgcaacccccgccggcttctactcctcagtcaacaagaacagcgtcctgcctcaagccttcgaccgtttcttcgacaacgcctactgcggtggcggcgacccgcccgccgagcccccctgctccggcaagggcgaggccaagggggagcccgaggcacccccggcctcgggactggcgtcccgggctgaggcgggtgccgaggcggaggctgaggaggagaacacaaatcccagctcgtccggttcagcccactccgtggccaaggagccggccaaaggagccgcccccaacgccccccgcacccgcaagaagcgctgcccttattcgaaattccagatccgggaactggagcgagagtttttcttcaacgtgtatatcaacaaagagaagcggctgcagctgtcccggatgctgaacctgacggaccgacaagtgaaaatttggtttcagaacagaaggatgaaagaaaagaaactgagcagagaccggctgcagtatttctcgggaaatcctctgctgtaacctgcagaccgggcccttttgggggcggggggaggggaaaattattttattttatttttattttttattttctaactcgtcttctttccgccggtggaaaactggactgtggccagggctggcccccaccgctgtggccggcactccattccggaacctcctggaccctctatctgactctcgctgtgggacagggaccgggcctggaaagggggtgaagggaagtgtctgatgcacggcgagtgaacaccgttggcgccgaggccaagactttgatttaaaagaaaacacacctcggcgacaatgtcttgctgctcggattaggtgggggaggggcgacagtagtgagcgcctgagccgaacaatcctcgaactaaaagccttcccttgcccatgtgaaaagatccgctaagacagcatgtctgccagcggaaacttctcgagctcccccctctaccccgccccaccttgccccactactttagggggcagctaaatgtgatcctgccttgctgtgaaatttctgtaccttcaacctggtgttaggtgtgcaaagtccgtgtcctacctccgtcttcgccaaggccccgcccgagcctagttgttctccccctgaatgtgtagaaccttcctttgaaatttcttaatcggtgcattgaggtttccacatctttttccaagcagtgccccacttcatggatttatagctatagtctatgcagtcgttacctcttttttttttttttttaagaaaattgaagattggggtggtggaggcagtagggagatgggattgggcacctcccccgtgctggggcctggatttttgtaaataaatttcccaagcgtttctttccacctggagggaaagggggggacgcccccagtgagattcaaatcacgcatctctactcctctgcgtgagtgcgtgtgtacatgtgcactccccaccctgctcccttcccagagggattgctgtgaaatttttttggtggcaaataaagataaatttcattctgttcaaaaaaaaaaaaaaaaaaaaaaaaaaaaaaaaaaaaaaaaaaaaaaa

SEQ ID NO: 410 - DNA, 142 bp, Homo sapiens
ttgcaactggcagagctggagggcgagtttctggtcaacgagttcatcacacgccagcgccggagggaactctcagaccgcttgaatcttagtgaccagcaggtcaagatctggtttcagaaccggagaatgaaaaagaaaa

SEQ ID NO: 411 - DNA, 2435 bp, Homo sapiens
aggggtggagagaaaagaggggagggatggggggaggggaaacaggagcgaggtgtctccctagctcgctgcctctggcaagtggagtttttaaaaagctccagcagatcatgtcatgacgacttcgctgctcctgcatccacgctggccggagagccttatgtacgtctatgaggacagcgcggcggagagcggcatcggcggcggcggcggaggaggaggcggcggcacgggcggagcggggggtggctgcagcggagcgagccccggcaaagccccgagcatggatggtctgggcagcagctgcccggccagccactgccgcgacctgcttccgcaccccgtgctgggccgcccgccggctcccctgggcgcccctcagggcgccgtctatacggacatcccggccccggaggcggcgcgccagtgtgccccgccgcccgcaccccccacctcgtccagcgccaccctgggctacggctaccccttcgggggcagctactacggctgccgcctgtcgcacaacgtgaacctgcagcagaagccttgcgcctaccacccgggcgataaatacccggagccgtcgggcgccctgcccggtgacgacctgtcctctagggccaaggagttcgccttctaccccagcttcgccagctcctaccaggcgatgcccggctacctggacgtgtcggtggtgcccgggatcagcgggcacccggagccgcgtcacgacgccctcatccccgtcgaaggctaccagcactgggctctctccaatggctgggacagtcaggtgtactgctccaaggagcagtcgcagtccgcccacctctggaagtctcccttcccagacgtggttcccctgcagcccgaggtgagcagctaccggcgcgggcgcaagaaacgcgtgccctacactaaggtgcagctgaaggagctagagaaggaatacgcggctagcaagttcatcaccaaagagaagcgccggcgcatctccgccaccacgaacctctctgagcgccaggtaaccatctggttccagaaccggcgggtcaaagagaagaaggtggtcagcaaatcgaaagcgcctcatctccactccacctgaccacccacccgctgcttgccccatctatttatgtctccgctttgtaccataaccgaacccacggaaagacgctgcgcgggtgcagaagagtatttaatgttaaggaaagagaagaaccgcgccgcccggaggcagagaggctccatggccgtgctgctgggccatccccaactccctatcccatccccagcctccacccccatccagatgggactcacgtggcttcaacagctttggaaatgggtcccgagtgggccgtgcgaggaaggctgtcgacctctactcctccttgcgctcaccttgccagaaagtctggtggcagcgcagagcccaatcattccaaccaaagcagggttggggaatcccgaatggccccaattcttgcctcatcctatgaccaggcttttagaggaccttccctaagggcgcagcttcggagcaggatctgtccagctcatactttccttcgctgtccctcccgcactccttaggcaagatttcccagtaaagattttctgtgcgtattttaaaagtcgtgttaatactcatgataattattagggacctggcagcgtgattggagtatggatgtttccgtaaaagctggaattccgtaaaagcattgacgcagcccctacactccatcccaaccaagaaactgcatttcctggggccaggtgggagctgcctttgccccactgcctcccctgttctgctctctcagtcaacatgtggaaatccaaggaggacaaagactccagccacgctgctaaatagggctcctctctcctctctctctctctaggtggtaaggttggggattagtccaggtacagaagcagaacttttttctaaggataaacatctcttccaaggggatggagagtgggtccctcaacaaagtccctgtccagtcacctttccatcagggcactagcccaggaatgactcctcacactttcacctttactgatttccagaggaaagctagaggatctagttcaagaggcaagaagatctggccctcaattagctagatgtagatgctgcctaacagttccctcctcaaaggccaccttggtgctgtgggggccccttgcctcttcccttcccactggtgcattacaaaacagtgttcttttgaaatgttcatcaggaataggcttttttaaaaaatgttgtgtatctgtatatagtattgtgatgtctgaatgacaatgtactgaatgcaaaaaggaaaaaaacccacaaacatgtttttaaaataaaatatctttttttgccttgaaaaaaaaaaaaaaaaaaaaaaaaaaaaaaaaaaaaaaaa

SEQ ID NO: 412 - DNA, 2300 bp, Homo sapiens
ttattgtggtttgtccgttccgagcgctccgcagaacagtcctccctgtaagagcctaaccattgccagggaaacctgccctgggcgctcccttcattagcagtattttttttaaattaatctgattaataattatttttcccccatttaattttttttcctcccaggtggagttgccgaagctgggggcagctggggagggtggggatgggaggggagagacagaagttgagggcatctctctcttccttcccgaccctctggcccccaaggggcaggaggaatgcaggagcaggagttgagcttgggagctgcagatgcctccgcccctcctctctcccaggctcttcctcctgcccccttcttgcaactctccttaattttgtttggcttttggatgattataattatttttatttttgaatttatataaagtatatgtgtgtgtgtgtggagctgagacaggctcggcagcggcacagaatgagggaagacgagaaagagagtgggagagagagaggcagagagggagagagggagagtgacagcagcgctcgcgggggctcaacccccagacctccagaaatgacgtcagaatcatttgcatcccgctgcctctacctgcctggtccagctgggaccctgcctcgccggccgcatggccagagggttggaaattaatgatcatgagctcgtatttgatggactctaactacatcgatccgaaatttcctccatgcgaagaatattcgcaaaatagctacatccctgaacacagtccggaatattacggccggaccagggaatcgggattccagcatcaccaccaggagctgtacccaccaccgcctccgcgccctagctaccctgagcgccagtatagctgcaccagtctccaggggcccggcaattcgcgaggccacgggccggcccaggcgggccaccaccaccccgagaaatcacagtcgctctgcgagccggcgcctctctcaggcgcctccgcctccccgtccccagccccgccagcctgcagccagccagcccccgaccatccctccagcgccgccagcaagcaacccatagtctacccatggatgaaaaaaattcacgttagcacggtgaaccccaattataacggaggggaacccaagcgctcgaggacagcctatacccggcagcaagtcctggaattagagaaagagtttcattacaaccgctacctgacccgaaggagaaggatcgagatcgcccactcgctgtgcctctctgagaggcagatcaaaatctggttccaaaaccgtcgcatgaaatggaagaaggaccaccgactccccaacaccaaagtcaggtcagcacccccggccggcgctgcgcccagcaccctttcggcagctaccccgggtacttctgaagaccactcccagagcgccacgccgccggagcagcaacgggcagaggacattaccaggttataaaacataactcacacccctgcccccaccccatgcccccaccctcccctcacacacaaattgactcttatttatagaatttaatatatatatatatatatatatatataggttcttttctctcttcctctcaccttgtcccttgtcagttccaaacagacaaaacagataaacaaacaagccccctgccctcctctccctcccactgttaaggacccttttaagcatgtgatgttgtcttagcatggtacctgctgggtgtttttttttaaaaggccattttggggggttatttattttttaagaaaaaaagctgcaaaaattatatattgcaaggtgtgatggtctggcttgggtgaatttcaggggaaatgaggaaaagaaaaaaggaaagaaattttaaagccaattctcatccttctcctcctcctccttccccccctctttccttaggccttttgcattgaaaatgcaccaggggaggttagtgagggggaagtcattttaaggagaacaaagctatgaagttcttttgtattattgttgggggggggtgtgggaggagagggggcgaagacagcagacaaagctaaatgcatctggagagcctctcagagctgttcagtttgaggagccaaaagaaaatcaaaatgaactttcagttcagagaggcagtctataggtagaatctctccccacccctatcgtggttattgtgtttttggactgaatttacttgattattgtaaaacttgcaataaagaattttagtgtcgatgtgaaatgccccgtgatcaataataaaccagtggatgtgaattagtttta

SEQ ID NO: 413 - DNA, 1613 bp, Homo sapiens
acccctcaacttcaaagagtcacaaatcacccttaatcaaaaagggtgcagaaatttttttgggccctccccgccatgagctcctacgtagccaattcattctataagcagagccccaatatccctgcctataacatgcaaacttgtgggaactatggatcggcctcagaggtgcaggcatccaggtactgctacggcggattggacttaagcatcactttcccaccgcctgcgccttccaactctctccacggggtagacatggctgccaacccccgggctcaccccgaccgccccgcctgcagcgccgcggccgctccgggacacgctccgggcagagacgaagcggctcctctgaaccccgggatgtacagtcagaaggcggctcgcccggcgctggaggagcgagctaagagcagtggggagatcaaagaggagcaggcgcagacagggcagcccgccggactgagccagccaccggccccgccacagatttacccgtggatgaccaaactgcacatgagccacgagacggacggcaagcggtcccgaaccagttacacgcgctaccagactctggaactcgagaaagaattccactttaaccgctacctcactcgccgcaggcgcatagagatcgccaacaacttgtgtctcaatgagagacagatcaagatctggttccagaaccgcaggatgaagtggaagaaagattccaaaatgaaaagcaaagaggctctttagaggcagcgggggaggcccgcagagcgcgcccctagccggttcctgtccctgcgcctttccttttcgcctttcctctctatatttcgggtcgggggcaggtgctggagcactgggctcccgggccccacagacaaaagcgcttttccttggcattccgcatccctaccgacccagggttcccgcggggctgtcggcgctgccccatctcccctcagctcggctcagctcggtacccggggcccagggcaagctccgcaggacttccccggagggctgcggcgtacaggctggcgcagaacgaaccttggcctgggccgtatctccggctcccagcctcagcgcggccctcccgagttaaggtgggcccggcccgcgccacaggaccctcgccggaccctctaacctcgccctctcctttgttcccggctggacgggttagacagccaaaggctggcgagagtctggccctagactcggggtgcttccttgtagcgactaaactagattttcacttatgaatgatttgcatatgaaaggagagcatcggcctagggcccccacagttgctctatgctttccaaaccttatctccacaacctcttccccccaaaacccgggaacctccccagcctgcgcctgctgcatgccctctcaggccggcagccccagcctgctagctagctcaactagtggggtttcctggcactggaccccagcaagtggtcctagaggccctttgctgtcccatagtccctgccacgaatttctgtgccctcctgacccattgctgttgtccaactatttattgactctgggtccttcctgaaactatattttgtcatatcaaataaagagagaacaggactaaa

SEQ ID NO: 414 - DNA, 1681 bp, Homo sapiens
ttttgtctgtcctggattggagccgtccctataaccatctagttccgagtacaaactggagacagaaataaatattaaagaaatcatagaccgaccaggtaaaggcaaagggatgaattcctacttcactaacccttccttatcctgccacctcgccgggggccaggacgtcctccccaacgtcgccctcaattccaccgcctatgatccagtgaggcatttctcgacctatggagcggccgttgcccagaaccggatctactcgactcccttttattcgccacaggagaatgtcgtgttcagttccagccgggggccgtatgactatggatctaattccttttaccaggagaaagacatgctctcaaactgcagacaaaacaccttaggacataacacacagacctcaatcgctcaggattttagttctgagcagggcaggactgcgccccaggaccagaaagccagtatccagatttacccctggatgcagcgaatgaattcgcacagtggggtcggctacggagcggaccggaggcgcggccgccagatctactcgcggtaccagaccctggaactggagaaggaatttcacttcaatcgctacctaacgcggcgccggcgcatcgagatcgccaacgcgctttgcctgaccgagcgacagatcaaaatctggttccagaaccgccggatgaagtggaaaaaagaatctaatctcacatccactctctcggggggcggcggaggggccaccgccgacagcctgggcggaaaagaggaaaagcgggaagagacagaagaggagaagcagaaagagtgaccaggactgtccctgccacccctctctccctttctccctcgctccccaccaactctcccctaatcacacactctgtatttatcactggcacaattgatgtgttttgattccctaaaacaaaattagggagtcaaacgtggacctgaaagtcagctctggaccccctccctcaccgcacaactctctttcaccacgcgcctcctcctcctcgctcccttgctagctcgttctcggcttgtctacaggcccttttccccgtccaggccttgggggctcggaccctgaactcagactctacagattgccctccaagtgaggacttggctcccccactccttcgacgcccccacccccgccccccgtgcagagagccggctcctgggcctgctggggcctctgctccagggcctcagggcccggcctggcagccggggagggccggaggcccaaggagggcgcgccttggccccacaccaacccccagggcctccccgcagtccctgcctagcccctctgccccagcaaatgcccagcccaggcaaattgtatttaaagaatcctgggggtcattatggcattttacaaactgtgaccgtttctgtgtgaagatttttagctgtatttgtggtctctgtatttatatttatgtttagcaccgtcagtgttcctatccaatttcaaaaaaggaaaaaaaagagggaaaattacaaaaagagagaaaaaaagtgaatgacgtttgtttagccagtaggagaaaataaataaataaataaatcccttcgtgttaccctcctgtataaatccaacctctgggtccgttctcgaatatttaataaaactgatattatttttaaaacttta

SEQ ID NO: 415 - DNA, 2290 bp, Homo sapiens
gccgagctcagcaccgaggcgccccccaacctgcccagcccccagcccaccagcccagcccagtcccggggagccagctggcctggggttcggtcccggggggaggggagtttcgggggtactgggcggggtactcgtgagccagaggggagggggccgcgggttttcatgtacccagcatgagctcctacttcgtcaaccccctgttctccaaatacaaagccggcgagtccctggaaccggcctattacgactgccggttccctcagagcgtgggcaggagccatgcgctggtgtacgggcccggcggctcggcgcccggcttccagcacgcttcgcaccacgttcaagacttcttccaccacggcacctccggcatctccaactcaggctaccagcagaacccgtgctcgcttagctgccacggagacgcctccaaattctatggctacgaggcgctccccagacagtccctttatggggctcagcaagaggcgagcgtggtgcaatatcccgactgtaaatcctccgccaacactaacagtagcgaaggacaaggccacttaaatcaaaactcgtctcccagcctcatgtttccatggatgagaccccacgctccggggaggcgcagtggacggcaaacttacagccggtatcagaccttggaactagaaaaggagtttctctttaatccttatttgacacgaaaacgtcggattgaagtctctcatgccctgggactgaccgagagacaagtgaagatctggttccagaaccgaaggatgaagtggaaaaaggagaacaacaaggataaactgccgggagcccgagatgaggagaaggtggaggaagaaggaaatgaggaagaggagaaagaagaggaggaaaaggaagaaaacaaggactaagcaaaaaagaaagacccccccccccttagcaactcccttgaagtttcgttttatggtagcagataaattgagaagtttacgactgtcatttgcttttatagagaatagaatgacactcacaactctaactacctgtcagatacttgcagctctggttttattacctttggacttcccccactctttatttgtttgggggctggaggggggagacggagaaacagtgaaaagttcggactctctgtctcactccttgccccacacacacttgtccctgcccccacccttctgagtccttcctggattttaaggtctgagacctggcctccgtgctcctcggtctgtctctcaccacactcccacctccctgcttctctggtatttattttagaggggagccccctcgaaatgcagaaaaggacttgtggttttgtttttatgctaaggctagtgtactagatgtactttttctaaaaaggaaaggacagaaaaaaatgaagaaaggaaaggaagacaaatgtaaagaaataaggaaaaaagcaaggaatatcccctccccctccccctccccctccccagggctccctgcttagaaaaacccccttgactttctctaggaacctgatggaaacctgaaggagatgtgggtctttcccctccccccatttccagaagggtagataggagcctgcagtcgcctctaaaatcctacctaaccatcccatggtcactcgggcccatgccttcctctccttcgctgtttgatttctattctgttgggcccgccttcctctgagctgcattagtgttagtgctcagaaatcaccataatcacgaaaataataataataaatctttaacatactacctaaagggaacctgcaataatcttgaaaaagaaaaagagaaaaattttaaaatcctgctataggagaaaaaaagagaaaaaaataaaaatcaaaaaaaaaaaaaagaaagaaagaaacctccagcgtattttatcactacctatagaaagaaatcctgctttgagagtatttgtaatgcggttttgttgtcgtttgttgctgcttatttcactaagaaaacccaacaactgagactgcctagcccgccggtcctgtgcgcttttattgtgcttctaaccccagtagagtagaactaaattgcactgaatgtatagttaactctgtcttgaattctctgtttatgcaatgtgctcgaaagaaaaaaatgttaaaaatatatctataataataattttttgtcatttgtctttatgtccagctatgaatgtagattttgtgtcccgacagccctgttcctggtccaagtactttgtattgtatacgtgagtcataataataaaaagaagaagaaaa

SEQ ID NO: 416 - DNA, 1640 bp, Homo sapiens
tggaaaaataattacctgacttgattgttctgtgagcagataaaaagtacatatacagttcatacaataatcttatgtatgtaaaaccccgttacgatgtcggcgacggggcccatcagtaactattacgtggactcgctcatctctcacgacaatgaagacctcctagcgtccaggtttccggccaccggggctcatcccgccgccgccagacccagcggtttggtgccggactgtagcgattttccgtcctgtagcttcgcgcccaagccggcagtgttcagcacgtcgtgggcgcccgtgccctctcagtcgtccgtggtatatcacccgtacggcccccagccccacctcggcgccgacacgcgctacatgcggacttggctcgagccgctgtccggcgccgtctccttccccagcttcccggccgggggccgtcactacgccctcaagccggacgcctaccccgggcgccgcgcggactgcggcccaggggagggccgcagctacccggactacatgtacggctcgcccggggagctgcgcgaccgcgccccgcagacactgccctcgcccgaggcggacgcgctcgccggcagcaagcacaaagaggagaaggccgacctggaccccagcaaccccgtggccaactggattcacgcccgctccacgaggaagaagcgctgcccctacaccaagtaccagacgctggaactggagaaggagtttctcttcaatatgtatttaaccagggaccgtcggtatgaggtggcccgggttctcaatctcaccgagcggcaggtcaaaatctggtttcagaatcgaaggatgaagatgaaaaagatgaataaagagaaaaccgacaaggagcagtcctaaaccctacccagcctgctgcctcagcacagccaagggaaaaacaaaaaccccacaaaataccccaacacaggcgggggagagacgaaaaagaaaaggaaagagcaagatagacaaaagccaatcagcttaaaaagaaaaacaaggaaggggaaaagaaaactcttgcgatttgggagggttcagtgttgagatattggtgttttagagttagttctacccagcgaggaggaggcggggagagaaactgcgttctctttccccagcgcaaccgaaataaatgacacatacaaatgtgatttttttcctcctttcttcagagaagccagtacttgaatcgctatatttctatttttttttccctgtatcgtatttggtccaggtcatccctccccgggcctggggcgctctgcgtgcagattttgtacaaaaaaaaaaaagacacacacacatacatgataatgattcccagcccaggagctgaggggtgagggctggggaccatgccgcgggctaggtcgggcccgtgcaggccggcgccttgggctgtacatagtgttccctctcatccccagggttcgtccccagcgtccgtcctgtaacgtgcttctgtttgttatggtagaacagccctgtgttaatatattgaagtcacttaaccagaaaaaaaaaaaaaaaaaaaaaaaaaaaaaaaaaaaaaaaaaaaaaaaaaaaaaaaaaaaaaaaaaaaaaaaaaaaaaaaaaaaaaaaaaaaaaaaaaaaaa

SEQ ID NO: 417 - DNA, 1991 bp, Homo sapiens
gccgagcggagaggccgcccattggccggccagcgccacgtggccgcccccgccggtatattaggccactatttacctccggctcactcgccatgggttggagagggcagctcgggtagagagggctggcggagcggcgcagacggcggcagtcctgctcagcctctgcccggctccgtactccggccccggcctgcgccctcagaaaggtggggcccgaaccatgagctcctacctggagtacgtgtcatgcagcagcagcggcggggtcggcggcgacgtgctcagcttggcacccaagttctgccgctccgacgcccggcccgtggctctgcagcccgccttccctctgggcaacggcgacggcgccttcgtcagctgtctgcccctggccgccgcccgaccctcgccttcgcccccggccgcccccgcgcggccgtccgtaccgcctccggccgcgccccagtacgcgcagtgcaccctggagggggcctacgaacctggtgccgcacctgccgcggcagctgggggcgcggactacggcttcctggggtccgggccggcgtacgacttcccgggcgtgctggggcgggcggccgacgacggcgggtctcacgtccactacgccacctcggccgtcttctcgggcggcggctctttcctcctcagcggccaggtggattacgcggccttcggcgaacccggcccttttccggcttgtctcaaagcgtcagccgacggccaccctggtgctttccagaccgcatccccggccccaggcacctaccccaagtccgtctctcccgcctccggcctccctgccgccttcagcacgttcgagtggatgaaagtgaagaggaatgcctctaagaaaggtaaactcgccgagtatggggccgctagcccctccagcgcgatccgcacgaatttcagcaccaagcaactgacagaactggaaaaagagtttcatttcaataagtacttaactcgagcccggcgcatcgagatagccaactgcttgcacctgaatgacacgcaagtcaaaatctggttccagaaccgcaggatgaaacagaagaaaagggaacgagaagggcttctggccacggccattcctgtggctcccctccaacttcccctctctggaacaacccccactaagtttatcaagaaccccggcagcccttctcagtcccaagagccttcgtgaggccggtacttggggccgaaaaactgtggcctgcagaagtcccaggcgacccccatccctatctagacttaggagctcagtttgggatggaggtgggagaacaaaaatgaatagggatttcacttgggaaatgaagtactttagttggcttccgagttccagactatatgtccagatattaattgactgtcttgtaagccacttgtttggttatgatttgtgtcttatcagggaaaaggtgcccagctgccagcccagctccgctgctatctttgcctcacttagtcatgtgcaattcgcgttgcagagtggcagaccattagttgctgagttctgtcagcactctgatgtgctcagaagagcacctgcccaaagtttttctggttttaatttaaaggacaaggctacatatattcagctttttgagatgaccaaagctagttagggtctccttgatgtagctaagctgcttcagtgatcttcacatttgcactccagtttttttttctttaaaaaagcggtttctacctctctatgtgcctgagtgatgatacaatcgctgtttagttactagatgaacaaatccacagaatgggtaaagagtagaatctgaactatatcttgacaaatattattcaaacttgaatgtaaatatatacagtatgtatattttttaaaaagatttgcttgcaatgaccttataagtgacatttaatgtcatagcatgtaaagggttttttttgtaataaaaattatagaatctgcaaaaaaaaaaaaaaaa

SEQ ID NO: 418 - DNA, 1814 bp, Homo sapiens
cggggaatgttttcctagagatgtcagcctacaaaggacacaatctctcttcttcaaattcttccccaaaatgtcctttcccaacagctctcctgctgctaatacttttttagtagattccttgatcagtgcctgcaggagtgacagtttttattccagcagcgccagcatgtacatgccaccacctagcgcagacatggggacctatggaatgcaaacctgtggactgctcccgtctctggccaaaagagaagtgaaccaccaaaatatgggtatgaatgtgcatccttatatacctcaagtagacagttggacagatccgaacagatcttgtcgaatagagcaacctgttacacagcaagtccccacttgctccttcaccaccaacattaaggaagaatccaattgctgcatgtattctgataagcgcaacaaactcatttcggccgaggtcccttcgtaccagaggctggtccctgagtcttgtcccgttgagaaccctgaggttcccgtccctggatattttagactgagtcagacctacgccaccgggaaaacccaagagtacaataatagccccgaaggcagctccactgtcatgctccagctcaaccctcgtggcgcggccaagccgcagctctccgctgcccagctgcagatggaaaagaagatgaacgagcccgtgagcggccaggagcccaccaaagtctcccaggtggagagccccgaggccaaaggcggccttcccgaagagaggagctgcctggctgaggtctccgtgtccagtcccgaagtgcaggagaaggaaagcaaagaggaaatcaagtctgatacaccaaccagcaattggctcactgcaaagagtggcagaaagaagaggtgcccttacactaagcaccaaacgctggaattagaaaaagagttcttgttcaatatgtacctcacccgcgagcgccgcctagagatcagtaagagcgttaacctcaccgacaggcaggtcaagatttggtttcaaaaccgccgaatgaaactcaagaagatgagccgagagaaccggatccgagaactgaccgccaacctcacgttttcttaggtctgaggccggtctgaggccggtcagaggccaggattggagagggggcaccgcgttccagggcccagtgctggaggactgggaaagcggaaacaaaaccttcaccgctctttgtttgttgttttgttgtattttgttttcctgctagaatgtgactttggggtcattatgttcgtgctgcaagtgatctgtaatccctatgagtatatatatatatatatatatatatatataaaaacttagcacgtgtaatttattattttttcatcgtaatgcagggtaactattattgcgcattttcatttgggtcttaacttattggaactgtagagcatccatccatccatccatccagcaatgtgactttttcatgtctttcctaacacaaaaggtctatgtgtgtggttagtccatgaactcatggcattttgaatacatccagtactttaaaaatgacatatatatttaaaaaaaaaagattaagaaaacccacaagttggagggagggggacttaaaaagcacattacaatgtatcttttcacaaatgaatttagcagttgtccttggtgagatgggatattggcgatttatgccttgtagcctttcccttgtggtgcatctgtggtttggtagaagtacaacagcaacctgtcctttctgtgcatgttctggtcgcatgtataatgcaataaactctggaaatgagttcaaaaaaaaaaa

SEQ ID NO: 419 - DNA, 1463 bp, Homo sapiens
atgaacgactttgacgagtgcggccagagcgcagccagcatgtacctgccgggctgcgcctactatgtggccccgtctgacttcgctagcaagccttcgttcctttcccaaccgtcgtcctgccagatgactttcccctactcttccaacctggctccgcacgtccagcccgtgcgcgaagtggccttccgcgactacggcctggagcgcgccaagtggccgtaccgcggcggcggcggcggcggcagcgcggggggcggcagcagcgggggcggccccggcgggggcggcggcggcgcggggggctacgctccctactacgcggcggcggcggcggcggctgcggcggccgcggcggccgaggaggcggccatgcaacgcgagcttctcccgcccgcgggccgccggccggacgtgctcttcaaggcgcctgagccggtgtgcgctgcgccggggccgccgcacggccccgcgggcgccgcctccaacttctacagcgcggtgggccgcaatggcatcttgccacagggcttcgaccagttctacgaggcagcgcccgggcccccgttcgccgggccgcagcccccgccgccacccgcgccgccacagcccgagggcgcagccgacaagggcgaccccaggaccggggctggtggcggcgggggcagtccctgcaccaaggcgacccctggctcggagcccaagggggcagcagaaggcagcggtggcgacggcgagggccccccgggagaggcgggggccgagaagagcagcagcgcagttgccccccagcggtcccggaaaaagcgctgtccctataccaagtaccagatccgcgaactggaacgcgagtttttctttaacgtgtacataaacaaagagaaaagacttcaactctctcggatgctcaacctcactgaccggcaagtcaaaatctggttccagaatcgcaggatgaaagaaaagaaactgaacagagaccgtctgcagtatttcactggaaaccccttattttgagagctccaggaagcgccctcaccccagccccactcacccaccctccttcccaccagcctgctctccgcaggcccactgtccttgggtttaatgacgtctcttctctgtggaacttcacgattccttcccacggtcaactcgggacctcccagcgaccactgcagcctgcggacgaggccgggacttggccgagcggatcctaataaggggaaaatggtaaatgcaaacgtcccgttacaattttaccgccagtgtgctgtcgttccccctccccctctccgagtcctcgtggggacacggcggggtctgtaggaagttgggccgggttgggggttgctagaaggcgctggtgttttgctctgagttttaagagatcccttccttcctcttcggtgaatgcaggttatttaaactttgggaaatgtacttttagtctgtcatatcaa

SEQ ID NO: 420 - DNA, 813 bp, Homo sapiens
atgtgtgagcgcagtctctacagagcgggctatgtgggctcgcttctgaatctgcagtcgccagactctttctacttctccaacctgaggccgaatggcggccagttggccgcgcttccccctatctcctacccgcgcggcgcgctgccctgggccgccacgcccgcctcctgcgcccccgcgcagcctgcgggcgccactgccttcggcggcttctcgcagccctacctggctggctccgggcctctcggcctgcagcccccaacagccaaagacggacccgaagagcaggctaagttctatgcgcccgaagcggccgctgggccagaggagcgcggtcgtacccggccgtccttcgcccccgagtctagcctggctcctgcagtggctgctctcaaagcggccaagtatgactacgctggtgtgggtcgtgccacgccgggctccacgaccctgctccagggggctccctgcgcccctggcttcaaggacgacaccaagggcccgctcaacttgaacatgacagtgcaggcggcgggcgttgcctcttgcctgcgaccttcactgcccgacggcctgccgtggggggcggccccggggagggcccgcaagaagcggaaaccctacacgaagcagcagattgcggagttggagaacgaattcctcgtcaacgaattcatcaacaggcagaaacgcaaggaattgtccaataggctgaacctcagcgaccagcaagtcaaaatctggttccagaacaggcgtatgaagaagaagcgcgtggtgcttcgggagcaggcgctggcgctctactag

SEQ ID NO: 421 - DNA, 2341 bp, Homo sapiens
gagaaaggagaggagggaggaggcgcgccgcgccatggtgtcctgcgcggggccagggccagggccggggccgggccaggccgggccatgagccgcgccgggagctgggacatggacgggctgcgggcagacggcgggggcgccggtggcgccccggcctcttcctcctcctcatcggtggcggcggcggcggcgtcaggccagtgccgcggctttctctccgcgcctgtgttcgccgggacgcattcggggcgggcggcggcggcggcagcggcggctgcggcggcggcggcggcagcctccggctttgcgtaccccgggacctctgagcgcacgggctcttcctcgtcgtcgtcctcttctgccgttgtagcggcgcgcccggaggctcccccagccaaagagtgcccagcacccacgcctgcagcggccgctgcagcgcccccgagcgctccagcgctgggctacggctaccacttcggcaacggctactacagctgccgtatgtcgcacggcgtgggcttacagcagaatgcgctcaagtcatcgccgcacgcctcgctgggaggctttcccgtggagaagtacatggacgtgtcaggcctggcgagcagcagcgtaccggccaacgaggtgccagcgcgagccaaggaggtatccttctaccagggctatacgagcccttaccagcacgtgcccggctatatcgacatggtgtccactttcggctccggggagcctcggcacgaggcctacatctccatggaggggtaccagtcctggacgctggctaacgggtggaacagccaggtgtactgcaccaaggaccagccacaggggtcccacttttggaaatcttcctttccaggggatgtggctctaaatcagccggacatgtgcgtctaccgaagagggaggaagaagagagtgccttacaccaaactgcagcttaaagaactggagaacgagtatgccattaacaaattcattaacaaggacaagcggcggcgtatctcggctgctacgaacctatctgagagacaagtgaccatttggtttcagaaccgaagagtgaaggacaagaaaattgtctccaagctcaaagatactgtctcctgatgtggtccaggttggccacagacagcttagaagccattcggttgtctccaaaaggcctttggaaagacttgaatatgtatttaattccccccaccccctgccaatggtggcaaattttgtgaattgtttttctctcttccccttatctggctctaaaaccttctgctgcccaacctgactttgtagttctgatttttacttgtttattattggttttgttcttgcctagggtttttaaaatatctgtttttaatgttttgtttctccctccaggccagtataaagggacttgaagtattttttaataatccgccccccaatgaacttcagaagtgccattctgatttaagggtttttttaaaaaattactttatttgttcattcccagcactgattatcttcataatccattaggacagaatggttttcagtcgttcatatcctgtaattaggtaattgaatcattagctctcagcagttgccctgaggcaagtggaaaggcaggcagtgctctggggtcaccgagaaagtctaaaaacaggaggctgaaggtactgtgatggctttaaaaatggccaccttattaaatagggattgtatcaatattgaaatgaagacaatctttccaactttgggtgtttcacttgctgttttaattgtttgtttttaacactttgtaggtttgtgttttcataatctttaatttgaaactcatgtgtcctcatggatcgtggatgccttcatttcttgagctctcaatgcagacatttaaatggctgcaatcagtagagtgacccgcggatggcataaatgcacctccttttcttggccttggatctatgggtctgggattgtggtcatctcctcaatcctcaaaaagaggctgaatcaatgtggccgtgggtgggaacttacatacagaacccaatgaagaacttgactgtctaaacaagggggcctcgcatggagctgtaaagcatctaacaaatatgaaaaatgtgaagttccaaggtccaagaagaaaaataatgatgtttctgaaagtgatgataaataattacttttaaagtgctgcatatttatacaattgagagattatttttgtaaatgcaatgtctgtgagctgggatacatgggcagtgcttcagacatttaaaaatcactttttactcctagggagatgccaataaacagaactcttttgtttcaaaaaaaaaaaaaa

SEQ ID NO: 422 - DNA, 2319 bp, Homo sapiens
gcctccacagatatcaaaagaaacctgaagagcctacaaaaaaaaaagagataaagacaaaattcaagaaaacacacacatacataattgtggtcacctggagcctgggggccggcccagctctctcaggattcagcagacattggaggtggcagtgaaggatacagtggtagtcaatgttatttgagcagggtcagcaggccctggagcttcctgagtgcacaatgcagaaggctgcttactatgaaaacccaggactgtttggaggctatggctacagcaaaactacggacacttacggctacagcaccccccaccagccctacccaccccctgctgctgccagctccctggacactgactatccaggttctgcctgctccatccagagctctgcccctctgagagccccagcccacaaaggagctgaactcaatggcagctgcatgcggccgggcactgggaacagccagggtgggggtggtggcagccagcctcctggtctgaactcagagcagcagccaccacaaccccctcctccaccaccgaccctgcccccatcttcacccaccaatcctggaggtggagtgcctgccaagaagcccaaaggtgggcccaatgcttctagctcctcagccaccatcagcaagcagatcttcccctggatgaaagagtctcgacagaactccaagcagaagaacagctgtgccactgcaggagagagctgcgaggacaagagcccgccaggcccagcatccaagcgggtacgcacggcatacacgagcgcgcagctggtggaattggaaaaggaattccacttcaaccgctacttgtgccggccgcgccgcgtggagatggccaacctgctgaatctcacggaacgccagatcaagatctggttccagaaccggcgcatgaagtacaagaaggaccagaaggccaagggcatcctgcactcgccggctagccagtcccctgagcgcagcccaccgctcggcggcgccgctggccacgtggcctactccggccagctgccgccagtgcccggcctggcctacgacgcgccctcgccgcctgctttcgccaaatcacagcccaatatgtacggcctggccgcctacacggcgccactcagcagctgcctgccacaacagaagcgctacgcagcgccggagttcgagccccatcccatggcgagcaacggcggcggcttcgccagcgccaacttgcagggcagcccggtgtacgtgggcggcaacttcgtcgagtccatggcgcccgcgtccgggcctgtcttcaacctgggccacctctcgcacccgtcgtcggccagcgtggactacagttgcgccgcgcagattccaggcaaccaccaccatggaccttgcgaccctcatcccacctacacagatctctcggcccaccactcgtctcagggacgactgccggaggctcccaaactgacgcatctgtagcggccgccgccagcccgaactcgcggcaaaattacctctcttgctgtagtggtggggtagagggtggggcccgcggggcagttcgggaacccccttccccgctcttgccctgccgccgcctcccgggtctcaggcctccagcggcggaggcgcaggcgaccgggcctcccctccatgggcgtcctttgggtgactcgccataaatcagccgcaaggatccttccctgtaaatttgacagtgccacatactgcggaccaagggactccaatctggtaatggtgtcccaaaggtaagtctgagacccatcagcggcgcgccctgcagagggaccagagcttggagagtcttgggcctggcccgcgtctagcttagtttcagagaccttaatttatattctccttcctgtgccgtaaggattgcatcggactaaactatctgtatttattatttgaagcgagtcatttcgttccctgattatttatccttgtctgaatgtatttatgtgtatatttgtagatttatccagccgagcttaggaattcgcttccaggccgtgggggccacatttcacctccttagtccccctggtctgaactagttgagagagtagttttgaacagtcgtaaccgtggctggtgtttgtagttgacataaaggattaagaccgcaaattgtccttcatgggtagagtcaggaagcccggtggcgtggcacaacacactttggtcatttctcaaaaaccacagtcctcaccacagtttattgatttcaaattgtctggtactattggaacaaatatttagaataaaaaaatttcccagtcaaaaaaaaaaaaaaaaaaaa

SEQ ID NO: 423 - DNA, 1298 bp, Homo sapiens
cattaatatctggcaggggctctcaaatgtgccatagcaagctacttgattacacgtatgttatttagttaaatttgtgaaaattatgagatgctcaccaacccggtgataaacttgctccctcgccattggctggcctggtcacatggctgcccaactttattcagttgacagcaagtaggagggccctatggaaggagaaaaaaagacaacacgagaaaaattagtattttctaccttctgaaattaatggtcatgagttcgtatatggtgaactccaagtatgtggaccccaagttccctccgtgcgaggagtatttgcagggcggctacctaggcgagcagggcgccgactactacggcggcggcgcgcagggcgcagacttccagcccccggggctctacccacggcccgacttcggtgagcagcctttcggaggcagcggccccgggcctggctcggcgctgcctgcgcggggtcacggacaagagccaggcggccccggcggtcactacgccgctccaggagagccttgcccagctcccccggcgcctccgccggcgcccctgcctggcgcccgggcctacagtcagtccgaccccaagcagccgccctccgggacggcactcaagcagccggccgtggtctacccctggatgaagaaggtgcacgtgaattcggtgaaccccaactacaccggtggggaacccaagcggtcccgaacggcctacacccggcagcaagtcctagaactggaaaaagaatttcattttaacaggtatctgacaaggcgccgtcggattgaaatcgctcacaccctgtgtctgtcggagcgccagatcaagatctggttccagaaccggaggatgaagtggaaaaaagatcataagctgcccaacactaaaggcaggtcatcgtcctcatcttcctcctcatcttgctcctcctcagtcgcccccagccagcatttacagccgatggccaaagaccaccacacggacctgacgaccttatagaagtggggaccctgggcccatctctccctgcgcaccaggctgagccgaagctgcgggggcaggccgggcctgctgtcacctcgctgggctctaaggtactgtggggtggacctgggacaagcaggccgccctcggactaggttagcatcctgcccgagggcagccccctccctagagcgggatggggatgggagggggggcgggattctctctctaagtatattatatggcaggagctactgagaacataaaatcttggcgagtcattaaacttatgaaaa

SEQ ID NO: 424 - DNA, 1879 bp, Homo sapiens
tgctgtggtgcgaaaatgcctcgccggtgcgcaccgggtcggcagcctcggcggcgggggcgagattggcgggaggggggcgcggggggggcgcggtaagaggtggcggcgggcagagggtgttttttttcttttccctccagagccggggtttgtaaaccgaggccagagtgtccccgtgggccgagcgcacttttttcttgtccgggtgcgctcagtcactggtgcctgagaggaaacagtggaggcagcggggcaggtcgcctggggcgtcggcgattatattgcggccgagccggggcgcgccgggaaaggccgggagggcggcggcgcgcgggggctgggcgaggccccgcgacccgcgagggaggcggcgcgaagccgaggcggcgggcgcaagagccgggcatgagcgcccagtagctgagcgcccgcggctgcctggcctcagaagcgacgcgcgagcgcgggcgggcggcagcagcgacgtagcccggcggtcccggcggcgagagcagccgccccacaggcccccgcggcagtgcggccgagtcgaggctcgctctctggctgcttagcgccgcccgcccgcccggggccgccgccgctgacgccccaatgagttcgtacttcgtgaacccgctgtactccaagtacaaggcggcggctgcggcggcggcggcggcgggcgaggccatcaatcccacttactacgactgtcacttcgcgcccgaggtcggcggccgtcacgccgccgccgcagcagccctgcagctctatggcaacagcgccgccggcttcccgcacgcgcccccgcaggcgcacgcgcacccgcacccgtccccgccgccctccgggactgggtgcggcggtagggaaggccggggccaggagtacttccaccccggcgggggcagcccggccgctgcctaccaggccgccccccctcctcctccgcatcctccgcctccgccgccacctcccccctgcggcgggattgcctgtcacggggagcccgcgaagttttacggatacgataacttacagagacagccgatttttacgacccagcaagaggccgagctggtacaatatcctgactgtaaatcgtccagtggtaatattggcgaggacccagaccacttaaatcagagctcgtctccttctcaaatgtttccgtggatgagaccacaagcagctcctggtagacgaagaggaagacaaacctacagtcgcttccaaactctagagttggaaaaggaatttctttttaacccctatctgaccaggaaaagaagaatcgaggtttcccacgccctagccctcaccgagagacaggtaaaaatctggttccagaacaggagaatgaaatggaaaaaggaaaacaacaaggacaaatttcccgtttcccggcaggaggtgaaggacggggaaacgaaaaaggaagcccaagagctggaggaagacagagccgaaggcctgacaaattaacttctacctttaaaatttaccacagactattaaaactaataatcaccatatgctgtggacaccacctattttctttgttggaaaggaccttacctgtgtttcaagctaccttcatgtcactgctcttgaggttttctgtgctttgagagggatttgggtgtttaaaaaagtttctagtatcacatagaagctgtccttgagctgtcctatggaagggtaatttgatactgaccttgtagctatatttttataatggtttttaatgtctgagctagtgatttgcctcaacaacgtaaacttcctaatgattagcacttaataattgcatataaaatgctttattaattaaacaagtgcacttgaacattttaatatttgtggtgagtaa

SEQ ID NO: 425 - DNA, 1902 bp, Homo sapiens
cgcgaccaatggtggaggctgcagcctgcgaactagtcggtggctcgggcgccggcggggagctgctcggcggcggacagtgtaatgttgggtgggagtgcgggacgcctcaaaatgtcttccagtggcaccctcagcaactactacgtggactcgcttataggccatgagggcgacgaggtgttcgcggcgcgcttcgggccgccggggccaggcgcgcagggccggcctgcaggtgtggctgatggcccggccgccaccgccgccgagttcgcctcgtgtagttttgcccccagatcggccgtgttctctgcctcgtggtccgcggtgccctcccagcccccggcagcggcggcgatgagcggcctctaccacccgtacgttcccccgccgcccctggccgcctctgcctccgagcccggccgctacgtgcgctcctggatggagccgctgcccggcttcccgggcggtgcgggcggtggcggtggtggtggaggcggcggtccgggccgcggtcccagccctggccccagcggcccagccaacgggcgccactacgggattaagcctgaaacccgagcggccccggcccccgccacggccgcctccaccacctcctcctcctccacttccttatcctcctcctccaaacggactgagtgctccgtggcccgggagtcccaggggagcagcggccccgagttctcgtgcaactcgttcctgcaggagaaggcggcagcggcgacggggggaaccgggcctggggcagggatcggggccgcgactgggacgggcggctcgtcggagccctcagcttgcagcgaccacccgatcccaggctgttcgctgaaggaggaggagaagcagcattcgcagccgcagcagcagcaacttgacccaaacaaccccgccgcgaactggatccacgctcgctccacccggaaaaagcgctgtccctacaccaaataccagacgcttgagctggagaaagaattcctcttcaacatgtacctcacccgggaccggcgctacgaggtggccaggattctcaacctaacagagagacaggtcaaaatctggtttcagaaccgtaggatgaaaatgaaaaagatgagcaaggagaaatgccccaaaggagactgacccggcgcggtgctggcgggagcgctcaagggcagcggatttgttgttgttgctgttttcctttgtgggtgtttggtgcttgatttccagaaactctccagcgacttggacttcttcttctttttttttttctttttagatagaagtgactgtgtggttggtctctgaggtatttgggggactctgtatttgctcgtttacgtgttggaaaaaccaagtggctttggggtttcgccctatcccactccctctctttcctgctccattggttccttaagaaatgctatattttgtgagtgcaagctggcttggggagccctctcttgtgtaaatgtcccccatgtttctgaaaagtgctgtagtttagtcccctcacccccagcactgcccaaacaggggccaagtgcgccccaattccaagaatgaaggcagagcgacaacagtgcggacaccccggctgctagcccacggtgaagcccggcggggttgcccaccagttgcgaaagccccctttcctcagggagcacgcgggacctcggtggagatctccagtgaggcttagaggagcccagggcctcgggcgggttggggtttgtcctcagtgcattggacgcgctgctctctcccctgaaggctgggctcgcgtgggcggccgcgggtggtggccctcccggttcctgcccgaggaccagttgtaaatgttactgcttcctactaataaatgctgacctgatcaaatggaaaaaaaaaaaaaaaaaa

SEQ ID NO: 426 - DNA, 1440 bp, Homo sapiens
ggtgtctccgcgtcgctgggtgggacttggctcggcggccatgggcaagcagaacagcaagctgcggcccgagatgttgcaggacctgcgagagaacacagagttctcagagctggagctgcaggagtggtacaagggcttcctcaaggactgccccacaggaatcctcaatgtggatgagttcaagaagatctacgccaacttctttccctatggtgacgcctccaagtttgccgagcacgtcttccgcacctttgacaccaacagcgatggcaccatagactttcgggagttcatcattgcgctgagcgtgacctcgcgcggccgcctggagcagaagctcatgtgggccttcagcatgtatgacctggacggcaacggctacatcagccgggaggagatgctggagatcgtgcaggccatttacaagatggtttcgtccgtgatgaagatgccggaggacgagtcgaccccggaaaagaggactgagaaaatcttccgccaaatggacacaaacaacgacggcaagctgtccttggaggagttcatccgcggggccaaaagcgacccgtccatcgtgcgtctgctgcagtgcgaccccagcagcgcctcccagttctgagaggagccaggttccccttcctccctcccttcaccggccccctcccggctcttagcttccactcccttgtgtgtattctggctgggggccagattggggaagcccttctccccgggtctgccctgtggggggcttccggaaaagggaaccctgcggtacccccaggccaaagcaagtaagcggttagcaccccccaatcccagaggcaacaatagagacacaggctgggttggtctgcccctcagtcaggcccccttacccacccaccagccccaaggcccgacccctcccccaaaggggcagtccccttcttgcaggtctcagcttgcggggtggggggagtcatgcccaggggaggagactttttatctggaggggagagaaggattctaggggtgtggagttggagaaagaggcttccttgagccacccttcccaccccagcccttgctggtccctaggccaagccaccaagtgaaaccttccaggatactagcccgccagctgtgggccccagaaagccagcctgccttttagcacttggatacacacagacccacggagctctctgtgtttggcctctcacacacacacaggcccatagacagatgggcagatgcacccagagccccatgcacagtgtcctgcgtgggaaagagacacggtccccctggctgagcccctgtcctcccctctgtccccccaaccgccccccctgcatgcagccaaatggagcatctctgttctttttaataatttcagaataaagtctcatttcagtgcaaaaaaaaaaaaaaaaaaaaaaaaaaaaaaaaaaa

SEQ ID NO: 427 - DNA, 1769 bp, Homo sapiens
cggcggcggcgggcagcggacgggcggactgacgggcgcctccaccttgctccctccctggctgccggcttccttttgtctttctgggcggcgatgagcgcagggccggcgcagcagctgcgggcgcacggaggcccgcgctgctagtcactcctcccggcctcggcgcgcttgtcccgggcagcggcccgggcccgctgcagccgccgccggcgccgaacttgggctcgggaagccggcggaccgcgtcctgcgccggagcaggggcatggtctagtggcccagtcaggacgcggaaacactccctggaggttctgacccactccctctcagcctccgcctggtctctggtgtagtcgccgccgccagccgccatgggcaaacagaacagcaagctgcggcccgaggtgctgcaggacctgcgggagaacacggagttcaccgaccacgagctgcaggagtggtacaagggcttcctcaaggactgccccaccggccacctgaccgtggacgagttcaagaagatctacgccaacttcttcccctacggcgacgcttccaagttcgccgagcacgtcttccgcaccttcgacaccaacggcgacggcaccatcgacttccgggagttcatcattgcgctgagcgtgacctcgcggggcaagctggagcagaagctcaagtgggccttcagcatgtacgacctggacggcaacggctacatcagccgcagcgagatgctggagatcgtgcaggccatctacaagatggtgtcgtctgtgatgaagatgccggaggatgagtccaccccggagaagcgcacagacaagatcttcaggcagatggacaccaacaatgacggcaaactgtccttggaagaattcatcagaggtgccaagagcgacccctccatcgtccgcctgctgcagtgcgaccccagcagtgccagtcagttctgagcgagcggcccctggacagttgcagagaaacacaggcttgtcgtgccgtttaagctttgcttgcaagagtggatgccccgcaatcgttcctgctctcccgggccccgggcctggggcatgcgttgcacctgcccggcccggtggctgcgcctccctcctccacctgaccaacgcgacattcctcccctcacgcctggcccggtcccttccagggcaactcccagggatgtggtgacatgcagggttcaagtgttcttggttccaggcacctcccggctcacggggagctcagaggtccatgccgaggagaccaggcaggacctcccgaggctgcgccccggccggcccatgcgttttgtgatcccaagtgactctgtgggaagggtggggacgaggcgtcgggagggtatacagggagcccctcccgtgcatggctgcccccccgttcattttctccaccacagccgcttgcacgtatagatactgtggtcccctttcttttaatatataaattatgtatggtgaagtggagtgtattgtgtaggtcccgtatttaatgcctctgactgcctttgaagcgcagccctctgtggcccgcagccccctgagcctggctgttgtgtggtatttatgctctctttgtctgcctgtttctaaggaaatgcatgtgtgccctgagccgtgatgatcctcccatccgtgttgtgagcacaggcatttgtgtctggtctgtcctccctgttgattggtctggcatttccggtattaaaatgataaaataaatggcattttctgaaaaaaaaaaaaaaaaaa

SEQ ID NO: 428 - DNA, 6404 bp, Homo sapiens
gactaatggccctaactaagtattaacccctgccaagaaaagagctacttcctcttgaagtaaatgaagatagtgatgctttctcttaaactttacttataaaaagcatcaaaggggggaatgaagcaggaaatataaaaggaaaaacaagtaaagggaaaacaagtcctttcctgaccagtctgactcactccaaagtcctgctggagctatgataattatctgcaaggccaggcaggggctccgaaggagtgggctccaggagcagggatgagaaaaacaagttctccttatcagtttccctgtttgaaattctctccccataacattattctttgttctgctctcacaactatttttgtaactatttctgcaagtctgtaaagattttgtaagttcttgtttttctttctgtagcatggcaaggtcacaagacatgtttaagtaaggtaggctcatgttgcaaatcctgttgtaaaacctgtcacggtatgattaactgcctttgttctgcttctgtaagactgctttctcacctcgcaggttttgcgccaaaaacccgacttgcccctgcctgatgcatgtataaaagtcaagccctgtctttgttcagggctcagcctttggatgttaatccgctgggccagtggccacctaaataaaaccttcctgttgcacccagtgatctctccggcctcctgattcccacaacatataagcattcctttttctctgcaacctagcccgcatctgtcattgactttttaacaataggcattctgactggatgagatggtatctcactgtggtttttctctgcatttttctaataattaacaacgtgaattttgttttcatatgcttgtcagccacatgtatgtcttcttttgaaaagtatctgttcatgtttttgcttactttttaattaggtttttggttttctttttgttgttgttgttgttttctgagatggagtcttgctgtgtcaccaggatggagtgcagtggcatgatctcgactcactgcaacctccacctcccaggttcagatgattcttctgcttcagtctcctgagtagctgggatcacagggaccattgacatttatggatgtggccatagaattctctttggaggagtggcaatgcctggacactgcacagcagaatttatataggcatgtgatgtgagagaactacagaaacctggttttcttgggtgaaggtattgctgtctctaagccagacctgattacctgtctggagcaaggaaaagagccctggaatatgaagagacatgagatggtagctaaacatttagttatgttttattattttgcccaacacctttggccagagcagaacataagagattctttccagaaagtgaccctaagaagatatagaaaatgtggatatgagaatttacagttaagaaaaggctgtaaaagtgtggttgagtgtaaacagcacaaaggagattatagtggacttaaccaatgtttgaaaactaccttgagcaaaatatttcaatgtaataaatatgtagaagttttccataaaatttcaaattcaaatagacacaagatgagacatactgaaaataaacattttaaatgtaaagaatgtcgcaaaacattttgcatgctttcacacctaactcaacataaaagaatccaaactagagtgaatttctacaaatgtgaagcatatggaagagcctttaactggtcctcaacccttaataaacataagagaattcatactggagaaaaaccttacaaatgtaaagaatgtggcaaagcctttaaccagacctcacaccttattagacataagagaattcatactgaagagaaaccctacaaatgtgaagaatgtggcaaagcctttaaccagtcatcgacccttactacacataatataattcatactggggaaattccctacaaatgtgagaaatgtgttagagcttttaaccaagcctcaaagcttactgaacataagttaattcataccggagagaaacgttatgaatgtgaagaatgcggcaaagcttttaaccgatcctcaaaacttactgaacataagtacattcatactggagagaagctgtacaaatgtgaagaatgtggtaaagcctttaaccagtcctcaacccttactacacataagagaattcatagtggagagaagccctacaaatgtgaagaatgtggcaaagcttttaaacaattttcaaatcttactgaccataaaaaaattcatactggagagaaaccctacaaatgtgaggaatgtggcaaagcttttaaccaactctcaaaccttactagacataaggtaattcatactggagagaaaccctacaaatgtggagaatgtggcaaagcctttaaccagtcctcagcccttaatacacataagataatccatactggagagaatccccacaaatgtagagaatctggcaaagttttccacctatcctcaaaacttagtacatgtaagaaaattcatactggagagaaactctacaaatgtgaagaatgtggcaaagcctttaaccgatcttcaacccttattggacataagagaattcatactggagagaaaccctacaaatgtgaagaatgtggcaaagcttttaaccaatcttcaacacttactacacataagataattcatactgaagagaaacagtacaaatgtgatgaatgtggcaaagcttctacctgatcctcaaaactcattgaacacaagaaaattcatactggagagaaaccttacaagtgtgaagaatgtggcaaaacttctaaccatttctcaacccttactaaacataagatgattcatactggagagaagttacacaaatgtgatgaatgtgacaaagcttttaaccaatcttcaaccctttctacacataaaagaattcatactggagagaaaccctacaaatgtgaagaatgtggcagagcttttaattgatcatcaaaccttattaaacataagaaaattcatattggagagaaaccctacaaatgtgaagaatgtggaaaagcttttaaccagttctcaactcttactacacataaaataattcatactggagagaaaccatataaatgtgaagaatgtggcaaagctttcaacctatacgtaaaccttactacacataagaaaattcatactggagagaaaccctacaagtgtgaagaatgtggcaaagcttttagccaagtgtcaactcttactatacataaaagaattcatactggagagaaaccctacaagtgtgaagaatgtggcaaagcttttaaccaagtgtcaactcttactatacataaaagaattcatactggagagaaaccttacaaatgtgaggaatgtggcaaaactttcagtcgatgctcaaaacttactacacataagaaaattcatacaggagagaaaccttacaaatgtgaaaaatgtgctaaagcttttagccagtcttcaaccctttctacatataagataattcacactggagagaaatgctacaaatgtgaagaatgtggcaaagtttttaaccgatcttcaaaccttacagaccataaaaaaattcatacaggagagaaatcctacaaatgtgaagaatgtgacaaggcctttaacctgtcctcaacgcttactaaacataaggtaattcatactggagagaaactgtacaaatgtaaagaatgtggtaaagcttttaaacagttctcacaccttgctatacataatataattcatactggagagaaactctacaaatgtgaagaatgtggcaaagcttttaacttatcctcaaaccttactgcacataagaaaaatcgtactggagagaaaccctacaaatgtgaagaatgtggcaaagctaacctatcatcaacccttactccacataagacaattcatatttgagagaaaccctgcaaatgtgaagaatgtggcaatgcttgtaactaaatctcaaactttactaaacataagaaaattaatactggaaactttacaaacctgaaagatgtgacaatgattttgacaacaccttcaaacttttctaaacataaaataaatcatactggtgagaaatcttaaaaatatgaagaatggtacaaagcctttaaatggttgtcacacttgattgtaggtaagataatttatactggaggaaactcccagaagtgtgaagaatgtggcaaaacttttaatttttcacaccttatagcacaggaaagcacttcagaaaaattgtacaaatataaatgtggaaaagccattaatatctgcttacatcttactcaacattagagagttagtgcttaataaaagcattataaaagcaattagtgtaaaatcagaaaatgaaagttttttttttttttttagatggagtcttgctctgtcacccaggctggagtgcagtggtgtgatcttggctcactgcaacctctgcctcccaggttcaagcaattctcctgccttagcctccagagtagctgagactacaggcacacaccaccacatttggctaatttttttatttttagtagagactggctatcaccatgttggccaggctgatcttgaactcctgacctcaagtgatccacatgcctctgcctcccaaagtgctgggattataggtgtgagtcactgtgcctgacaaatataagcctttaaagagaagaaggttttcattttgaagacaaacattaggtacataaagagggttgtagtgtctttatttgtatcacagattttattgtacacattatgtactaaaggaaaatcctgaagcagtgctcaaactttgatcaacatcagggagtttatattggagaaaaactgcaaatgtaatatatttggaaaaacatttttcaaaaactactgcttagaaaacaccaggggatttatactaaaatatatttttgcagatgcagtaagtataaaagaaatttaatccaaaattaagtgtgtgtaaatatcagagaattcacagtagaaatatctaaggcactgacattttagacattgaactaatcagtgtgctgagtacagaaaataatccaaaattaaagttggtagataaattatttatatataactttaaaagaggtagaaatatttttagttataattacatttaaagtatacttttttctttgaaaaaattacaaaatttttaaaaagtgaatgatgtaattcaactcaaattacttcatgcttttcattctattgtattcacatgtgaaagcatgtgatcaattgctgcttcatcaaagatatgagacattcttttttgttaggtgggcaatattttttaccttttctatggaagagtaaagacattacaatgtaggatgcatgataaaaatctaagtggagaggctctttgtgtttaatttataatattgaatgatgtatgagggaagtgttcagaggaatattctgcattctagtgaaaatatcttttattttagttaaaattaaattaaaattagtagtatatcattttactaactgtacttttatgtaataaaatgcagcacatttaaaaaattttagattattgtgaacttaattttttaattaaactttttttttaacatgttaagaccaattgtgcattcagtgaagtattatcatgccactaacttcaacctatcccaccttactcaagggtgttggtaaaagatagtaacaatgtactatttaataacagagtggactaacatctctaataatttctcttgccagtgactttaaactaaagaacttaattaaagaacattgttcccataggttaaatttttattctttttcttatttaaacatatttttcttaacttttgtgggtacatagtgtgtgtatatatttatgccatatatggcatattttgatacaggcatatgaataggtattaatcacatcagggcaaatgaaatatccatcaactccagcatttatcatttgtattacaaaccgattctacacttttagttactttaaaatgtacaagtaaattgctattgactatagggtcattttcatgggtataataaaaattatatacaagtataaataaaatcctgagtcttaaaattctgagtcctgcttaaacattttaaaaattttgttatgtatttttctttgaacatgtctctctgcctgcaaacataacagaattttagtattggtttacatagagttaactatacccatatattactctaaaaataaatgttaagtgcaagaaagttatggactgtttttgtgtgagtgtgagtttgtacctattttcaaaagaaaagagcaatattggagcaaaacaaatattttaataaagtaatgtactagacaactgaaaacttc

SEQ ID NO: 429 - DNA, 5709 bp, Homo sapiens
tctcccgggagccactcccctgggcgcctctccagcccctgggctggaagcaccagcaaccctggggatggggcagaccctcacagcccggggtctggagccggtgtcggagctcacatgggcccatgacctctccagacatttggcaaaatcaaggcccttagaccagggacagacccaagcccaggccctcccagaggtcataggacgcaaccctttgtgcccttgggctatggaagaggtttgggaacggctttggggtggaagatggccaaaggagcagcttggccaggtgaggatgaggcagggcagacacaggccagtggggcgtgccatgtgccacagatggagaggaccaggagccagtggcccggcaggcacagcccggttggcgtgggccagagcgcccatcactgacccgtgagaactcgactgcccctgccagctctggcactgccccctcccagccgccccgccctagcaccctggggggcaccccgcccaaccgtggcctggtccggcccctcccgccctttgctccagttcccgggcttggcacctatagtgggggtgccgcccgcctgccaggctccggggccgggcccacgggagggtggggcggctgggaagctggcacgctgccccgggggagcctctgtcggcaggcgcccgggtgccgcgggggggagggggaacaaagggctcattctccccgtgcgcagccggtggcatcgccggggcgttggcggaagcccccggggcccgggagggggccggcccaggcgcggccgccgaatcacgggctcctgtttcccgcagggtgctggaggaggaaaccggcggagcagcttccccactctcagttgcgcgtctggcgatggcgatcagaggtcgtgctgcgctctccgccgcgctctacctccattagccgcgctgcgcggtgctgcgccctcgccggtgcctctctcctgggtcccaggatcggcccccaccatccaggcacgacccccttccccggcccctcggcctttcccccaactcggccatctccgacccggggcgcgtgttccccccggcccggcgccttctctccctccgggggcacccgctccctagccccggcccggccctccccgcggcgcagcacggagtctcggcgtcccatggcgcaacctacggcctcggcccagaagctggtgcggccgatccgcgccgtgtgccgcatcctgcagatcccggagtccgacccctccaacctgcggccctagagcgcccccgccgccccgggggaaggagagcgcgagcgcgctgagcagacagagcgggagaacgcgtcctcgcccgccggccgggaggccccggagctggcccatggggagcaggcgcccggtgccggccacgacgaccgccaccgcccgcgccgcgaccggccggtgaagcccagggacccccctctgggagagccccatgagggcaggagagtgatggagagtacgcccagcttcctgaagggcaccccaacctgggagaagacggccccagagaacggcatcgtgagacaggagcccggcagcccgcctcgagatggactgcaccatgggccgctgtgcctgggagagcctgctcccttttggaggggcgtcctgagcaccccagactcctggcttccccctggcttcccccagggccccaaggacatgctcccacttgtggagggcgagggcccccagaatggggagaggaaggtcaactggctgggcagcaaagagggactgcgctggaaggaggccatgcttacccatccgctggcattctgcgggccagcgtgcccacctcgctgtggccccctgatgcctgagcatagtggtggccatctcaagagtgaccctgtggccttccggccctggcactgccctttccttctggagaccaagatcctggagcgagctcccttctgggtgcccacctgcttgccaccctacctagtgtctggcctgcccccagagcatccatgtgactggcccctgaccccgcacccctgggtatactccgggggccagcccaaagtgccctctgccttcagcttaggcagcaagggcttttactacaaggatccgagcattcccaggttggcaaaggagcccttggcagctgcggaacctgggttgtttggcttaaactctggtgggcacctgcagagagccggggaggccgaacgcccttcactgcaccagagggatggagagatgggagctggccggcagcagaatccttgcccgctcttcctggggcagccagacactgtgccctggacctcctggcccgcttgtcccccaggccttgttcatactcttggcaacgtctgggctgggccaggcgatgggaaccttgggtaccagctggggccaccagcaacaccaaggtgcccctctcctgagccgcctgtcacccagcggggctgctgttcatcctacccacccactaaaggtggggatcttggcccttgtgggaagtgccaggagggcctggaggggggtgccagtggagccagcgaacccagcgaggaagtgaacaaggcctctggccccagggcctgtccccccagccaccacaccaagctgaagaagacatggctcacacggcactcggagcagtttgaatgtccacgcggctgccctgaggtcgaggagaggccggttgctcggctccgggccctcaaaagggcaggcagccccgaggtccagggagcaatgggcagtccagcccccaagcggccaccggaccctttcccaggcactgcagaacagggggctgggggttggcaggaggtgcgggacacatcgatagggaacaaggatgtggactcgggacagcatgatgagcagaaaggaccccaagatggccaggccagtctccaggacccgggacttcaggacataccatgcctggctctccctgcaaaactggctcaatgccaaagttgtgcccaggcagctggagagggaggagggcacgcctgccactctcagcaagtgcggagatcgcctctgggaggggagctgcagcaggaggaagacacagccaccaactccagctctgaggaaggcccagggtccggccctgacagccggctcagcacaggcctcgccaagcacctgctcagtggtttgggggaccgactgtgccgcctgctgcggagggagcgggaggccctggcttgggcccagcgggaaggccaagggccagccgtgacagaggacagcccaggcattccacgctgctgcagccgttgccaccatggactcttcaacacccactggcgatgtccccgctgcagccaccggctgtgtgtggcctgtggtcgtgtggcaggcactgggcgggccagggagaaagcaggctttcaggagcagtccgcggaggagtgcacgcaggaggccgggcacgctgcctgttccctgatgctgacccagtttgtctccagccaggctttggcagagctgagcactgcaatgcaccaggtctgggtcaagtttgatatccgggggcactgcccctgccaagctgatgcccgggtatgggcccccggggatgcaggccagcagaaggaatcaacacagaaaacgcccccaactccacaaccttcctgcaatggcgacacccacaggaccaagagcatcaaagaggagacccccgattccgctgagaccccagcagaggaccgtgctggccgagggcccctgccttgtccttctctctgcgaactgctggcttctaccgcggtcaaactctgcttgggccatgagcgaatacacatggccttcgcccccgtcactccggccctgcccagtgatgaccgcatcaccaacatcctggacagcattatcgcacaggtggtggaacggaagatccaggagaaagccctggggccggggcttcgagctggcccgggtctgcgcaagggcctgggcctgcccctctctccagtgcggccccggctgcctcccccaggggctttgctgtggctgcaggagccccagccttgccctcggcgtggcttccacctcttccaggagcactggaggcagggccagcctgtgttggtgtcagggatccaaaggacattgcagggcaacctgtgggggacagaagctcttggggcacttggaggccaggtgcaggcgctgagccccctcggacctccccagcccagcagcctgggcagcacaacattctgggagggcttctcctggcctgagcttcgcccaaagtcagacgagggctctgtcctcctgctgcaccgagctttgggggatgaggacaccagcagggtggagaacctagctgccagtctgccacttccggagtactgcgccctccatggaaaactcaacctggcttcctacctcccaccgggccttgccctgcgtccactggagccccagctctgggcagcctatggtgtgagcccgcaccggggacacctggggaccaagaacctctgtgtggaggtggccgacctggtcagcatcctggtgcatgccgacacaccactgcctgcctggcaccgggcacagaaagacttcctttcaggcctggacggggaggggctctggtctccgggcagccaggtcagcactgtgtggcacgtgttccgggcacaggacgcccagcgcatccgccgctttctccagatggtgtgcccggccggggcaggcgccctggagcctggcgccccaggcagctgctacctggatgcagggctgcggcggcgcctgcgggaggagtggggcgtgagctgctggaccctgctccaggcccccggagaggccgtgctggtgcctgcaggggctccccaccaggtgcagggcctggtgagcacagtcagcgtcactcagcacttcctctcccctgagacctctgccctctctgctcagctctgccaccagggacccagccttccccctgactgccacctgctttatgcccagatggactgggctgtgttccaagcagtgaaggtggccgtggggacattacaggaggccaaatagagggatgctaggtgtctgggatcggggtggggacaggtagaccaggtgctcagcccaggcacaacttcagcaggggatggcgctaggggacttggggatttctggtcaaccccacaagcaccactctgggcacaagcagggcactctgttcccctcccccttaagccaacaaccacagtgccaccaagctcacacctgtccttctcaggctggcatctcccccaccctgtgccccttttcatggtaccaggcccgcactgggggcaattgacttcctccaatccccactcctccgagacccaggagacaaacagcccttccttggggaaacttgggaatcattctggcttaaacaacacctcctcctgctgctcactcccgctgagcccactctactgccccagctccgtttctaccaccgcatcctcactgggctcactgcaggcatgctgaacaaggggcctccaaccttctgccctcctgccaaaagatctggggagtgtgaggagagggtggcatcaggagctgctcaggcttggcggagggagcggcatgggcgatgtcactcatgcccttcccggtccgcccgcttccctccttcatgatttccattaaagtctgttgttttgaaaaaaaaaaaaaaaaaaaaaaaaaa

SEQ ID NO: 430 - DNA, 4753 bp, Homo sapiens
ttttatgggcggatggaaggggccggggcagcgtcggggaaaggaagggccggaggcgcggcggcgggcggccgagaggggcggcggcggcggcggcggcggggttcccgcgccgcggagcccggcccgagagccgcgtccacgttcctgcctcctgctcccgccgccctggggcgccgccatgacgcccgatctgctcaacttcaagaagggatggatgtcgatcttggacgagcctggagagcctccctccccctcgctcaccaccacctctacttcgcagtggaagaaacattggtttgtgctgacagattcaagtctcaaatattacagagactccactgctgaggaggcagatgagctggatggtgagatcgacctgcgttcctgcacggatgtcactgagtacgcggtgcagcgcaactatggcttccagatccacaccaaggatgctgtctataccttgtcggccatgacctcaggcatccggcggaactggatcgaggctctgagaaagaccgtacgtccaacttcagccccagatgtcaccaagctctcggactctaacaaggagaacgcgctgcacagctacagcacccagaagggccccctgaaggcaggggagcagcgggcgggctctgaggtcatcagccggggtggccctcggaaggcggacgggcagcgtcaggccttggactacgtggagctctcgccgctgacccaggcttccccgcagcgggcccgcaccccagcccgcactcctgaccgcctggccaagcaggaggagctggagcgggacctggcccagcgctccgaggagcggcgcaagtggtttgaggccacagacagcaggaccccagaggtgcctgctggtgaggggccgcgccggggcctgggtgcccccctgactgaggaccagcaaaaccggcttagtgaggagatcgagaagaagtggcaggagctggagaagctgcccctgcgggagaataagcgggtgcccctcactgccctgctcaaccaaagccgcggagagcgccgagggcccccaagtgacggccacgaggcactggagaaggaggttcaggctcttcgggcccagctggaggcgtggcgtctccaaggggaggctcctcagagtgcactgagatcccaggaggatggccacatccccccgggctacatctcacaggaggcatgtgagcgcagcctggcagagatggagtcctcgcaccagcaggtgatggaggagctgcagcggcaccacgagcgggagctgcagcgcctgcagcaggagaaggagtggctcctggctgaggagacggcagccacggcctcagccattgaagccatgaagaaggcctaccaggaagagctgagccgagagctgagcaaaacacggagtctccagcagggcccggatggcctccggaagcagcaccagtcagatgtggaggcactgaagcgagagctgcaggtgctatcggagcagtactcgcagaagtgcctggagattggggcactcatgcggcaggctgaggagcgcgagcacacgctgcgccgctgccagcaggagggccaggagctgctgcgccacaaccaggagctgcatggccgcctgtcagaggagatagaccagctgcgcggcttcattgcctcgcagggcatgggcaatggctgcgggcgcagcaacgagcggagttcctgcgagctagaggtgctgcttcgcgtaaaagaaaacgaactccagtacctaaagaaggaggtgcagtgcctccgggacgagctccagatgatgcagaaggacaagcgcttcacctcgggaaagtaccaggacgtctatgtggagctgagccacatcaagacacggtctgagcgggagatcgagcagctgaaggagcacctgcgtcttgccatggccgccctccaggagaaggagtcgatgcgcaacagcctggctgagtagaggtcccgcccagctgcagaccctccaggctggaggaccagccgccctccttccctcctggatggaagtaaaaagccaagctttctccccaccctctgtgggccacacgtgcacttgcacccaccacacacacacacacacacacacacacacacacagacacacagacacatacgcacacacgtgcacacatgtacacacggatacacacacacacacacacactgcatatctgagcgcgcccctcgcactgggtctcaccttgcaccttcttcaggattttatatgtgaagagatttttatatagatttttttcctttttttccaaaacactttatactttaaaaaaaaaaaaaaaaagcaattcctggtggctgtgtgcctccaaccctggtccccctctgtctccagccaccctctgcttgggcttctgagctggtggccctggcccagaggtctggcggaggcccaggcagcagccatggcggggtgtctctacaggggagaggcgggagcctgccaccctcttcctgccctacctcctactaacacttcctgccccatttggacccgtaccatggggctcaggacagagggagctagcagctggcctccatggccccacagcctccttcgaggctgtgctgggtgcagaaccgccagagccacccaaaaggtgtttctcttctgctccctgaacctcttaacttaataaaacgttccagcagctctggtgtcctagatggctggcagaacaggaatggagattggggtttcttgaagtggcttccccactcacaccctacccacaccccacccttcctaaagcagcggcctctaggcttctgagggtggggctgaaaatccaaggtctcccttagtacagactgtgacgcccccagtgtggcttgcaggctagtggcagcggaagcatgtgggaaatagcaagtccagtcccaccccaacctactgaaccagcgtctgcattttaacagggtgccccagtgattcacgtgaccttcaaagtctgaggagccctggagtagggcccagggcccaggcctgagagagaggcctggggctaagactagccctgaccatgaccttgggcaagtcacacccctcactgagcctcagtttgcttctccatcaaatgggtgtttttctttcagtcccagtcctctcctgaggcttttcccagaggtcatgcccagccctgggcaggggtgagggcagggttgtggctgccaggcacaggtccagcgggctgggagtcctcaccatggctggctgtgctgattatggttgcatggggctgggaagaggtcccatttctgagccacagaaacaggccacatccagtaggggtcctggaaggctgtgagaacccagaggagaccctgacccagcctgcaggtagaagactgcctttggaggcagctttgaaagatgactcttccagatggaagaatcaggaagggccttcccacgtggaggcaccagcaggagcaaacgtccctggtgtgttcaggcaaagagccacaggagagtgacctcgtggagtgggaagagattgtttcccattcccttgccagggattggttgaggaatggacaaggcttgcagttcacgcaagccagtgaaatgcgaggggaagtcttgggagtggggtggaggaggtcatctgggaagggtgtccttggtcttaaaaagaggcacaagaggccgggcgcggtggctcttgcctattatcctagcactttgggaggccaaggcagggggatcacttgaggtcaggagttcgagaccagcctggccaacatggtgaaaccccgtctctactaaaaatacaaaaaattagccagacgtggtgccaagcacctgtaatcccagctactcaggaggctgaggcaggagaatcacttgaacccaggaggcagaagttgcagtgagccaagatcgcgccactgcactccagcctgtgtgacaagggcgaaactccatctcaaaaaaaaagggggagggtggcgcaaggagaggacacctctctcctggccctgtcgccatcttccctcatcaatagctaaaaatggcaaagaagaaagagccaggaccccgtgccatcaaatcctccggccttgtgctgccctgtctcggcactgcttgccttaggagatcaggagtgttcctagccactgggagatgggatgcctgccactggcagctctgccgtccatcctcaccatcccaccgtccccccaagacagctctccatcccatcctctgcctcccttctagcctcaacctaactcagggctcccccgtctcacacctgggttgcaggaacatcctcttcaccaacccccctcccatccctcctcagggctgcctagggcagctacaaaaaccaggccagcctctgaaaggtgctccacatctcattaaaaaccgtgaaatcgcactgccccactatcagaatagctcagaggagaaggtctgccagtaccaagtgctggtggggatacggagaagagcagctcccaggcgctgctggtgcaaatgtgctttgttgcacccacggcaggaaactgaccagcttctcatcaagttaaatacgcatctaccctatggcctagcatttccactcttgcttacacatccaggagaaatgagtccttacatgcacaaaaggatgagtaccgtaatactcacatcagcaaataaacaatacagctgtgtgtcagtagtagaatgaataaattgtggtcgattcataaaaaaaaaaaaaaa

SEQ ID NO: 431 - DNA, 1471 bp, Homo sapiens
atcacacaggatccggagctggtgctgataacagcggaatcccccgtctacctctctccttggtcctggaacagcgctactgatcaccaagtagccacaaaatataataaaccctcagcacttgctcagtagttttgtgaaagtctcaagtaaaagagacacaaacaaaaaattctttttcgtgaagaactccaaaaataaaattctctagagataaaaaaaaaaaaaaaaggaaaatgccagctgatataatggagaaaaattcctcgtccccggtggctgctaccccagccagtgtcaacacgacaccggataaaccaaagacagcatctgagcacagaaagtcatcaaagcctattatggagaaaagacgaagagcaagaataaatgaaagtctgagccagctgaaaacactgattttggatgctctgaagaaagatagctcgcggcattccaagctggagaaggcggacattctggaaatgacagtgaagcacctccggaacctgcagcgggcgcagatgacggctgcgctgagcacagacccaagtgtgctggggaagtaccgagccggcttcagcgagtgcatgaacgaggtgacccgcttcctgtccacgtgcgagggcgttaataccgaggtgcgcactcggctgctcggccacctggccaactgcatgacccagatcaatgccatgacctaccccgggcagccgcaccccgccttgcaggcgccgccaccgcccccaccgggacccggcggcccccagcacgcgccgttcgcgccgccgccgccactcgtgcccatccccgggggcgcggcgccccctcccggcggcgccccctgcaagctgggcagccaggctggagaggcggctaaggtgtttggaggcttccaggtggtaccggctcccgatggccagtttgctttcctcattcccaacggggccttcgcgcacagcggccctgtcatccccgtctacaccagcaacagcggcacctccgtgggccccaacgcagtgtcaccttccagcggcccctcgcttacggcggactccatgtggaggccgtggcggaactgagggggctcaggccacccctcctcctaaactccccaacccacctctcttccctccggactctaaacaggaacttgaatactgggagagaagaggacttttttgattaagtggttactttgtgtttttttaatttctaagaagttactttttgtagagagagctgtattaagtgactgaccatgcactatatttgtatatattttatatgttcatattggattgcgcctttgtattataaaagctcagatgacatttcgttttttacacgagatttcttttttatgtgatgccaaagatgtttgaaaatgctcttaaaatatcttcctttggggaagtttatttgagaaaatataataaaagaaaaaagtaaaggcaaaaaaaaaaaaaaaaaa

SEQ ID NO: 432 - DNA, 1070 bp, Homo sapiens
aaagacaggtgactagaaatattaaaacaaaaacaaaaaaaaagagagagagagaaaaaggaaagagaaaatacatatttcttccccttactaagctagcgaaaataaaatttaaggcaactgaaatatgcacccaatcaatgtgagacgagaccccagcatccctatctatggactccgacagtccatcttattaaataccaggcttcaggactgctatgtggactcaccggctctcaccaacatctggatggccagaacatgtgcaaagcagaacattaatgccccagcaccagctaccacttcctcttgggaagttgtaaggaacccattaattgccagttccttctccctggttaagcttgtactcaggcggcaactgaagaataagtgctgcccaccaccatgcaagtttggagaaggaaaactctcgaagagattaaagcacaaggacgattcagtgatgaaagccacccagcaggccaggaaaagaaacttcatcagttccaagagcaagcagccagcagggcataggaggcctgcaggaggcatcagagagagtaaagaaagttcaaaggagaaaaaactaacagtccgccaagatcttgaggacagatatgctgaacatgtggctgccacccaagcgctaccccaggacagtgggacagcagcctggaagggccgagtgttgcttcctgaaacccaaaagagacagcagttgtcggaggacacgctaaccatccatggtctccccacagagggttaccaggctctgtaccacgctgtggtggagccaatgctgtggaatccttcagggacccccaagaggtacagcctggagctgggcaaggccattaaacaaaagctctgggaggctctttgcagtcagggtgccatctctgaaggtgctcagagggaccggttccctggcaggaagcagccaggtgtccacgaggagcctgtactcaagaaatggcccaagttaaagagcaaaaaataggaacaagaactcatgggattagagtattctctgctagagatctgaaaaataaacacaactttgcaccttc

SEQ ID NO: 433 - DNA, 6025 bp, Homo sapiens
gtagaggcggaagttgaggggactgacgcagatgggggaattttgcctcgatggcactttcctgtccgcgactccgcccccaccagaggggctaggctctgggattcaagatggaggcgctgagtcgagctgggcaggagatgagcctagcggccctgaagcaacacgacccctatatcaccagcatcgcagacctcacgggccaggtcgctctgtacaccttctgccccaaggccaaccagtgggagaagactgatatagaagggaccttattcgtatatcgaaggtcagcttccccttaccatggttttaccattgtgaatcgactaaatatgcacaatctagttgaaccagtgaataaagatttggaatttcagctccatgaaccatttcttctgtatagaaatgcaagcttgtcgatatatagtatctggttttatgacaagaatgactgtcaccgcatagcaaaactcatggctgatgtggtagaagaggagacacggcgatcccagcaagctgctcgggacaaacagagtcccagccaggccaatggctgcagcgaccacaggcccatcgacatcctggagatgctgagcagagccaaggatgagtatgagaggaatcagatgggtgactcaaatatctccagccctgggttacagccaagcactcagctctccaatctgggaagcaccgagactctagaagaaatgccctccgggtcacaggataagtctgctccatctggacacaagcatctgacggtagaagagttatttggaacctctttgccaaaggaacaaccagcagttgtgggtctggattcagaagaaatggagaggttgccaggagatgcctcccagaaagagcccaattcattcctaccatttccctttgagcagttaggaggagcccctcaatcagaaaccctgggtgtcccttctgctgcccaccattcagtccagcctgaaatcaccaccccggtgctaatcactccagcctccatcacacagtccaatgaaaagcatgctccaacctacacaatcccgttgagccctgttctcagtcccactctgccagctgaagctcctactgcacaggttccccccagcttacctcgaaacagcaccatgatgcaggcagtgaagaccacgcctagacagaggtctccactcctgaaccagccagtccctgagctaagccatgccagtctgattgccaaccagagccccttcagggccccattgaacgtgacgaacacagctggcacatccctcccaagcgttgatcttctccagaaactcaggttgaccccacagcatgaccaaatacagacacaaccacttgggaaaggtgcaatggtagccagcttttctccggcagctggtcagctagccacacctgagagcttcatagagcctccctctaagacagcagcagcaagagtggcggcctcagcctccctgagcaacatggtgcttgctccccttcagtctatgcagcagaaccaggatcctgaagtatttgtgcagcctaaggtgttatccagtgccatcccggttgcaggcgccccactggttactgcaacgaccactgcagtgtcttcagtcctgctggccccaagtgttttccagcagacagttacaagatcttcggaccttgagaggaaagccagctccccttctcctctaactattggaacgccagaaagtcagagaaagccttccattattctcagcaagtctcagctccaggatacattaatacatctaataaagaatgattccagcttcctcagtacacttcatgaagtctacttgcaggttctgaccaagaacaaagacaaccacaacctatgactggagcagaataagtctaaaggcagagccccagcctcagagacaaataggcttcatcatggaaacttctgagcagaacattgagtttgagaatcctgaaattgagcctatgagaaagagactcatttcttaagaatgttttccaagtgacattctcagtgataatggaggtttcactgtgaagcatcaccagcagatccttgttttgacaaaaaaaaaaaaaaaaaaaaaaaaaaagagagcgatcattgtgttaagttatgtgggtgttttcatcagctaggagcaaggctgtggaataaggagtcagattctcagcttgctttcactttcaaggacttacagaggagtagtcaccagcctcacagcagaagttcagcccggcccccaccgcttcccccagcctaccccatagaaacgggctttgggctgacaagtcaagttttgaacagagtagaaggcagctctgcaaagtagcttctagtttttaggaccagaatttaagccggcaaattaggaattatttcctcaagtgaagtatattttatatgaatgccccatttgggccttaaaagttgtgaaatttcttaatagcattttgtttttaagtgccccagtcctgccctgcagcaggcccccagtgcagcattaccatttgaatagggcactgtcaggctctggtggtgtggacacaggcatgtcatacctttgaaggaaaggctggggctgggaatgcccacatcctatcaaatcttcattttaggttaaactctccattggttctgaaaatgctaagtttgtgtgtgaagcacagccttattttccttttctgtcattgttgattgttttccttaacactttgacaaaaggaccagtggaccaatctgacaaagccattctggttcctttccttgagtgtactgagaatagttttaaagctatgcagaaaagggagctgttattcacactgcccttattttgttgtagaattatggagttaaaagaaaatgtgattccgaactctaccaatgtattcctaggctgtgagtactttcccggcccaaagtgtgaaaatatgtaaagaagctttgttatgctgctattgatctgccatgatttctatttattcttttatggcatgtaatggtgtttagtaatattttaatgtagattttgatttatttcagcaatagtaattttaagatattctttgaatgaaagtgtcttcgtttctatgatacaggtcattttgtagtatttaaccaattaagatgcactgcttacttttctgagcactatttaatgatggggtaaaaacccaattggctcaaccagctagcataaggattagctgtgaataatgctgacagatatgatggttccttaggaacaatcatttaagctttaatggtaactcaatcataagtccatagattatttttttctagctaaaattttagaaaattacttgtgaattacatacttgttttagtttggtcttagtttttagcataaagaatgattggcttttgttgatctaaacatgcttcctggacagggtttctgcttctcattttagtgtcttctattgctgtctacctaattatgtgtgaattgtgcagaattcagggaagcttataagttttcatgctcaattgtgaatagtttgttttcacagatagtatgtaaattaagcaaccaaaaatgaattccttatgcatcatctgggaacgagaaagctatagtgggatacagagtgttgctgacaccgggagatggtgtccagggagccacgtgacttccataaagtggacgcaccagtaggtgtgattgcacctcaagtgtagtctcagtgggcttcggtgaacagacgaatcaagggattcttgaatcgaaattatgcttttgagtatgtaatattatgagagagttaagagagaatatcctaaagagagtctgtgatcatactaattttcacctttaatgctaggaatggatatgatagacagtaaagagcatctatgataaggcttccttagtgtgaaagtaaacttaagtgcccaagtcatggagacttgaaaagggtaaacctgtttcacctcccaaatttatatattcaaagtatttacttaaaattcagaagccagaagttcatgtcatgattaccaggaagttcaggccagaatgaatccctagagaagccaggccaagcctggataattgcagctggatgaccctggcccgaaagtcacagttcagttgccttattcctagttcaggcttactatctagaacctcatgctagcttaggttgcatgtttacattgctgcagtgtctttactggaagcttagttggatcgaaatggacaccgagatggagatgcttctggctagatttcgcagaaccccaggagacctgcatttagaccactctgtccatttgtgtgcccacccccacccccagggtctaagtgtagactccaagaggagcagcccagagcttggaggagaggtgtgtctggggcaccactggtgggtggtgctgctcttctttttgttgtagttaatgcggtgtcttttaatggactctcaggcctcccagacagccttgttcctttaaggcagaagctcttcttcattgtgtacctcctgggattcatgaggtgtgagatttggcctgcttgactttgaattcaagtttttcaagtgactctcagtgtcagaagaagcatttcatgctgtccacatgtggtatgtccacagctcaccttcaaaggcttagatgtagccatcacagagagtggtattttattaagaacccaagtcccagcctgaccaacatggtgaaaccccatctctactaaaaatacaaaaattagccgggcgtggtggcacgcgcctatactcccagctacttaggaggctgaggcaggagaatcacttgaacccgggaggcagaggttgcagtgagccaagatcacaccactgcactctagcctgggcgacagtgagactccacctcaaaaaaaaaaaaaaaaaaaaaaaaaaaagtcacgctgggcccctctctacagggggacacacaggcttagtttagtatatgtctaaccagattttgcatgtcaagcatttgtccttttcctggcttatgttttcttgtagaaattatataaaccctatcaaatccactactaggtaaatttttaaaccatgcagctttattactctcctcccccaaagaatgtagtttgaaattttctcatttccatagtagaggccctaactgccattgtattactaataatgcaacatgaaattgaaggtgcctaactgctcaaaaaacaaaatcagccatcatactgtaactctgagaggaatgagaggtggcacaggcacgagtgggctcagcccgtgtgagtgaggagaactgaggaatcctagggtgcgcatcctgcatcctggctgcacgtttgctgcagagtatgtttttctttcttgcctcccttcagttttcttcagttgcgttcagtgtatcttctggaaccaatagtgccctgtgttctcaagtctctaaaatgctaagatctgagcaaagtcaagcagcttacactaggcttttttacagctgtgcttgagaacatttccgagtggaccagggccttgaggagcctgtttttcagcaaattcaacagatgtgtgcagtgattccctccgttttgtatttgacaccttcatttaaaatgctaagatgcaatatcattcacttcaaagtggggaaaatgcagaattgtgtttcctttttatctgtgtgattccttaagaaacatgtttttaaaatatgtgttctaaatggttttttattctgtattactgctttggccatgtggctctcatgactttcattgtaccagattctcagctccctgaaacatggggacgagaagctctggaattacagcaagatttttgttccatgagcgcaatactgtatcattaacatttttaatggtatggattttatagcatctgtgtatgtttgcaaatattaagttattacatgttttaaaatgagcgtttttcatcttaaattttatatgtttgcaaatatatttttttaataaaatttcaaaaccaagttttagcacctactaaaaaaaaaaaaaaa

SEQ ID NO: 434 - DNA, 2095 bp, Homo sapiens
ggggcttattaacggtggtatctggtagagcccccataaagtaccaccgtggggaagacaatgggacccgaaaacgagagccccgtggggggggagatgtgggggagagtgtgtgtgttcagcgctagacaaaagagaccgcgatgcagcactttaaatagtcttctcgttgctagaacatgctataacatgctggcgctggtggattggatcgagcaggatttcaagagcacttggcgaaaggctcacgtttccctccgcgggttcctcgatttcgagctggggagacgaaaagaggttgccggggcttttctgggtggggataccagacctgaccccaaaaagccgcggggggggtccaaaaagaacgtggaggtgtatgatgatgacgtaggctctcaggctgcggacagccccgggaaacgcatggccccgaaagggacatttagagataaggacaaatttgaagggctgtttaagctcggggcgctggtggcaaaaaaagccttgaccccagcattttcttgttcccccaacagggggtcgcctctacacgcccattatggggatgaaatcctctacaaggttgaatccgggcccgtcaacatttgcgaggggggcaaaagaggcgtggggatccaccccccagataactacggcgatacccttgatgaaaatcttggccttccccaaaaaattgtgattaaggtgaagccccaaaccgaggaagccaacacttggttaaggcaggatctgaaaaatcataacagtgcaaaggaggccgggggctccgacgagattaaaacctttgtgacaggatgtaaaaaagatgggcatagtgggcgtaaaaatatgaccacacatgacagaaattcaaaaaagtggcaacgggtaaacttgtcccttatggcctccctccagctagattctaggggcggacgcgcggggccccggcgcggagcgcggcgcctgtgcctggtgtgtgaggactatgccagctgttcaaacacctgtgtctggtcctgtgaagcctacaaggtcttctttcgccgaagtcaaagtttcacagatccagcctgtttcacaaacgattgcaacatctctaagaataggtctaagtcttgcccagcttgcctcctccgttgcctgcaccctagcattaatgagatccgaaaagacaagcgagcagcgctgaaagtgcgagacaacgttggtgaagaggtggatatgaccggtcctagctggacctgcctgaagctacttttttcagatggggaaaaagtgatacccagattgggccatgaactcccagggatcaaggggggccggcaggcaaaacagcagtcccaccgaggaagccccatccccaaaaacaggaaaggttggccccccggacatgtcctgtcaaatgacggcggagctggtggcagggtatggaaaaaaaaatcctgtaaaccaattcgccgagaaggccccaagtggtgggatcggctgaatgaatctacacctttgttttgggggtctcgagccaacaagagtttagggaagggaggcaccagggggaggattttcatcaagcacccacacctctttaagtttgcagcagatcctcaggacaagcactggctggctgagcagcatcatatgcgggcaacaggaggaaagatggcgtaccttctcattgaggaagacatcgggcagcatcatggccaggggttcccagttatgcttctcaagattagccatattaggcacatggttgggggagtggctcattgcttgtacgacatgaaagaaaagaagtttgttctgccatcctggaaggttgagaagttggggaaatacgtggagacactacggacagaaaaagagcatcgtgctgctgaagcaagtccccagacctgactttcccggcccggctgaggccatcatggggatgcggtctagttggctcttagcagcatcaagctgtacatgagctagtttgtagtgactcactgcagagccccccagactggcttgtggttctgtttctaaagttattggaataagaagcaattaaacaagtttgtaatttaaaaaaaaaaaaaaaaaa

SEQ ID NO: 435 - DNA, 2166 bp, Homo sapiens
gcggcgggagcgcgcccgttgcaagatggcggcggccatgctgggccccggggctgtgtgtgcgcagcgggcggcggcgcggcccggaaggctggcgcggcgacggcgttagcccggccctcggcccctctttgcggccgctccctccgcctattccctccttgctcgagatggatctgcccgtgggccccggcgcggcggggcccagcaacgtcccggccttcctgaccaagctgtggaccctcgtgagcgacccggacaccgacgcgctcatctgctggagcccgagcgggaacagcttccacgtgttcgaccagggccagtttgccaaggaggtgctgcccaagtacttcaagcacaacaacatggccagcttcgtgcggcagctcaacatgtatggcttccggaaagtggtccacatcgagcagggcggcctggtcaagccagagagagacgacacggagttccagcacccatgcttcctgcgtggccaggagcagctccttgagaacatcaagaggaaagtgaccagtgtgtccaccctgaagagtgaagacataaagatccgccaggacagcgtcaccaagctgctgacggacgtgcagctgatgaaggggaagcaggagtgcatggactccaagctcctggccatgaagcatgagaatgaggctctgtggcgggaggtggccagccttcggcagaagcatgcccagcaacagaaagtcgtcaacaagctcattcagttcctgatctcactggtgcagtcaaaccggatcctgggggtgaagagaaagatccccctgatgctgaacgacagtggctcagcacattccatgcccaagtatagccggcagttctccctggagcacgtccacggctcgggcccctactcggccccctccccagcctacagcagctccagcctctacgcccctgatgctgtggccagctctggacccatcatctccgacatcaccgagctggctcctgccagccccatggcctcccccggcgggagcatagacgagaggcccctatccagcagccccctggtgcgtgtcaaggaggagccccccagcccgcctcagagcccccgggtagaggaggcgagtcccgggcgcccatcttccgtggacaccctcttgtccccgaccgccctcattgactccatcctgcgggagagtgaacctgcccccgcctccgtcacagccctcacggacgccaggggccacacggacaccgagggccggcctccctcccccccgcccacctccacccctgaaaagtgcctcagcgtagcctgcctggacaagaatgagctcagtgaccacttggatgctatggactccaacctggataacctgcagaccatgctgagcagccacggcttcagcgtggacaccagtgccctgctggacctgttcagcccctcggtgaccgtgcccgacatgagcctgcctgaccttgacagcagcctggccagtatccaagagctcctgtctccccaggagccccccaggcctcccgaggcagagaacagcagcccggattcagggaagcagctggtgcactacacagcgcagccgctgttcctgctggaccccggctccgtggacaccgggagcaacgacctgccggtgctgtttgagctgggagagggctcctacttctccgaaggggacggcttcgccgaggaccccaccatctccctgctgacaggctcggagcctcccaaagccaaggaccccactgtctcctagaggccccggaggagctgggccagccgcccacccccacccccagtgcagggctggtcttggggaggcagggcagcctcgcggtcttgggcactggtgggtcggccgccatagccccagtaggacaaacgggctcgggtctgggcagcacctctggtcaggagggtcaccctggcctgccagtctgccttcccccaaccccgtgtcctgtggtttggttggggcttcacagccacacctggactgaccctgcaggttgttcatagtcagaattgtattttggatttttacacaactgtcccgttccccgctccacagagatacacagatatatacacacagtggatggacggacaagacaggcagagatctataaacagacaggctctatgctaaaaaaaaaaaaaaa

SEQ ID NO: 436 - DNA, 2697 bp, Homo sapiens
acttgtccgtcacgtgcggccgcccggcctctcggccttgccgcgcgcctggcggggttgggggggcggggaccaagatctgctgcgcctgcgttgtgggcgttctcggggagctgctgccgtagctgccgccgccgctaccaccgcgttcgggtgtagaatttggaatccctgcgccgcgttaacaatgaagcagagttcgaacgtgccggctttcctcagcaagctgtggacgcttgtggaggaaacccacactaacgagttcatcacctggagccagaatggccaaagttttctggtcttggatgagcaacgatttgcaaaagaaattcttcccaaatatttcaagcacaataatatggcaagctttgtgaggcaactgaatatgtatggtttccgtaaagtagtacatatcgactctggaattgtaaagcaagaaagagatggtcctgtagaatttcagcatccttacttcaaacaaggacaggatgacttgttggagaacattaaaaggaaggtttcatcttcaaaaccagaagaaaataaaattcgtcaggaagatttaacaaaaattataagtagtgctcagaaggttcagataaaacaggaaactattgagtccaggctttctgaattaaaaagtgagaatgagtccctttggaaggaggtgtcagaattacgagcaaagcatgcacaacagcaacaagttattcgaaagattgtccagtttattgttacattggttcaaaataaccaacttgtgagtttaaaacgtaaaaggcctctacttctaaacactaatggagcccaaaagaagaacctgtttcagcacatagtcaaagaaccaactgataatcatcatcataaagttccacacagtaggactgaaggtttaaagccaagggagaggatttcagatgacatcattatttatgatgttactgatgataatgcagatgaagaaaatatcccagttattccagaaactaatgaggatgttatatctgatccctccaactgtagccagtaccctgatattgtcatcgttgaagatgacaatgaagatgagtatgcacctgtcattcagagtggagagcagaatgaaccagccagagaatccctaagttcaggcagtgatggcagcagccctctcatgtctagtgctgtccagctaaatggctcatccagtctgacctcagaagatccagtgaccatgatggattccattttgaatgataacatcaatcttttgggaaaggttgagctgttggattatcttgacagtattgactgcagtttagaggacttccaggccatgctatcaggaagacaatttagcatagacccagatctcctggttgatcttttcactagttctgtgcagatgaatcccacagattacatcaataatacaaaatctgagaataaaggattagaaactaccaagaacaatgtagttcagccagtttcggaagagggaagaaaatctaaatccaaaccagataagcagcttatccagtataccgcctttccacttcttgcattcctcgatgggaaccctgcttcttctgttgaacaggcgagtacaacagcatcatcagaagttttgtcctctgtagataaacccatagaagttgatgagcttctggatagcagcctagacccagaaccaacccaaagtaagcttgttcgcctggagccattgactgaagctgaagctagtgaagctacactgttttatttatgtgaacttgctcctgcacctctggatagtgatatgccacttttagatagctaaatccccaggaagtggactttacatgtatatattcatcaaaatgatgaactatttattttaaagtatcatttggtactttttttgtaaattgctttgttttgtttaatcagatactgtggaataaaagcaccttttgcttttctcactaaccacacactcttgcagagctttcaggtgttactcagctgcatagttacgcagatgtaatgcacattattggcgtatctttaagttggattcaaatggccatttttctccaattttggtaaattggatatcttttttttacaaatacgaccattaacctcagttaaatttttgtttgttttcctgtttgatgctgtctatttgcattgagtgtaagtcatttgaactaatggtataactcctaaagctttctctgctccagttatttttattaaatatttttcacttggcttatttttaaaactgggaacataaagtgcctgtatcttgtaaaacttcatttgtttcttttggttcagagaagttcatttatgttcaaagacgtttattcatgttcaacaggaaagacaaagtgtacgtgaatgctcgctgtctgatagggttccagctccatatatatagaaagatcgggggtgggatgggatggagtgagccccatccagttagttggactagttttaaataaaggttttccggtttgtgtttttttgaaccatactgtttagtaaaataaatacaatgaatgttgagtactagtgtctgttatgtgtcttctttagaggtgacactcacatgaaacaattttttcttctcataggaagcagtagctttaaactgtctgtggttcattattctcaatatgaatcataccaagatatttgtgcctcatctcgaaaatatattgtatattg

SEQ ID NO: 437 - DNA, 1916 bp, Homo sapiens
ggagtgagcgcggcagtggccctggcagctggcggagcggcccagcccgtgtgcacgtggcgccggcgctgcctttcggttgccaaaattcaggctgtagacggcgagataacaagtttaaaaccccggctaagccagaagagccaaagagggacctcgccaaggccactcctcgctctctaggccgagaatactgcgcaaattctgggaggtttgggcctggcggctctccgttcccgacccccggcgtggattcgttcccgcgctttctggcgtgaggggtcagagggcgcgccgacgctcaggcgaacggagcggaggcggcagcggccatgggcgaagcgggcgccgctgaggaggcctgccggcacatgggaactaaagaggaatttgttaaagtcagaaagaaggatctggaacggctgacaactgaagtgatgcaaatacgggacttcttacccagaatactaaatggggaggtgctggagagcttccagaaattaaagattgtagaaaaaaacctggaaaggaaagagcaagaattagagcagctgaaaatggattgtgagcactttaaagcccgcctggaaaccgtgcaggccgacaacataagagagaagaaggagaaactggctcttcgacagcagttgaatgaagcgaagcagcaactcctgcagcaggcagagtattgtacagaaatgggagcagcagcgtgtaccctcttgtggggtgtctccagcagtgaggaagtcgtcaaggccattttgggaggagataaagctttgaagtttttcagcatcactggtcaaacaatggagagttttgtgaagtcgttagacggtgatgtccaggagctggattcggatgaaagtcagtttgttttcgctctggctggaattgtcacgaatgttgctgctatagcatgtggtcgtgaattcttggttaattcaagccgggtgctcttggacaccatattgcagcttctgggagacttgaagccaggacagtgtaccaaactcaaagtgctaatgctgatgtccctatacaatgtaagcatcaatttgaaaggcttgaaatacatcagcgagagtccaggattcatccctttgctgtggtggcttttgagtgatccagatgcagaggtgtgccttcatgtactgaggcttgtccagtctgtggttctggaacctgaagtcttctccaagtcggcctctgagttccggagctccctgcccctgcaacgcatcctggcaatgtccaagagccgcaacccccgcctgcaaaccgcagcccaggagctcctggaagatctccgcactctggagcataatgtgtaggtgtgctcggccaccagggttttggtgaaaatgccggtgtcccttctccccagatccctcatttgatactccaaaaccatcaccatgtaccatgtgttagagttggcaaaatgtgattgactagagatggacatgaattgatatgtatcccacataactttgtcttggaagtgagagtgcttgtaggtggttggttaagcttgccaaaggagaggccatgaaagaacctgtccttctggaaaagtggtccatgtctgtgctggctggaagagggcttgcttagggcagcttcttgctgctcagcagaccatgacctgtaggttcacctataaaacagggaaattgaataaccatctaccccattagtcagcattttcttgagatacatttctttgaaaagcaattcattctctctctagtaattgtaattaatccccccaaaatgcaagtttacttttataaccttttggtgaacctgctatttcggatgacattgggcattttagttctatattttttgtgcctcttttatttttgaataaagaaaatcagaagagttgtaaaaaaaaaaaaaaaaaa

SEQ ID NO: 438 - DNA, 2532 bp, Homo sapiens
agatgcacgcgcgtccccgctgcccaacgaagcctgggtcgcgttgcgccgccgccaccctgggctggcagtggagctggagctggagcccgcgctgcccgctgagagcgtgacgcgcgtcctgcagccagccgtccccgtggctgcgctgcgcctcaacctctcaggcgacaccgtaggcccagtgcgcttcgcagcacaccactacgccgcaaccctgtgcgcgctcgaggtgcgcgcagccgcttcggccgagctgaacgccgcgctggaggagctggcggcgcgctgcgcggccctgcgcgaggtgcattgtttctgcgtggtgagccactcggtgctggacgccttccgcgcgcactgcccgcgcctgcgcacctataccctcaagctcacgcgcgagccgcatccctggaggcctacgctcgtggcgtgattgggcgacttctctcccccgtccccgtggacacgccccacccgctcggtcctggacacactgcccccctctcttgcctccacccctctgcggactctgcagctccgcggccccggcgcagggagagggagggcacgggcgcgggccgggcctcaagggacttgcccagcccacaccaggtcgcgcaccggcgatttctcctgtagaacaaagaaggaaatagagggaccgagaggggtgggactcgaacccaagtctcccactcatctcaccccaccccaccccactccaccccaccccacccctccactccactccactccacacatcccatccagccagccttttctgcctgctggtgcctcggccgctgtccgagccccgccccgcgggcttgcacgtggcccccgcctgacccggcgccccggggcggagtagggcggagcgggcggcaaacgcagcactttccgcggctttgacgagcccgcagcggccgggcccgagcgcagagccgggccgagactgcaccatgcaggaagcgccagctgcgctgcccacggagccaggccccagccccgtgcctgccttcctcggcaagctatgggcgctggtgggggacccaggcacagaccacctgatccgctggagcccgagcgggaccagtttcctcgtaagcgaccagagccgtttcgccaaggaagtgctgccccagtatttcaagcatagcaacatggcgagcttcgtgcgccaactcaacatgtacggttttcggaaggtggtgagcatcgagcagggcggcctgcttaggccggagcgcgaccacgtcgagttccagcacccgagcttcgtgcgcggccgcgagcagctactggagcgcgtgcggcgcaaggtgcccgcgctgcgcggcgacgacggccgctggcgcccggaggacctgggtcgactactgggcgaggtgcaggctttgcggggagtgcaggagagcaccgaggcgcggctgcgggagctcaggcagcagaacgagatcttgtggcgggaggtggtgacacttcggcagagccacggtcagcagcaccgggtcattggcaagctgatccagtgtctctttgggccacttcaggcggggccgagcaatgcaggaggcaagagaaagctgtccctgatgctggatgaggggagctcatgcccaacacctgccaagttcaacacctgccctctacctggtgcccttctgcaggacccctacttcatccagtcgccttctacttacagcctctcccagagacaaatttgggccttagccctcacagggccaggggccccatcatctctgacatcccagaagactctccatcccctgaggggaccaggctttctccctccagtgatggcaggagcccccccgccactgcctgtggctgtggtgcaggccatcctggaagggaaagggagcttcagccccgaggggcccaggaatgcccaacagcctgaaccaggggatcccagggagatacctgacagggggcctctgggcctggaaagcggggacaggagcccagagagtctgctgcctccgatgctgcttcagccccctcaagaaagtgtggaacctgcagggcctctagatgtgctgggccccagtctccaagggcgagaatggaccctgatggacttggacatggagctgtccttgatgcagcccttggttccagagcggggtgagcctgagctggcggtcaaggggttaaattctccaagcccagggaaggaccccacgctcggggccccactcctgctggatgtccaggcggccttgggaggcccagccctgggcctgcctggggctttaaccatttatagcactcctgagagccggactgcctcctacttgggcccggaagccagtccctccccctaagaccccgcgcctctgaaggggcttggaaccagtccgccgctgcacatccttcttggcttcctggcgccccctatcgggggtgagcgaagcccccactactaaatggcctctctccactaccccgactatccctgcacataaactccgttttttttttttcaaaaaaaaaaaaaaaaaa

SEQ ID NO: 439 - DNA, 1448 bp, Homo sapiens
agataagtgtacatgcttaggccttctgaagcagcatttgaagctgcagtcctgaaaaccatgcaggccggaagagtagataaagaaatatttatttgagatggcacatgtttcttcagaaactcaagatgtttcccccaaagatgaattaactgcttcagaagcctccactaggtctccattgtgtgaacacaccttccctggggactcagacttacggtcaatgattgaagaacatgcttttcaggttttgtcacaaggatccttgttagaaagtccaagttacacagtttgtgtctctgagccagataaagatgatgattttctttctctgaactttcccaggaaactttggaaaatagtggaaagtgaccaattcaagtctatttcatgggatgagaatggaacttgcatagtgattaatgaagaactcttcaagaaagaaattttggaaacaaaggctccttacagaatatttcaaactgatgctatcaaaagttttgttcgacagctcaacctttatggatttagtaaaattcaacagaattttcaaagatctgcctttctagccacctttctgtcagaagagaaagaatcgtctgtcttaagcaagttaaagttctattataatccaaatttcaagcgtggctatccccaacttttagtaagagtgaagagaagaattggtgttaaaaatgcttcacctatatctactttattcaacgaagatttcaacaagaagcattttagagcaggggctaacatggagaatcataattctgccttagctgctgaagctagtgaagaaagtttattttcagcctctaaaaatttaaatatgcctctaacaagggaatcttctgtcagacagataattgcaaattcatctgtccccattagaagtggtttccctcctccttcaccttcaacctcagttggaccatcagaacaaattgcaacagatcaacatgctattttaaatcagttgaccactattcatatgcactctcatagtacctacatgcaagcaaggggccacattgtgaattttattacaaccacaacttctcaataccacatcatatctcccttacaaaatggttattttgggctgacagtggaaccatctgctgttcccacacgatatcctctggtatcagtcaatgaggctccatatcgtaacatgctaccagcaggcaacccgtggttgcaaatgcctacgatcgctgatagatcagctgcccctcattccaggctagctcttcaaccatcaccactggacaaatatcaccctaattacaactgatctgccattaaaagaggaccagattatgaatgacaacagagactaacatttacattgacaaaaaaccctaaaaatttctgcaattatcttattgaacaataaaattgcatgtttacttctaaaaaaaaaaaaaaaaaaaaaa

SEQ ID NO: 440 - DNA, 2280 bp, Homo sapiens
aaaatgctcccgccgacgcacagcagtgacgacacacaaggtttcggggactgagtgggtttcagactttctctcaggatttccgctggcttcaggttccggtcaggcgtcgggacagagcctgatccaggcttcggcggccggtggcagctctcgatcagctctcgcagtcggagaggcggctaaggaaaggtgccacagcagagacgcgaaggagaggccctagaaccttttcaaagaagaatggaagaaaccatgaagcttgctacgatggaagacacagtggagtactgcctgttcctgataccagatgagtcaagggactcagataaacataaagagattcttcagaagtacattgagagaataatcactcggtttgcacctatgctggtcccctacatctggcagaatcagcctttcaatcttaaatataaacctgggaaaggaggtgttcctgctcatatgtttggcgtgacaaagtttggggataacattgaggatgaatggtttattgtttatgtaataaagcagatcacaaaggaatttccagagttagtagcaaggattgaagacaatgatggtgaattcttgttaatagaagctgctgactttctccctaaatggctggatcctgaaaatagcaccaatagggtatttttctgccatggggaattgtgtattatccctgcaccaagaaaatctggagcagaatcttggttacccaccacacccccaacaattccacaagcattgaatataatcacagcacattcagaaaaaatacttgcttcagaatctatacgagctgctgtgaataggcgcatcagagggtacccagaaaaaattcaggcctcacttcatcgagcacactgcttccttccagctggcattgtggcagtgctaaagcagcgccccagattggtggctgcagcagtccaggcattttacctacgagaccctattgacctgcgagcttgtcgtgttttcaagacattcttgcctgaaacacgaataatgacatcggtcacattcactaaatgtctatatgcacaattggtgcaacaaaggtttgtgccagaccggcggagtggatacaggctgcctcctccatctgatccccagtaccgagcccatgaattgggcatgaaattggctcatggatttgagatcttatgctccaaatgtagcccacatttttctgactgcaagaaatcccttgtgactgcctcaccactctgggccagtttccttgaaagtctgaaaaagaatgattactttaagggactgatagaaggttctgctcagtaccgggaaaggctagaaatggcagagaattacttccagctctcagtagactggccagaaagttctcttgctatgagccctggtgaagaaatcttaaccttattacagacaataccatttgatatagaagaccttaagaaagaagcagctaatcttcccccagaggatgatgaccagtggttagatctctcaccagatcagctggaccagctgctgcaggaagctgttggcaaaaaagaatccgagtctgtttccaaggaggagaaggagcagaactatgacttaactgaagtctcagagagcatgaaagctttcatatccaaagtctcaacccacaagggagcagagctgcctcgagaaccttctgaggctccaatcacttttgatgcagattcttttcttaattattttgataagattttagggccaaggcctaatgagtcagattctgatgatctggatgatgaagactttgaatgtttagatagtgatgatgacttggactttgaaacacacgaacctggcgaagaggcttccctgaaaggaacacttgataatctcaagtcatacatggcccagatggaccaggaactagcacacacctgcatcagcaaaagtttcaccactaggaaccaagtggaacctgtatcccagactaccgataacaattcagatgaggaagattctggtacgggagaatctgttatggcaccagtagatgtagacctgaacctggtttcaaatatattggaatcctatagctcccaagctggactggcaggacctgcttccaatcttttacaaagcatgggagtgcagctgcctgacaacaccgatcacagaccaacaagtaagccaacaaaaaattaaccagcacatttagcttctcttttttctttttaaataaatattgaatatgattctgttcaaaaaaaaaaaaaaaaaaaaaaaaaaaaaaaaaaaaaaaaaaaa

SEQ ID NO: 441 - DNA, 116 bp, Homo sapiens
accacgtcccagctcctcgctctggaggcaagttgctccagaaacagtacctctccattgcagagggtgcggacttctccagctctccgaacctcacggagactcaggtcaaaatc

SEQ ID NO: 442 - DNA, 700 bp, Homo sapiens
tggtcttgatctcctgacctcatgatccacccgctagcctcccaaagtgctgggattacaggtatgagccaccgcaccgggcctgttctatttttctagttaagggaactgaagctcagagaggtgtcaccagcaggtgttcattcccatgccagccttgccccccggcttttcccaggcaggctcctgcgtgcccactggctccagcctggtcctctgtctcttggctgcttcactcctgctctttgtcccgactctggccctgcttacaggggccactacctgctggtgcctccataacaagcgtctggcgttgagacccctggcatggcaggggctttggggtctggtttccacaaggcttagccatggcagaacctcgttttattttaactctttgcccctacaaacaaacagcagtacttgccagaaccattcttgggattcaggagctcgggcgactgccttgcctctggccgcacccaggagggtggggttggatctgtgtagttgccaggcccacacctgccagcagggggctgactggatccatgctttactgtgtttaatgggggtaacaggggtccctacagccctcccagctaaacatttggaacaaaacaccagcccttttgtagtggatgcagaataaaattgttaatccaatcacctacaaaaaaaaaaaaaaaaaaaaaaaaaa

SEQ ID NO: 443 - DNA, 2291 bp, Homo sapiens
cttgacgcacggagcttgtctgcgccggccagcactggcttctctggactttgcacacctccaggagaagaacccagaaaattgatcagttctaaaaaaccatgccccacttgttggtgactttcagggatgtggccattgacttctctcaggaggaatgggaatgcctggaccctgctcagagggacttgtacagggatgtgatgttggagaactacagcaacctgatctcattggacttggaatccagttgtgtgaccaaaaagttatctccagaaaaggaaatttatgaaatggaatcactccagtgggagaatatggggaaacgtatcaaccatcaccttcaatacaatggtcttggagacaatatggagtgcaaaggcaacttagagggtcaagaagcaagtcaggaagggctttacatgtgtgtcaaaattacctgtgaagaaaaggccactgaaagtcattcaacctcttctacttttcatcggataattcctaccaaggaaaaattgtacaaatgtaaggaatgcagacaaggtttcagctacctgtcatgccttattcaacatgaggaaaatcataatatagaaaaatgctctgaagttaagaaacacaggaatacctttagcaaaaagccaagctatattcaacatcagagaattcagactggtgagaaaccttatgagtgtatggaatgtggaaaggcctttggtcgtacttctgatctcattcaacatcagaaaattcatactaatgaaaaaccttatcagtgtaacgcatgtgggaaagcttttattcgtggttcacagctcactgaacatcagagagttcatacaggagagaaaccatatgaatgtaagaaatgtggaaaagcctttagttattgttcacaatatactcttcatcagagaattcatagtggtgaaaaaccctatgaatgtaaggattgtgggaaggcctttattcttggctctcaacttacttaccatcagagaattcatagtggtgagaaaccttatgagtgtaaggaatgtggaaaggcctttattcttggttcacaccttacataccatcagagagttcatactggtgaaaagccttacatatgtaaagaatgtgggaaagcctttttatgtgcctcccaactgaatgaacatcagagaattcatacaggagagaaaccctatgaatgtaaagaatgcgggaagaccttttttcgtggctcacaacttacttaccacctgagagttcattcaggtgagagaccttataaatgcaaagaatgtgggaaagcctttatttctaattctaatcttattcaacatcaaagaattcataccggagagaagccctacaaatgtaaggaatgtggaaaggcctttatttgtggcaaacaacttagtgaacatcagagaattcatacaggtgagaaaccctttgaatgtaaggaatgtggaaaggcctttattcgtgttgcatatcttactcaacatgagaaaattcatggtgagaaacattatgaatgtaaggaatgtgggaagacctttgtacgtgctacacaacttacatatcatcaaagaattcatacaggtgaaaagccctacaaatgtaaggaatgtgacaaggcctttatttatggctcacaacttagtgaacatcagagaattcacagaggtgaaaaaccttatgaatgtaaacagtgtgggaaggcttttattcgtggctcacaccttactgaacatctgagaactcatactggagagaaaccctatgaatgtaaggaatgtgggagggcctttagtcgtggctcagaacttactctgcatcaaaggatccatactggtgagaaaccctatacatgtgtccagtgtggtaaagactttagatgtccttcacaacttactcaacatacaaggcttcataattgagaaagccttgaatgtgattaaatttaagaaaatcttcatctatttcatatctataatgaatgtagaacatcttgcttctgctcagaatctgctcattcttagaaggcctacattaacatggatgcagaataatttcagaaaccccttaaataattccttaacatctctataaacgctagaatataatgctgaattatatcctttattaagcatcatctccatttcaccatatcctaactgaaatcctatatatttcttgtgtgttcttttctatttgtaaaatactgtaattgtattacaatgactaaattataattaaatacatataattccctttcgatagcaaaaaaaaaaaaaaaa

SEQ ID NO: 444 - DNA, 9351 bp, Homo sapiens
aaccgtccccaacggtcgccagcgcgcggctcccgggccccctcgctcctcccctctggcccctccgagcgctgggggtgcttccctccccgcctcctcgcactcccactcgcgggcacgccggtggctgtgccgccatgccccaccacaggctgctcacgggcctaggcgcggcggcccgagataggggcccctgagcctcccgggggaggagagaggcagcgagccgcgctccgccccctccccccgggccgccgccgccgccgcctcgccgccccagcctggcgggagaaggaggaggagcagcaggcctccgggcccggcgccgccgcccgcaggacatttctgatttatttgcatccttgaagagcatctgtagaagaggaagtaaaagatgggtgtgaaaacatttactcatagctcctcttcccacagccaggaaatgcttggaaagctaaatatgctgcgaaatgatggacatttttgtgatatcactattcgtgtccaggacaaaatcttccgggcacataaggtggtactagcagcttgcagtgatttctttcgcaccaaacttgtaggccaagccgaggatgagaacaagaatgtgttggatctgcatcatgttacagtgactggctttatacctcttttagaatatgcttacacagccactctatcaattaacacagaaaatattattgatgttctagcagcagccagctatatgcaaatgttcagtgttgccagcacctgctcagagttcatgaaatcaagcattttatggaatacacccaacagccaacctgaaaagggtctagatgctggacaagaaaataattctaactgcaattttacttctcgagatgggagcatttctcccgtgtcctcagagtgcagtgtggtagaaagaaccattcctgtctgccgagaatcccggagaaagcgcaaaagctacattgttatgtctcctgaaagtcctgtaaagtgtggcacacaaacaagctcaccccaggtattgaattcttcagcttcctactcagaaaatagaaaccaaccagttgactcttccttagcttttccttggacttttccttttggaattgatcgaaggattcagcctgagaaagttaagcaagcagaaaatacccggactttagaattacctggcccatctgagaccggtagaagaatggctgattatgtgacttgtgagagcacaaaaactaccttgcctttaggtaccgaagaagatgtccgggtcaaagtagaaagattaagtgatgaggaggtccatgaggaagtgtcccagcctgtcagtgcatctcagagttcgctgagtgatcagcagacagttccaggaagtgaacaagtccaagaggaccttctgattagtccacagtcttcctctataggctcagtagatgaaggcgtttctgagggcttgcctacacttcaaagcacgtctagcactaatgctcctccggatgatgatgatcgattggaaaatgttcagtatccctaccaactctacattgctccttccaccagcagtacagagcgaccaagtccaaatggtcccgacagaccttttcagtgtccaacctgcggggtgcgattcacccgtattcagaacctaaagcagcacatgctcatccactcaggaattaaaccatttcagtgtgaccgctgtgggaaaaagttcaccagggcttactcgctaaagatgcatcgcctaaagcatgaagtgatttcctagtaccggactacttaaaccaggaacaagaagagacccttgttcaatatgatcttggagaacacggttttgaaagcaactcctctgttcaaatgcctgtcatttcacaggtctcctcaacccagaattgtgaaagcacttttcccttggggtctcttggtgggctggcagaaaaagaggaagaagtgccagagcagccaaagagcagtgcttgtgctgaggcaaccagagatgaccccccaaaatcagagctgtcttctataactattgagtagttttgtgatttggcttcagttttgttttttggaaagtgcctgtgcttggtcttgtacatttaaatttaatttaattttttaaacaaaaaaagccgggtgggagggagggggagattgggaaagaatttccctttttactttctgagccctgaaactgattttatttttcctaactgagagattgcttctgtaagtacacaataacatgatgttgaaacagaaactatgagacttaaggagaactggttgacttaaaacatataccagttccttcttccattgttaaaagtaggctaacaacagatcattagctagagaggaaatcagatgattattgaccttcttgagacaagagggtacatgagaaactaattactaaacagcttgacaaatggcctgagtagatacttactgctgtacacaggatgttgtataatattttgtaaagcctgttgtttttggaagtatttatggtaagctttcttaaaaattattatggtaaatacttctgaaatccggcgtacttttctttaagctttgtcatttctgttatgatttttcatggtgaaattttggtactgagatgggcattctctgtacctttatagtaccactccaaaggcaaggaaccatgattgacaacagtcaagctgtggatgaaatgaccaggaacggagaatgaagtatgtaaatcccagcttcataggaactcttctcatactgcttttcagattaaaattgctgtttacctggtctccgaatgtaatgcctgactgtgtcattgcccggatcagttttccccctgccccatcaatatgttctcttgcatatattggcgtgctgccatataaagtaaaaatactggagatattctatattttatatataggtttatgtgttgttggggatgttttcattgtgctcttttggacataataaataattctctattgaggctacattctttttttttttctttttttttaaaagaatggcatctcactctgttgcccaggctggagtatagtggctaagtcatagctcactgcagcttcgaactcctgggctcaggccattctcctgcctcagcctcttgagtatctaggattataggcatgctccaccacacctggttaacttcatttttattttttgtagagatgaggtctcactatggtgcccaggctggtcttgaactcctagaccaagtgatcctcctcctttggcctcccagactgctgggatcactgcaccggccaaggctgcattcttaacccaactagattgtttactgaatcccatatgacagcgatacattgtccttacatatttatttttagacattgcaaagttattaaaaacagttaactatagtttttacacaacgtaggcaacaatgaagagtatagactgtaagattttcatctatgactcataaatctgggagaaaaaaattattaagactaatgagaaactgaaaaccttaaactaatgaatattatttctgctgctaaaaatatgaaactttctggtctgtagttgaaatttgtatgatcctctagacttgggtatacttttcatctggtgccattaaagcatctctaatattgatcctaaatatttgtaagtccatgagcagtgaactttggaataagtttctgtgtagatacccaaagtttaataattatgagagcacctgatttgatagacagaaaatacagttctttagtcaaaacacaagatctgaattttgttcaggtgctagaccatactaaatgtatatatttttaattatagtgatttgtttcatttttttagattggctaattctgtaattttttccccaaaaacatgtgaagaaaggaaaagtaaattaaattccttagaactgttttaggttaagattctctgtgtctgcccatattctgcagtccttaacttgttttcaactctttacctcactcatgaacttgtttttacccatttgctgccaaacataggtgtgttcccttcaggagaatcagcatatacaggttatgataggctcccaccatttatgcttcttcactgatagggttgcattactttctgcagcagactataatacttcatatagtactgctgtgtctcaactggaaaggtcaggaattttaatgttacgttgtggtctttgaaaactgttaggcctagcaatagataaatctcaaaattaattttaaaatctgtattgacaagaataggtaaaattatgaccaggaatcattgttacccttagttccaagaggtggtttttgaaagagcaagaggaaagaaaaaagaaaagaaggaaagaagaataaagaagagaaacgtgtaagaatggtttgcagattgattggttaaaagtgtttttagcacatccccaaccctgaaaacttcgcattaagagccaagcacaatgttggtagctccaagatattctgactgtgttctcagaatgagggattacccatcactgggtattccttcccaagtagaaactttagattttcactggtaatacacattgccaagttttatgggaaatctgaatatactgtgaaaatgcatatctggttagttgtctgctgcccagatcttatcaataccagtaactaaccagtatttaacataaaatgatacaaataaaggcctttttctatttcagtgagggtacatttttcttgatatatatgtactttaaggatattggatctgtttatggatctgttttaggaaacagatttgcaagggataattgtatatatagtagtatttaggtttatttcaaattcatcttagggatgcctagatgcataatttttaccaggacatattgaaaatattgcaaagagatagccagttatattatcccattcattagaaattaccagtgtaactaaacataaatattccagtttagagtgcttaaacgtagctatctttcttaaggccaggagggtaactttgtggtatctaaagggcttaaatttcagaatgcagaataaattgcctttttaaaaccaagcattttgtacaagcttttattttcagttttttaactaccaaataggtgtgatgtactttagaagtaaacaaagatgttcacccatgataatggatgttaaagctcctgcagttgttcttttcgtgtttaaagggtatattctaatagtggaagcatcaaacatgtcagtgatttcatctcattcagaaataaagagattaatattggtctttattttttggcattttaagttttatataaatggatgcagatggagattatcacccacaaatatatttaaatggatttttcttaatttgaatttcaagtaatctttttatttcaagtaattagttacgcatttagttacattgccagttttttttttttatcaatttcagtaagacaaaatatactaaaatgtttaaatagcctcattcaatcttacattttgacatttcagcaatcattctggcttacagtaattagatcccctgttacgacacatgccctttgttcttaataactagcaaaaaaaaaaaaaaaaaaaaactttcatcttgttaaaatactttgccaaatgaaatagactagtcaatacatctgatgtccataattattggtaactcagttaccttctaactaataggctggttcaggagactctcccagtttataaatggttctcttgggagcctttggaagctgtattaaatctttcagtcttttatttctaattttttctcttaatctaaatagaggccagttatctattttatcagcttttattcttgaagattctcagattatgttttagtcccttttagctttaatagtccttgaaaaatacattactgtataatgtggcaattctgtaacagagacttattacttgaatgaataatcctaaaattttaatattttagctgaagtttgagatttgtggaatgaacaaaagaattagaaactttcatatgttactttgtttcagtcatctgcaaagtatgaagctgtaattctgaaatacacatccaagtgaatgagaattaaaaattttctaaatattaatactaactgggaaaaaaaaactagtgtgaagtttacagttagaagaaacagacccaaagttgccagaaggtaataaataaatgtagttttcactgtaagtaagttattgacgtaagatgctttatttgtaatatatttagattttgaaagttattgagagatgaatgtataaaagctaaattttcttttctgaagcagtgaaacaaaattggggtaacaaggaagctctgttgtggcaaacatgtctatgaggaatattaaaactaagcatactcccacaggctttaaactcaaactatgaacatttaaattaagttgttccttattttgcctatacccatttttatctttcattgtcgtttttgcttgacagtatggtgacagagtatttttatttggaaagtcctcagcaagatgaattagccaaaagcaataatggttcagattaaacaataaagtggaattgattcaatcccaggctcaactaagaacagtcgctctctggatgtttcattttagacgatagataagttgagatgttgtaatatttatggggggttaagcctgtgtcagttatgggatgaagacttgtagtaccagtaccatcagtggtcatacttttttttaactttttactaaactaatacagttagacatttccactctatcgtgattatatttttatgatgggaaaataaaaacacttccatgtttttataaatagtctctgcaaagatttcagatgttattggtatctcggtttggcagtatctgaaaaattgagattgtctttgaaatgtttgtgctacttttacttaagtaaacccccactgtgcaagacccaggccggcttcagctaataccaaggtttctgtgtgcataatagtttacagagaacttaagagtaaggactgcggattaaaaacaaaactttttttaactttaaaatttttagtttttgttcaaagtacctggtttataaagtcaaattcttttattagttcctttctcgtttaaattgactgatgttgctgatgaagcttaaagtcccaggcacggttgtggcgatatactgataaaattggtgcctagtggtgggaggagctccagtgtcaggacttttattaaaaggcccttgttttcccaaatgccaatctagccacatttagatttcattattcaataaaacagatgaaaaatcatcccataaatgaatgttgaggttaccaaagtacatcacctgctgaggaaggataaatcttcctgctttaagggagccctgtcatctctcctcttaatgcacgtttcccttggtattagtggaagctgtgttcaagatgggaagcctttcctgcagttcttagaaacacctgctttctaaggagagccttttctaggattagcttatgtgtgttttctctaggcgattttttatttcagttaccaatttaattttcaagttgacagatgctgtgtaaagtctctcataatgagagtagtccattaaattgttgaaagttgcactgcttttcatctttcaggtacctgaaatgagtgacatcaggtatttggaaggagtaagatcataaactgtattcattttcttccttgtacaaagtgatgacttctaatgcttatatctcaaggtattttttaaaaaagcaacggtccctaatagagtaaaatttggttttggtccaagttcccaataatgtatttaatgtttctgttgtttactggtgcctcccgttgcatcaggtagagattgcctgcctctttgtagggcagccttgtggcaccttatgtccaacttggaggatagtatatggcttctttgtgcctctactatcttttcaaaagccattttataaaaatcctaggtagcctattttaatatttaaatatatatatttgtgaaagaacttttagaacagaccttttctttttactttaaaattcctgtatttccatttttaagagtaaatttaatctccaggatttagaagtgtctttccagagaagcataatgagaaagtcagactgaggtaataagaccagaattaagtgatagaagaaactgttgtttggttaaaggacacagatttgaaggaaaaaaattttgatgtaacaattttttaaataaaattttgtttttctgtaatgtcatatttgctgctacagtagctcaatattttacagggctaacataaagctggctccatttaaaaactggagtacttcctagtgcagccagcctaggcggaaactgtacaccatggtcttccagatgggtgactgatggctttgggtagctgatgcatgctttaatatttgcctatagcccggcagcaaggaagtcggggcggggggacttttttaccctgccagttatagcattgtgattctttctgggcactggcattttgtgaaactctcaagggaaggtgatgcaggggagaaaatgtgaattaaattacatagatgggtgtttttatgtcttctacccctttcctagaattagtacaactcttaactgtgccagtccccagttcaccagctttgtatccagtcgtcatctcattcaagtatggctttacttggtgacactggccatagctaagttaacttggcatgtttgacttttgacaataacaaaaatggttttggattttgttttatttccaaaaaatgtatacaatatcagaacttcacattttatatactagtatctggctattagtattttacaggaaccatagttcttggtgactacatatatatatatatttttgtgaccttttttgtaaactaagtgccgtttcaacgttacaatcatttttagggttattgtaatcaatgtgaatatcatgttttttcaaatctgttctgagcctatagtgtttgctttgtgaacatgtgtattgtatatattctgtatagttatattgtactgaaattagcttgtttgatataaggaaaatatgtattgagtacctttttgctagcctgattgtttaatctttttaaaaaaggtttaaactttttttaaaaaaaaaatctttaaactggcctttattacatggtcacacataaagttgcagttaggaaagggatgggcagggaaaaactagttttgagtgtctttagatagaaacatgagactaaggtttgattttgttttcgttttctcattaaaatatcttatgctttatggaataaaaaaaaaaaaa

SEQ ID NO: 445 - DNA, 1258 bp, Homo sapiens
ctagaccctcttctctcccttcggcttctctctttcggccggcgccgccagttcctggggcacacccagaggtccccttctcgccgccgcctgcaactgcgagggtagcccggggccgcttggagtcgcccggacctgagaggctgctgcactgggcctcagccagccctccggatgctggtgctgccatccccctgccctcagcctctggcattttcctccgttgagaccatggagggccctccccgtcggacttgccgctccccagaacctggaccttcctcctccatcggatctccccaggcttcatctcctccaaggcccaaccactacctgcttattgacactcagggtgtcccctacacagtgctggtggacgaggagtcacagagggagccaggggccagtggggctccaggccagaaaaagtgctacagctgccccgtgtgctcaagggtcttcgagtacatgtcctaccttcagcgacacagcatcacccactcggaggtaaagcccttcgagtgtgacatctgtgggaaggcattcaagcgcgccagccacttggcacggcaccattccattcacctggcgggtggtgggcggccccacggctgcccgctctgccctcgccgcttccgggatgcgggtgagctggcccagcacagccgggtgcactctggggaacgcccgtttcagtgtccacactgccctcgccgctttatggagcagaacacactgcagaaacacacgcggtggaagcatccatgagccgggctgccgggtgccccaggtaccacaggactttgcagggagcctggactcctgtccagacacctggtgagagcctgaggctggtgttcagggccctggacacagacacagagcagccgcatctcaaaggcagagccctgcctgaaggaggaatccgtgagtaatcttcaggtcctccgtgttctggagctgagatgggaatgagcccctacacagaatggagtcctctagcctaaagatatcagctgttccatggcagagccttgactggatggaggtggggagtgtggtgtgtaaagtctctggcctcataaaaggtggctgtgggtcgtcaggaatctgcgccatcttcctggggcttctgcgctgttgttggggaagggaccccagtcctgccttccaccccccaaccaggcctgagactgatcaaacaataaacacgtttcccactctgaaaaaaaaaaaaaaaaaaaaaaaaaaaaaaaaa

SEQ ID NO: 446 - DNA, 117 bp, Homo sapiens
acctacgagcagctcgtggcgctggagaacaagttcaaggccacgcgctacctgtcggtgtgcgagcgcctcaacctggccgtgtcgctcagcctcaccgagacgcaggtgaagatc

SEQ ID NO: 447 - DNA, 1901 bp, Homo sapiens
gcggcgagtggagcgggagccgactggaagaagggctctagggagggggctgtggctgctggggtccgaggtggggccgggtacaccagccccatcactgtttgcagagagtcagggaggcggaaaagacacgcgctctaggctcccatcagggcacatggcccgggcccatcccccgcgcgtctccccggctgcggggcgcggggggctgccgggtgcgcttggctgtggcgcggcgcgttggagactttattgcgatgggacgataagaggggcgggggcggggtcctgggggccgaggcggcagcgctttaattaaaacggaaattgcggccccgggccgcgcgggggccggagggttccaagcggccccttagctggaagcgtttctccaggacccccccgcaacccccgccacgcccgggctgccccctcccgccaggccctgccggacccggcgccgtcttctcctccttgtcacccgcggtcgcttcgggcggggatcggtgccaccgagcgcaaagcctgcctcgccccccttccccgtcccccccatctcccaccgcccagtccccggcggcgatgagacagagcggcgcctcccagcccctgctgatcaacatgtacctgccagatcccgtcggagacggtctcttcaaggacgggaagaacccgagctgggggccgctgagccccgcggttcagaaaggcagcggacagatccagctgtggcagtttctgctggagctgctggctgaccgcgcgaacgccggctgcatcgcgtgggagggcggtcacggcgagttcaagctcacggacccggacgaggtggcgcggcggtggggcgagcgcaagagcaagcccaacatgaactacgacaagctgagccgcgccctgcgctactactacgacaagaacatcatgagcaaggtgcatggcaagcgctacgcctaccgcttcgacttccagggcctggcgcaggcctgccagccgccgcccgcgcacgctcatgccgccgccgcagctgctgccgccgccgcggccgcccaggacggcgcgctctacaagctgcccgccggcctcgccccgctgcccttccccggcctctccaaactcaacctcatggccgcctcggccggggtcgcgcccgccggcttctcctactggccgggcccgggccccgccgccaccgctgccgccgccaccgccgcgctctaccccagtcccagcttgcagcccccgcccgggcccttcggggccgtggccgcagcctcgcacttggggggccattaccactagacggggcggtcgggtgcctgcggcctcgcccgcacgcctagagtctcgcccgatcccatcggcatcccggggagggcccgggagcctccgtcaaccgtcctctaatccagagtttactccacctgccgcacttagcagggggacgggaccgaagctccctcaatccttgtctggtactagatttgctcctgtcccaccccgcagtcccctgaggagggcgatgtgcgccctctttcactttttttcttctaggtctccaggtcccggaggggatttgtggacctctcttgtctccccaccactccagtgcatttccgcctggctcctagaagccccattcaatatcactactctttaacgagtgccaaatcttttcccacttttgctcttccccaaggaactgctcccacctcagcacgtggaggcctctcacggtcctccttcctgggacctgagcaggtttggtgaaagccaccgtcctccgtgacacacggcccccttcctcctgtccccacactcccaggagaaactcccggtgtgtttctgaccctttcagccccattaaagctcctgagctctcaaaaaaaaaaaaaaaaaaaaaa

SEQ ID NO: 448 - DNA, 1600 bp, Homo sapiens
ggccaaaagttgacttattttgaatggactacattatagcttaactagattgtacgagtgcttatcaactaatatgttaaaatatggtaattccttttttttttttttgagatggagtccagcctgggtgacagagtgagaccctatttcaaaaaaataaaaattggaagaagagcttaaaaaagataagattttaaagagtcccaagttatttaagttgagtgtaattgtcatttaaggaaggcaaatgagtttatcatccttcttaaagagcatctcttttaactgttggacaaaaccataactttgtcattttacaaggaagaacctcttaagaagtcctcagaaccagaagcaatgtgaactctcagcgctggtcctggtgggtttgctgaccatgactgggcaagccgttctttttgctgccatcttcctcatcataaagtgtggaacataggcaattgctttgagattcttggatagaagaggacaacattctgcacctgcccccttttttaaatctttggggaaagatgagtaactttccccactactctgccttcctgttcagtaactcttacttttgcctgaagtaacagcatcttctacttctccatctagagatttttgtgtgtgtgccatcaaggttagcaaactttatacgtagcctaacacttaaaaaatgcactcattatcttaaacctaataaattccagagtttattttggttctcctctgttgcccttcctaaaaaatgagctgaagatgacagtatttttctttacatgcttggttatgacttttaaagttttatttaaataaatgttgaagctcaagtttaaagaagcgttgcagaggcccacggtctcctgggtcccggccacctgtccatattccacatttgctgactgtgctccctgcactccactcaagttgagagttcaaatagtcttgaaggggaatcagcttcaggatggaaggacccaggagaggccccgaggtgggagggttctgtaaatacagactactgcgagtgtccagagctctctgccatgatacttccttgggactgacttggctgagaacgtgttctgtcagaggatttgttagaactctgcccttttgtctgaaactcaaggccaaggagaatgataggagacttaggacagagctgacccttgcaccaggctgggaggctgcagcccttttagatgccacttactgtaagtggccagaataccagagaggtgggttccatggtcaaatgcacagtaggtgtttacctttacatttggatcaccttgtagtctttaaattcttggtccctgaggccaagtccacaacttgccttctagtcacttgcctgcccgcagtggtggtggatgtgttagctggtagatttggaatcagtcaccagtctttctgtactgtcttggttagctctatataagtaggggcagcttagccctgaggcccagagacctgctgtcctttttctccttgagggaggaaataaaactgcggaatacaatgtccttccatagcatgggaagaagaaaataaacatctcctttccaacaaaaaaaaaaaaaaaaaaaaa

SEQ ID NO: 449 - DNA, 993 bp, Homo sapiens
attccacgttcttaactgttccattttccgtatctgcttcgggcttccacctcatttttttcgctttgcccattctgtttcagccagtcgccaagaatcatgaaagtcgccagtggcagcaccgccaccgccgccgcgggccccagctgcgcgctgaaggccggcaagacagcgagcggtgcgggcgaggtggtgcgctgtctgtctgagcagagcgtggccatctcgcgctgcgccgggggcgccggggcgcgcctgcctgccctgctggacgagcagcaggtaaacgtgctgctctacgacatgaacggctgttactcacgcctcaaggagctggtgcccaccctgccccagaaccgcaaggtgagcaaggtggagattctccagcacgtcatcgactacatcagggaccttcagttggagctgaactcggaatccgaagttggaacccccgggggccgagggctgccggtccgggctccgctcagcaccctcaacggcgagatcagcgccctgacggccgaggcggcatgcgttcctgcggacgatcgcatcttgtgtcgctgaagcgcctcccccagggaccggcggaccccagccatccagggggcaagaggaattacgtgctctgtgggtctcccccaacgcgcctcgccggatctgagggagaacaagaccgatcggcggccactgcgcccttaactgcatccagcctggggctgaggctgaggcactggcgaggagagggcgctcctctctgcacacctactagtcaccagagactttagggggtgggattccactcgtgtgtttctattttttgaaaagcagacattttaaaaaatggtcacgtttggtgcttctcagatttctgaggaaattgctttgtattgtatattacaatgatcaccgactgaaaatattgttttacaatagttctgtggggctgtttttttgttattaaacaaataatttagatggtgaaaaaaaaaa

SEQ ID NO: 450 - DNA, 1402 bp, Homo sapiens
ggggacgaagggaagctccagcgtgtggccccggcgagtgcggataaaagccgccccgccgggctcgggcttcattctgagccgagcccggtgccaagcgcagctagctcagcaggcggcagcggcggcctgagcttcagggcagccagctccctcccggtctcgccttccctcgcggtcagcatgaaagccttcagtcccgtgaggtccgttaggaaaaacagcctgtcggaccacagcctgggcatctcccggagcaaaacccctgtggacgacccgatgagcctgctatacaacatgaacgactgctactccaagctcaaggagctggtgcccagcatcccccagaacaagaaggtgagcaagatggaaatcctgcagcacgtcatcgactacatcttggacctgcagatcgccctggactcgcatcccactattgtcagcctgcatcaccagagacccgggcagaaccaggcgtccaggacgccgctgaccaccctcaacacggatatcagcatcctgtccttgcaggcttctgaattcccttctgagttaatgtcaaatgacagcaaagcactgtgtggctgaataagcggtgttcatgatttcttttattctttgcacaacaacaacaacaacaaattcacggaatcttttaagtgctgaacttatttttcaaccatttcacaaggaggacaagttgaatggacctttttaaaaagaaaaaaaaaatggaaggaaaactaagaatgatcatcttcccagggtgttctcttacttggactgtgatattcgttatttatgaaaaagacttttaaatgccctttctgcagttggaaggttttctttatatactattcccaccatggggagcgaaaacgttaaaatcacaaggaattgcccaatctaagcagactttgccttttttcaaaggtggagcgtgaataccagaaggatccagtattcagtcacttaaatgaagtcttttggtcagaaattacctttttgacacaagcctactgaatgctgtgtatatatttatatataaatatatctatttgagtgaaaccttgtgaactctttaattagagttttcttgtatagtggcagagatgtctatttctgcattcaaaagtgtaatgatgtacttattcatgctaaactttttataaaagtttagttgtaaacttaacccttttatacaaaataaatcaagtgtgtttattgaatggtgattgcctgctttatttcagaggaccagtgctttgatttttattatgctatgttataactgaacccaaataaatacaagttcaaatttatgtagactgtataagattataataaaacatgtctgaagtcaaaaaaaaaaaaaaaaaaaaaaaaaaaaaaaaaaaaaaaa

SEQ ID NO: 451 - DNA, 1167 bp, Homo sapiens
attctgagccaagtccggtgccaagcgcagctagctcagcaggccgcagcggtggcctgagcttcaggacagccagctccctcccggtctcgccttcctcgcggtcagcatgaaagccttcagtcccgtgaggtccattaggaaaaacagcctgttggaccaccgcctgggcatctcccagagcaaaaccccggtggatgacctgatgagcctgctgtaaaacatgaatgactgctactccaagctcaaggagctggtgcccagcatcccccagaacaagaagtggagcaagatggaaatcctgcagcacgtcatcgactacatcttggacctgcagatcaccctggacttgcatcccactattgtcagcctgcatcaccagagacccgggcagaaccaggcgtccaggacgccgctgaccaccctcaacacggatatcagcatcctgtccttgcaggcttctgaattcccttcggagttaatgtcaaatgacaggaaagcactgtgtggctgaataatcatgacttcttttttttctttgcacaacaacgacaacaacaaattcacagaaccttttcagcgctgaacttatttttcaaccatttcacaaggaggcagttgcatgacttttaaaagcaaaaaaggagaaactagatgaaaaagacttttaaatgccctttctgcagttggaaggtttttttcatatactattcccaccatggggagcagaaacgttaaaatcacaaggaattgcccaatctaagcagactttgccttttttcaaaggtggagtgtcaataccagaaggatccagtatcagtctcttaaatgaagtcttttcggtcagaaattacctttttgacacaagcctactgaatgccgtgtatatatttatatataaatatatcttatttaagtgaaaccttgttaactctttaattagagttttcttgtatagtggcagagatgtctatttctgcattaaaaagtgtaatgatgtacttattcatgatgaactttttataaaagtttaaacttttagttgtaaacgtaacccttttatacaaaataaatcagtgtgtttattgaatggtgattgcctcgtttatttcagaggaccagtgctttgattttttattatgctatgttataactgaaccaaataaa

SEQ ID NO: 452 - DNA, 1288 bp, Homo sapiens
gctaaaggcggactggcagggggcagggaagctcaaagatctggggtgctgccaggaaaaagcaaattctggaagttaatggttttgagtgatttttaaatccttgctggcggagaggcccgcctctccccggtatcagcgcttcctcattctttgaatccgcggctccgcggtcttcggcgtcagaccagccggaggaagcctgtttgcaatttaagcgggctgtgaacgcccagggccggcgggggcagggccgaggcgggccattttgaataaagaggcgtgccttccaggcaggctctataagtgaccgccgcggcgagcgtgcgcgcgttgcaggtcactgtagcgggacttcttttggttttctttctctttggggcacctctggactcactccccagcatgaaggcgctgagcccggtgcgcggctgctacgaggcggtgtgctgcctgtcggaacgcagtctggccatcgcccggggccgagggaagggcccggcagctgaggagccgctgagcttgctggacgacatgaaccactgctactcccgcctgcgggaactggtacccggagtcccgagaggcactcagcttagccaggtggaaatcctacagcgcgtcatcgactacattctcgacctgcaggtagtcctggccgagccagcccctggaccccctgatggcccccaccttcccatccagacagccgagctcactccggaacttgtcatctccaacgacaaaaggagcttttgccactgactcggccgtgtcctgacacctccagaacgcaggtgctggcgcccgttctgcctgggaccccgggaacctctcctgccggaagccggacggcagggatgggccccaacttcgccctgcccacttgacttcaccaaatcccttcctggagactaaacctggtgctcaggagcgaaggactgtgaacttgtggcctgaagagccagagctagctctggccaccagctgggcgacgtcaccctgctcccaccccacccccaagttctaaggtctcttcagagcgtggaggtgtggaaggagtggctgctctccaaactatgccaaggcggcggcagagctggtcttctggtctccttggagaaaggttctgttgccctgatttatgaactctataatagagtatataggttttgtaccttttttacaggaaggtgactttctgtaacaatgcgatgtatattaaactttttataaaagttaacattttgcataataaacgatttttaaacacttgtgtatatgatga

SEQ ID NO: 453 - DNA, 2389 bp, Homo sapiens
aggcgcggttgtgagtagtaccgggagtggggtgatcccgggctaggggagcgcggcggccgcgatcgggcttagtcggagctccgaagggagtgactaggacacccgggtgggctacttttcttccggtgcttttgctttttttttcctttgggctcgggctgagtgtcgcccactgagcaaagattccctcgtaaaacccagagcgaccctcccgtcaattgttgggctcgggagtgtcgcggtgccccgagcgcgccgggcgcggaggcaaagggagcggagccggccgcggacggggcccggagcttgcctgcctccctcgctcgccccagcgggttcgctcgcgtagagcgcagggcgcgcgcgatgaaggcggtgagcccggtgcgcccctcgggccgcaaggcgccgtcgggctgcggcggcggggagctggcgctgcgctgcctggccgagcacggccacagcctgggtggctccgcagccgcggcggcggcggcggcggcagcgcgctgtaaggcggccgaggcggcggccgacgagccggcgctgtgcctgcagtgcgatatgaacgactgctatagccgcctgcggaggctggtgcccaccatcccgcccaacaagaaagtcagcaaagtggagatcctgcagcacgttatcgactacatcctggacctgcagctggcgctggagacgcacccggccctgctgaggcagccaccaccgcccgcgccgccacaccacccggccgggacctgtccagccgcgccgccgcggaccccgctcactgcgctcaacaccgacccggccggcgcggtgaacaagcagggcgacagcattctgtgccgctgagccgcgctgtccaggtgtgcggccgcctgagcccgagccaggagcactagagagggagggggaagagcagaagttagagaaaaaaagccaccggaggaaaggaaaaaacatcggccaacctagaaacgttttcattcgtcattccaagagagagagaggaaagaaaaatacaactttcattctttctttgcacgttcataaacattctacatacgtattctcttttgtctcttcatttataactgctgtgaattgtacatttctgtgttttttggaggtgcagttaaacttttaagcttaagtgtgacaggactgataaatagaagatcaagagtagatccgactttagaagcctactttgtgaccaaggagctcaatttttgttttgaagctttactaatctaccagagcattgtagatattttttttttacatctattgtttaaaatagatgattataacggggcagagaactttcttttctctgcaagaatgttacatattgtatagataaatgagtgacatttcataccatgtatatatagagatgttctataagtgtgagaaagtatatgctttaatagatactgtaattataagatatttttaattaaatatttttttgtaaatattatgtgtgtgtttttttttaatctatgggaatatttcttttggaaaatcatttttcagctcaattacagagctcttgatatcttgaatgtcttttctgtttggcctggctcttaatttgcttttgttttgcccagtatagactcggaagtaacagttatagctagtggtcttgcatgattgcatgagatgtttaatcacaaattaaacttgttctgagtccattcaaatgtgtttttttaaatgtagattgaaatctttgtatttgaagcatacatgttgaaaatacaccttatcagtttttaagtacagggttttatagtgtaatatatacagagtaagtgtttgtttttgtttttcaactgaggtcaaaatggattctgaatgattttgcatatgggatgaggaaatgcttggatccttaaggagtttacgaaatctgctgttttatcaaagtgaaaaaaaattgcttattactcttcattttacactaaagcttaatgtcactaagtttcatgtctgtacagattatttaaatcatggaaatgaaaaaaatgttctctgcttgctaccaaaggacaaactcttggaaatgaacactttctgctttccttcctccaaagaattaataggcaacagtgggagaaaaaaaaggcataatggcaaatccttcaagcagggataaaagtcgatcttcaaacattaacttaagcagaccaaaaattctgatgaccgcatctagattatttttttataaaaatgattttcactatagctatgttacgctaagctactgtcccatctcttgtgatgtgtaacttttacatgtgaatattaaagtagatttctctgtcttgtaaaaaaaaaaaaaaaaaaaaaaaaaaaaaaaaaaaaaaaaaaaaaa

SEQ ID NO: 454 - DNA, 3955 bp, Homo sapiens
gtgcgtaacgcacgggcccggcggggaacaccggtccgctgtaacaccggcccggcgcagaagcgggacgtcggcttctaggggcccaggccggcggcggcgatggcctcggcagctgtggagagcttcgtgaccaagcaactggacctgctggagcttgagagagacgcggaggtggaggagcgcaggtcctggcaggagaacatctctctgaaagagctccagagccgaggcgtgtgtttgctgaagctgcaggtatccagccagcgcactgggctgtacggacggctgctggtcacctttgagcccaggcgatacgggtccgcggcagctcttcccagtaacagctttacttctggtgatatcgtgggcctgtacgatgctgctaatgagggcagtcagctggccactgggatcttgacccgggtcacccagaagtcggtcacggtggcctttgatgagtcccacgatttccagttgagcttggaccgagagaattcctacagactgttaaaacttgccaatgatgtcacttacaggcgactgaaaaaagccctgattgctctaaagaagtatcattctggcccagcctcctcactcatagaagtgctctttggcagatctgctcccagtcctgccagtgaaatacacccgctgacattcttcaacacctgcctggacacctcccagaaagaagcggttttatttgcgctgtctcagaaagaacttgccatcatccatggacctcctggcactgggaaaaccacgactgtggttgagatcattcttcaagctgtgaaacaaggcttaaaggttctgtgctgcgccccctccaacatcgccgtggacaatctggtggagcgcctggctctgtgtaagcagcggattctgcgcctgggacaccctgcccgcctcctggagtccattcagcagcactccctggatgcggttttagcgcggagcgacagtgcccagattgttgcagatatcaggaaggacatcgaccaggtctttgtgaaaaacaaaaagacccaggataagagagagaaaagtaattttcgaaatgaaattaagctgttaagaaaagaactgaaggagagggaagaagcagctatgctcgagagcctcacttcggcaaacgtggtccttgcaacaaacacaggtgcgtctgccgatggccccctgaagttgctgcccgagagctacttcgacgtggtggtcattgacgagtgtgcccaggccctcgaggcgagctgctggatccccctgctgaaggccagaaagtgcatcctggcgggcgatcacaagcagctgccccccaccacagtctctcacaaggctgcgctggcaggactgtcactcagcctgatggaacgcctggctgaggagtacggcgcgagggtggtgcggacactgacggtgcagtaccgcatgcaccaggctatcatgcgctgggcctcagacaccatgtaccttgggcagctcacagcccactcttccgtggcaaggcacctcctgagggacctcccaggtgtggctgccacagaagagacgggtgtgcccctgctcttggtggacaccgccggctgcgggctgtttgagctggaggaggaggacgaacagtcgaaagggaaccctggcgaagtccgcctcgtcagtttgcacatccaggctctggtggacgctggtgttccagcccgtgacattgctgtggtctcgccatacaacctccaggtggacctgctcagacagagccttgtgcacaggcaccctgagcttgaaatcaagtctgtcgatggcttccaaggccgagagaaggaggccgtgatactgtccttcgtcagatccaacaggaaaggtgaagttggttttcttgctgaggaccggaggatcaacgtggctgtcacccgtgcccgacgccacgtggcggtcatctgtgactcccgtactgtcaacaaccatgcatttttgaagaccctggtggagtatttcacacagcatggggaagtacgcacggcctttgagtatcttgacgatattgtcccagaaaactattcccatgagaactcccagggttccagccacgctgccaccaagccccagggacctgctacgtccaccaggaccggaagccagcggcaggagggaggccaggaggctgcagcacctgccagacagggccggaagaagccggctgggaagtctctggcctctgaagctccatctcagcccagcctcaacggaggcagcccagagggagtggagagccaagatggcgtggaccacttccgggccatgatagtggagttcatggccagcaagaagatgcagttggagtttcctccttccctcaattcccacgacaggctgcgggtccaccaaatagccgaggagcacgggctgaggcacgacagttccggggaagggaagaggaggttcatcactgtgagcaagagggccccgcgaccccgagcagccctgggacccccagcagggaccggtggcccagcccctctccagccagtgccccctacccctgcgcagacagagcagcctcccagggagcagcgtggcccagaccagcctgatctgaggacgctgcacctggagagactgcagagggtcaggagcgcgcaggggcagcccgccagcaaggagcagcaggcctcagggcagcagaaacttccagaaaagaaaaagaaaaaagccaaaggacatccggccacagatctgcccacggaggaggactttgaggccctggtttctgccgccgttaaggctgataacacctgcggctttgccaagtgcacagccggcgtcacaaccctgggccagttctgccagctctgcagccgccgctactgcctcagccaccacctgcccgagatccatggctgcggtgagagggctcgcgcccatgcccggcagagaatcagccgggaaggggtcctctatgccggcagcgggaccaagaacggatccctggacccagccaagagggcccagctgcagaggaggctggataagaagctgagtgagctcagcaaccagaggaccagccggaggaaggagagggggacgtgaccggccgcatccttgcacgccccgcggagctctctccatggtagcccagggcgctggcagaccatgctccgcctccaccagggccacagaggagcggaggggcctatgggggaggagcggagggccctgttggggaaggttgggtttttggaccccagggataagcttttccgatgtcacaatgtggaggaaagcacctgggggacaacagtgctcgtgcaggtggggcttgggaaatgcacgtcccttccccttactccccgccaaaacccacatcccagcctctggatcctggggaaggttccagtccctggagaatacccagggcctcaaacttgaagtcactcctccaatgtctgggacttgccagctcagcccgttaggatgagggtgctgagaggaaacaggaaacaagactgcgaatggcgctcaggcagggagcagggagtggcgtttggcttgcacgttcccatgtggccagatgctggggccactttccttctgtctgctggtgactgcagtgttccccctcctcctcaccacggggctcctgtgagtctggggggcacctctttctggcctgtgcacctctctctggcttataaaggtgcctggcctgtgccagcccctccttgttgcgcctcaccgtggggaccaggtgagccggctctcccacgtggttgtcccgggaaagctgccccacagcctcagcatcttcagcacttaccgatccagagcctcccggccttctccggtgtcctgtaccaactcttctatttaagagaacctcagatgatgtacctgagcctcagggttttgtttcagagggatataaattatttaaaaattaaatgaaaacgttgcacactga

SEQ ID NO: 455 - DNA, 5262 bp, Homo sapiens
ccgcgcgtgctcccgcccctcgccgccgctcgctcgctcgccggccggcggcctccgctcggccccctccctcagctccggtgcgcggcggccgacgacccgcgcggcctgggcctcggcccgcgccaccggcgcccgcgcggagcggcccgggggccctcacgcaggcccatggcggcggccgcggcggcgctctcgggcgcgggcacgccacccgcgggcggcggggccgggggcggcggggccgggggcggcgggtccccgccgggcggctgggccgtggcgcgcctggagggccgcgagttcgagtatctgatgaagaagcgctcggtgaccatcggccgcaactcgtcgcagggctcggtggacgtgagcatgggccactcgagcttcatctcccggcgccacctcgagatcttcacgcccccgggcggcggcggccatggcggggccgctccggagctgccgcccgcgcagcccaggcccgacgccggcggcgacttctacctgcgctgcttgggcaagaacggggtattcgtggacggcgtgttccagaggcgcggggcgccgccgctgcagctgccgcgcgtgtgcacattcaggttcccgagcacaaacatcaagataacgttcactgccctgtccagcgagaagagagagaagcaggaggcgtctgagtctccagtgaaggccgtacagccacacatctcgcccctgaccatcaacattccagacaccatggcccacctcatcagccctctgccctcccccacgggaaccatcagcgctgcaaactcctgcccctccagcccccggggagcggggtcttcagggtacaaggtgggccgagtgatgccatctgacctcaatttaatggctgacaactcacagcctgaaaatgaaaaggaagcttcaggtggagacagcccgaaggatgattcaaagccgccttactcctacgcgcagctgatagttcaggcgattacgatggctcccgacaaacagctcaccctgaacgggatttatacacacatcactaaaaattatccctactacaggactgcggacaagggctggcagaattcaattcgccacaatctctctctgaatcgttatttcatcaaagtgccgcgttcccaggaagaaccaggcaaaggctcgttctggaggatagacccagcctctgaaagcaaattaatagaacaggcttttaggaaacgacggcctaggggcgtgccctgctttagaacccctctgggaccgctctcttctaggagtgccccagcctctcccaatcacgcgggagtgctgtctgctcactctagtggcgcccagacccctgagagcctgtcgagggaaggttcgccggcccccctggagcctgagcctggcgctgcacagcccaaactcgctgtcatccaggaagcccggtttgcccagagcgccccagggtcacctctgtccagtcagccagtcttaatcaccgtccagcggcagctaccacaggccatcaagcctgtcacctacactgtggccaccccagtgaccacctcgacctcccagccacccgtcgtgcagacggttcacgtcgtccaccagatcccagcggtgtcggtcaccagtgtggccggactggccccagcgaacacgtacactgtctctggacaagctgtggtcaccccggcagccgtgctggcccctcctaaggcagaggcccaggagaatggagaccacagggaagtcaaagtgaaagtagagcctattcccgccattggccacgccacgctcggcactgccagccggatcattcagacggcacagaccaccccggtccagacggtgaccatagtacaacaggcacctctaggtcaacaccagctaccaataaaaactgtaacacaaaacggcactcacgtggcatcagtccccactgcggtccacggccaggtgaacaatgccgcggcgagtcctttgcacatgttggcaacacacgcatccgcatcggcctccctgcccacaaagcgccacaacggtgaccagccggagcagccggagctgaagcggatcaagacagaagacggcgagggcatcgtcattgccctgagcgtggacacgccaccggcagccgtaagggaaaagggtgtccagaactagcgaccgggagagcttttctttaacgatatcaactctgtggtgccaaaaggagacgcggcctcccgccagcactcgggggtgcagggccctgtggttggacttcacctctcagcactgaaaacccaaaacccagctggccttaacactccttaaagacagaagtcacacttgaacaaaacccacacacaacaaaacctgatttgggagacggtgtctccactgagcacctgctgggctgagcttctacctacgagtgaaactctgtcctcccgcgaggaccaggcatcgctgtgtgaggacggcacggccagcgcctgctgtgagtgggtctcccaagactaggcctcaggacgcggggggagccatccccgccgccctcacaggacccaccaggcagcggagacatgtggaattagagtattttgaggtgtcctttctttacaaaataatggggtcttgggcatttcacatcactccatttctactgagactttcagaatcacacaggccctttccgtggatttcatttggggcaaagaaacaacgtagttttgtttttgttttcagcctatggaatgatttccttttgtctgtcttgttcaagttcagacgaagctactctggcatctgcacatttccgtgttacagcagctgcctgatgaattttatccacctccatttcagcatgtggctcgcgtggacaggtggacggacgctgtggccgcatggaaccttgagaacccagggacgagccagtgccgggaaggaactgccgggactcaccgagctgcacttaactgttctctttctggctattttttgttgtttgtttctttgtgttgactttgtccctggcaaaattttccactctgagtaaaacaagtctcctaagtattgtgtatgtttaaaacgacagaaccatttctacttcatttggaaaaagattcagtcttttatcacaggcccttttgaaactcagatcccaggtctctccgtggtatgtttgtatttggggtgtccctccggctctaggcggcctctgacctgctgtctactccccaccttcggtgagcggccgccatggtggagcagggtccgagccacgtcctgcagggcacgtctggggcatttcctgttttgtggtaggaaatgtccctgacctttcagaaccgaacccaatcctgaggctgactcctctacggaaaatgaggacaggacgggggtgagggaatgagagtgggaggtccctgcacctcctcgcccggctcctcaggaagaaaaccgctggcccttcccgagtgtgccggccgagggccgagggccgtgcacatggggagagggcgtcagcctgatggctgagcttttaaatgtcatcatcataacattatttatttaaatgtagttattttggtatttaatttttttttagagaggaaaaaacctgtattttcctggtgggatgaaatagggatgaaatggctcagaatggtatatttaggcaattttaaaacatttattatttacataaagaccaaatatgatgaatctgttccgtgaattgtgtcggccctcagcatggggctggggcagcgtcactgcggtgacgcccattgaaaggtatgaaatgactgcacactagctggattatcactcagccgtttaagaaataaaagcaaaaccatcacgtgactgagaccgtgtgtgtgaccgcagcaaagcgcagcgtgtggatggatcagagcccctcggtgcagctgtctgcatcttccaagcactttacagataccttggaatgtatatttttgtcttcttactcagaaggtttgcagtttgtaaaataatcaggattctgctctgtcctgtgtgtggggtcagctccctccacagagggctccagctctgttggtcacagctgatggggttctctgattgataggagacgagctcttgagctctaaggaacagtgaggtcgccggtggggagcttggctgggacaccaagcaaatgcatcgtatgtccccttggagacgtttttatgcagctgtgtatgttactatccagaaggagtcgggggtagactttcccgtgtaagctcagtccataaactggttacttctgatcctggaacgtggacttcacatgataggtctggatctgtttctgttgggatcacaggtaaggaaaatgtccattcaaatggtaaagaagggaggagggtgttttttttttttttttttgccgtaggcaccattctgcatcttgaacccagactgaagtgtgcctctcacagatggaaggtgcacacgctcctgtctcctcctcactctgccacgttcacttggctttttcattggtacctaggaatttaagaatatcgaagcgagagcagtaacaaaccatagatgagcagactcccacaccgggttttcttgcccgtctttaaggcactgtttctaaattttgaacttagctctgaatccccaagaacttgagcacagcaagggttgctgagctgctgtcgccgcagccctggcccctggtgctggagctgcagcacctttgggagaggtcctgcgtcgtcctcagctgcgtcgctgtgaactcccgctctccactgtgttcctcagtgtctgcttttcaggaagtctgctgtgacctttgcccaacttctgagctcctcagggactaggaacaatttcagtagctttgccctgaaccaaacgagaaaacaaaagggaactcccgtatgacccacgtcacgtggtgcactcagagtgtgtgcggcatgatcctcggttgctcctcctctcactttagtagagtacgcggtggacagctgatctccttcagtcgtctacccacttccgtcattgtcctccgctagaataacagagtagttggtagtcatggccagaaggggggtgggggcagtgtgaggacttggggtttctgtgctgtgtgacacaaggagataagtgacaatcttgaagtcctaacttccactattctagaaagtatagtggtgatttgtgtgcaaagatttgaagttttaaaaaagtaccaagttcctgaaattcaataaaatatttttattaattttaatggaa

SEQ ID NO: 456 - DNA, 1637 bp, Homo sapiens
ggcaagacgcctcttcagttgtctgctactcagaggaaggggcggttggtgcggcctccattgttcgtgttttaaggcgccatgaggggtgacagaggccgtggtcgtggtgggcgctttggttccagaggaggcccaggaggagggttcaggccctttgtaccacatatcccatttgacttctatttgtgtgaaatggcctttccccgggtcaagccagcacctgatgaaacttccttcagtgaggccttgctgaagaggaatcaggacctggctcccaattctgctgaacaggcatctatcctttctctggtgacaaaaataaacaatgtgattgataatctgattgtggctccagggacatttgaagtgcaaattgaagaagttcgacaggtgggatcctataaaaaggggacaatgactacaggacacaatgtggctgacctggtggtgatactcaagattctgccaacgttggaagctgttgctgccctggggaacaaagtcgtggaaagcctaagagcacaggatccttctgaagttttaaccatgctgaccaacgaaactggctttgaaatcagttcttctgatgctacagtgaagattctcattacaacagtgccacccaatcttcgaaaactggatccagaactccatttggatatcaaagtattgcagagtgccttagcagccatccgacatgcccgctggttcgaggaaaatgcttctcagtccacagttaaagttctcatcagactactgaaggacttgaggattcgttttcctggctttgagcccctcacaccctggatccttgacctactaggccattatgctgtgatgaacaaccccaccagacagcctttggccctaaacgttgcatacaggcgctgcttgcagattctggctgcaggactgttcctgccaggttcagtgggtatcactgacccctgtgagagtggcaactttagagtacacacagtcatgaccctagaacagcaggacatggtctgctatacagctcagactctcgtccgaatcctctcacatggtggctttaggaagatccttggccaggagggtgatgccagctatcttgcttctgaaatatctacctgggatggagtgatagtaacaccttcagaaaaggcttatgagaagccaccagagaagaaggaaggagaggaagaagaggagaatacagaagaaccacctcaaggagaggaagaagaaagcatggaaactcaggagtgacattcccttcactccttttcctacccaagggggaagactggagcctaagctgcctgctactgggctttacatggtgacagacatttccgtgggatagggaagatagcaggaagaaaagtaaactccatagaagtgtcattccactgggttttgatattggcttagctgccagtctcccatttgtgacctatgccatccatctataatggaggataccaacatttcttcctaatattctataatctccaactcctgaaaacccctctctcaactaatactttgctgttgaaatgttgtgaaatgttaagtgtctggaaatttttttttctaagaaaaactattaaagtacttcctagtaaaaaaaaaaaaaaaaaaaaaaaaaa

SEQ ID NO: 457 - DNA, 6123 bp, Homo sapiens
aaagggggcggggcttcagccggtcacgtgttcccgcacctccccggcgcgcgcctgcccgcccgcccgctcgcccccggtccggactcctcctcctcctcttctcgccattgcagttggacccagcagcccggcgcgcaccgcgtggcttttgggggcagaccccggcgggctgtggcaggagggcggcggcggcggctgcggtcgaagaaggggacgccgacaagagttgaagtattgataacaccaaggaactctatcacaatttgaaaagataagcaaaagtttgatttccagacactacagaagaagtaaaaatgcgtccaatgcgaatttttgtgaatgatgaccgccatgtgatggcaaagcattcttccgtttatccaacacaagaggagctggaggcagtccagaacatggtgtcccacacggagcgggcgctcaaagctgtgtccgactggatagacgagcaggaaaagggtagcagcgagcaggcagagtccgataacatggatgtgcccccagaggacgacagtaaagaaggggctggggaacagaagacggagcacatgaccagaaccctgcggggagtgatgcgggtgggcctggtggcaaagggcctcctactcaagggggacttggatctggagctggtgctgctgtgtaaggagaagcccacaaccgccctcctggacaaggtggccgacaacctggccatccagcttgctgctgtaacagaagacaagtacgaaatactgcaatctgtcgacgatgctgcgattgtgataaaaaacacaaaagagcctccattgtccctgaccatccacctgacatcccctgttgtcagagaagaaatggagaaagtattagctggagaaacgctatcagtcaacgaccccccggacgttctggacaggcagaaatgccttgctgccttggcgtccctccgacacgccaagtggttccaggccagagccaacgggctgaagtcttgtgtcattgtgatccgggtcttgagggacctgtgcactcgcgtgcccacctggggtcccctccgaggctggcctctcgagctcctgtgtgagaaatccattggcacggccaacagaccgatgggtgctggcgaggccctgcggagagtgctggagtgcctggcgtcgggcatcgtgatgccagatggttctggcatttatgacccttgtgaaaaagaagccactgatgctattgggcatctagacagacagcaacgggaagatatcacacagagtgcgcagcacgcactgcggctcgctgccttcggccagctccataaagtcctaggcatggaccctctgccttccaagatgcccaagaaaccaaagaatgaaaacccagtggactacaccgttcagatcccaccaagcaccacctatgccattacgcccatgaaacgcccaatggaggaggacggggaggagaagtcgcccagcaaaaagaagaagaagattcagaagaaagaggagaaggcagagcccccccaggctatgaatgccctgatgcggttgaaccagctgaagccagggctgcagtacaagctggtgtcccagactgggcccgtccatgcccccatctttaccatgtctgtggaggttgatggcaattcattcgaggcctctgggccctccaaaaagacggccaagctgcacgtggccgttaaggtgttacaggacatgggcttgccgacgggtgctgaaggcagggactcgagcaagggggaggactcggctgaggagaccgaggcgaagccagcagtggtggcccctgccccagtggtagaagctgtctccacccctagtgcggcctttccctcagatgccactgccgagcaggggccgatcctgacaaagcacggcaagaacccagtcatggagctgaacgagaagaggcgtgggctcaagtacgagctcatctccgagaccgggggcagccacgacaagcgcttcgtcatggaggtcgaagtggatggacagaagttccaaggtgctggttccaacaaaaaggtggcgaaggcctacgctgctcttgctgccctagaaaagcttttccctgacacccctctcgcccttgatgccaacaaaaagaagagagccccagtacccgtcagagggggaccgaaatttgctgctaagccacataaccctggcttcggcatgggaggccccatgcacaacgaagtgcccccaccccccaaccttcgagggcggggaagaggcgggagcatccggggacgagggcgcgggcgaggatttggtggcgccaaccatggaggctacatgaatgccggtgctgggtatggaagctatgggtacggaggcaactcggcgacagcaggctacagtcagttctacagcaacggagggcattctgggaatgccagtggcggtggcggcgggggcggtggtggctcctccggctatggctcctactaccaaggtgacaactacaactcaccggtgcccccaaaacacgctgggaagaagcagccgcacgggggccagcagaagccctcctacggctcgggctaccagtcccaccagggccagcagcagtcctacaaccagagcccctacagcaactatggccctccacagggcaagcagaaaggctataaccatggacaaggcagctactcctactcgaactcctacaactctcccgggggcgggggcggatccgactacaactacgagagcaaattcaactacagtggtagtggaggccgaagcggcgggaacagctacggctcaggcggggcatcctacaacccagggtcacacgggggctacggcggaggttctgggggcggctcctcataccaaggcaaacaaggaggctactcacagtcgaactacaactccccggggtccggccagaactacagtggccctcccagctcctaccagtcctcacaaggcggctatggcagaaacgcagaccacagcatgaactaccagtacagataagcccccgcggggcggagatttctaccttctgcacttactccccatcagaagatcgagttttatgcatcacagttaacatgtcagctggccctccaggcccccgcccccatcccgtccacgttgctgtgtcgtgaggtgcagcgggtcaccctgtggcccgtcctgtgacccatatttagccgtgtttgggactccgtgtcttcaatggtttgttagttgccattacaactttgtctgggtagagtttttgagtttttgcagttcagtatccctctgtctattcacacttcgtgttagtggtaactcagtttgtctttaaatagttacagaagggatacgtcatttgttaatgcttttgtgaagtgagttaaacgagctttctgtattttaatgctttagtgtttcagttttataagtgaagattttattttaaaaaccagtgggaaagagtggggggtttctttttatgtctgggtcattcaggcagtacatctgaattaagctgaatgtagacaaataaagaaaaacaaaactgcgcccgtcttaggcctgggtgtctgacccaccagcagtgcaatgggcaggtttccccactctattcctgctcttgggaaagcagcgtgggccatcaggatggtccctggtccttagagagggtccagttcaggcttctagacattttactcatgctcagcgaaggctggttcctggtcccctgggctgtgtagacccggtgtcccaccaggctccaggctcccaccatctacagaggggcttacagcgcccattctggtcttggggaacccatcacaaaataggctttttctgctccccgattctggtgtagttctaagtacacagtgatgtcctctgtaggggcgtgcctgtggtggaacataacgcagttacaaaagaaagggcaggtgaggcctgggtaaccccagccatggaccgtcagtggctggagggagcttcgtgtctgtgctggagctgcagcctgctcgccatctggaggctcagtggagtggggagttggggttctcataccagcagatttccctagagcgtgattctcccatctgaggcaatcttgcctcccaggggaaattttgcaatgtttggaggatgttgtcacagctagtagcgggtgctctgggatctggtggatagatgccaaggatgctgtcaagcatactgtactgcccagaacagtggcccatagcagggacctgccctatcaaaatatcaggtgtatggaggtggagtcccaacgctagagcagcccttctcagctccaccctgcccggggagggaggaggagctctggtttcagagcagtgccgggattgcctttccccaggatctgtgtcggccatccaggaagaactgtactggccaagcctgggaccacacgtctgcagagatcctgctctgctggcctgagccccaggccttggcctcctgtgcttgggtaaccatggccactgggaaaagcaaggaccgtgtttgactttcttggagaggtgaaagaggtgaaagaacaagttgtgtgctagaaaacttttgaggaattcttatttgtgttagagcagaggaggtcccagataccaagtggcgcctcccaggaaaggctgggagaagaggtggcctggagtaccccgagatcccagcagcgcacacagtggagggatgaggatggatgggtcctaacccctgattttgatgggatgtgttcatgtcctatctcctctcctggacacattaaggggttgggacaagaagagactcctgtgagatcagcagacctcgtgtttaaggagagaatgcctgcctgcaacactcatggagagggacacttcctggccccacctgctaaatacctccaaactctgggcaggcgcctgcattctcaacacaggacttcccttaacagtttccggatcagtgaccaccaccacgttcaggtttctgaatgcagacccaccacgagggatggattccacccgcccgccctgctgcagatacatgcggcacagcaggcacgtgcctggagagaacagctcctgagcacagcacccttggagccctcaccccgctcacgatcctcaccagtgctgatgatgccgtcatgctgctggcctgagacagtatcccagctacaacaggacgacaccgggttcaggaatatgtggctatcaccttgagcactgacagtggccttccaggctagttgccttccaaacgcaggtagccgacctgcaggagggcctacaaacgggcccagcaagagctgggcaacagctggcttgtgaaatgagacaccttgaccaatatgctttgggtggacggtctcctacatgttcagtggaggccaccaggagcatccatgagcggggaaggggtccacacccttacatggcaagttgatacgatggggtgcttggtggatgggccatggaggtccgtgagctggaactgggcacacgccatcccagagggctcaggatgccccaggaaggaaagaagggcaacagactacacgattggacgtgtgtggttgactgggatgaagttggagggaggggcagggccttgcaggggattggtactgatcccagggaggaagtgttggggcttcatgaactaggatgaaaggaggcccctgagccatgacaaggggcacatccaggatttccgccaccctgaatttagtagagctagtaggccctggtcgtcactctgggcagggatgccgtcagccttgagggtcgccacccacctgtgtgttgccctctgtcctggcagggaaacatacaccccttgtctcaccaccaaccttgcttgtgtagtcagcagggctggccctgccccaaggactcactgcatgtacccggacccctaggcctggcctttgcagcatagttgggagcttctggattccatctgcacctgtgagccccatgctggctgtgcactgcgcgggcctgagactgctggatacaatgttgggcaacaactcagccagcctgatggcagcctcagaggcttactctaacccatcccagaataaatggagacttcatgtgttcattgtttcattcactcaaaaaaaaaaaaaaaa

SEQ ID NO: 458 - DNA, 2838 bp, Homo sapiens
gggcgcagagctgggccgagccgtcgccggcgccacgcgagtcccgcagccgccgcgcccgggcaatgggccgggggcactgagggccgccggggccgagcgcggaggggggaccgagccagtgccgtgccctcgggccgcgccaacatgccccgcggcttcctggtgaagcgcagcaagaagtccacgcccgtttcctaccgggtccgcggcggcgaggacggcgaccgcgcactgctgctctcgcccagctgcgggggcgcccgcgccgagcccccggcgccgagcccggtccccgggccgctgccgccgccgccgcccgcggagcgcgcccatgcagcgctcgccgccgcgcttgcctgcgcgcctgggccgcagccacccccgcagggcccgcgggccgcgcacttcggcaaccccgaggctgcgcaccccgcgccgctctacagtcccacgcggcccgtgagccgcgagcacgagaagcacaagtacttcgaacgcagcttcaacctgggctcgccggtctcggccgagtccttccccacgcccgccgcgctgctcggagggggcggcggcggcggcgcgagcggagctggcggaggcggcacctgcggcggcgacccgctgctcttcgcgcccgccgagctcaagatgggcacggcgttctcggctggcgccgaggcggcccgcggcccgggccccggccccccactgccccctgccgccgccctgcggcccccgggaaagcggcccccgccccctaccgccgcggagccgcccgccaaggcagtcaaggccccgggcgccaagaagcccaaggccatccgcaagctgcacttcgaggacgaggtgaccacgtcgcccgtgctggggctcaagatcaaggagggcccggtggaggcgccgcggggccgcgcggggggcgcggcgcggccgctgggcgagttcatctgccagctgtgcaaggaggagtacgccgacccgttcgcgctggcgcagcacaaatgctcgcgcatcgtgcgtgtggagtaccgctgtcccgagtgcgccaaggtcttcagctgcccggccaacctggcctcgcaccgccgctggcacaaaccgcggcccgcgcccgccgccgcccgcgcgccggagccagaagcagcagccagggctgaggcgcgggaggcacccggcggcggcagcgaccgggacacgccgagccccggcggcgtgtccgagtcgggctccgaggacgggctctacgagtgccatcactgcgccaagaagttccgccgccaggcctacctacgcaagcacctgctggcgcaccaccaggcgctgcaggccaagggcgcgccgctagcgcccccggccgaggacctactggccttgtaccccgggcccgacgagaaggcgccccaggaggcggccggcgacggcgagggggccggcgtgctgggcctgagtgcgtccgccgagtgccacctgtgcccagtgtgcggagagtcgttcgccagcaagggcgctcaggagcgccacctgcgcctgctgcacgccgcccaggtgttcccctgcaagtactgcccggccaccttctacagctcgcccggccttacgcggcacatcaacaagtgccacccatccgaaaacagacaggtgatcctcctgcaggtgcccgtgcgcccggcctgctagagcgcgccctccaccccggcccccgaactgtgccttcgcttggagacccacaaagagagtgcgccctgcacgccccgaacccgagtccgcgctgggggagcctcgcccccgcccccaccgggtgaaagtgtcgtctccgcttctctcggtgtggcgtgacggtaaccccatactctccttttgactccttttggaacccccacttttacgttgtgtccctccgcctcccccatggcgcaacaggagtcagtctctttctgtacaagggagaaaagctgtacgcgtttgtctcgtggttggaagcctccccttggcggggagaagctttttttcttgctagtattcgctgtgttcatggtctagaaatgcggtctggtctcgcctcgcctaccaatctctgctctctatgtatgtagcgtacgggttgttttgggtgaatcttgaggaataaatgcctttatatttcacaggctgtaaattgaacttcccacacgattagctttattatggcttgtgaactgctggagtctggctttacctttttgtatgtgaacaaatcaaattgcttaaaaaagagttttctttagtatagccacaaatgccttgaactgttgtctgggattgttttgtggggggagggaagggagtgttccgaagatgctgtagtaactgcctcagtgtttcacgtaagactttttggtttgatcatctttgttgaggtaggactatcagttccctctaaatgtatatgttgatttatgagtaattgttatttattctttatttatttatattaattatgaagattatgatattatttgattgcagatttttttggcgcgctgccccctccccaccctgccactcttgacattccactgtgcgttttagaagagagcctttttctaaagggatctgcttaaagttttaacttttatacctatctgagtgaattacagacaacctatcatttattctgcttcgagggtccccagggcccttgtacaaccgacagctcttacttttaaatgcaatctcttttctacatacattattttcttaattgttagctatttatagaaagcttcaatagaactgtttcaactgtataactatttactattcaaataaaatattttcaaagtcaaaaaaaaaaaa

SEQ ID NO: 459 - DNA, 3024 bp, Homo sapiens
cgggagaaagccccgcccccggcgcccgctcccactcctgattggccgggccagcccggggaggcccggcgggaccccggcccgcgtctcagctataaagatagccccggcatgacagccgcggcgaagctcttctagttcatctgctggccggctctcagtccccgtggcgccccctttcctcttgtcccagagcgctctcgactccaccatgccaaggggattcctggtgaagcgaactaaacggacaggcggcttgtaccgagttcgccttgcggagcgtgtcttccctctgctggggccccagggggcgccgcccttcttggaggaggctcccagcgcctccttgcccggcgcggagcgggcgacaccccccacccgagaggaaccaggaaaggggttgacggcggaggcggcccgggaacagtcggggtcgccatgtcgggcggctggggtgagcccggggacgggcgggcgggaaggcgcggagtggcgggcgggtggcagggaaggtcccgggcccagccccagccccagccccagtccagcgaagccggcaggcgcagagctgcgtcgggcgttcctggagcgctgcctcagctcgcccgtctccgccgagtctttccccgggggcgccgccgccgtggccgctttctcctgctccgtggcgccagcagccgcaccgaccccgggggagcagtttctgctgccgcttcgggcgccgttcccagagcccgcgcttcagccggaccctgcgcccctctcggccgcccttcagagtctgaagcgggcggccggcggcgagcgccgcggcaaggcacccacggactgcgcgtctggacccgcggccgcgggaatcaagaagccaaaggccatgaggaagttgagctttgccgatgaggtgaccacatcccctgtcctgggcctgaagatcaaggaggaggagcccggagcgccgtcccggggcttggggggcagccgcacgccactgggggagttcatctgccagctgtgcaaggagcagtacgcagaccccttcgcgctggcccagcaccgctgctcccgcatcgtgcgcgtagagtaccgctgccctgagtgcgacaaggtgttcagctgtcctgcgaacctggcctcccatcgccgctggcataagccgcgtcctgcggctgcaaacgccgccacagtctcctccgccgacgggaagccgccttcttcgtcgtcttcgtcctcccgggactccggggccattgcatcttttctggcggagggaaaggagaacagccgaatagagcggactgcggatcagcacccgcaggccagggacagctccggggcggatcagcacccggacagcgccccgaggcagggcctccaggtgctgacgcatccagagccaccgctgcctcagggcccctacacggagggggtgttggggcgccgggtacctgtgccgggcagtaccagtggtggcaggggatccgagattttcgtgtgcccatattgccacaaaaagtttcgtcgccaagcctatctgcgcaagcacctgagcactcacgaggcgggctcggcccgtgcgctagcgccgggctttggctccgaacgcggtgccccacttgccttcgcttgcccattgtgcggagcgcacttccctacagcagatatcagggagaagcaccggctgtggcatgctgtccgcgaggagctgctcctgcccgctctggcgggggctcctcccgaaacgtcgggccctagcgggccatctgacgggagtgcccagcaaattttctcgtgcaagcactgcccgtccactttttttagctctccagggctgacccggcacatcaataagtgccacccctcagaaagccggcaagtgctgctgctgcagatgccactgcggcctggctgctgagggacgagagaccaggatgatttcgaggttggccttagaggaaacagatcatgggaatttctgtggggctttcttcaacttgcaagtttactttcattccttcctatgttttaatcccctaaaattctccctgtagtcaatgttccaccagaggagcggacagtgaaatgtaatatccctctctagagcaggtatgtatatggtataaaccttgagatcaaagactgtcagctttaaatccttctcactttccccactaaaataggatttttccccttaaaactctggagaccctaacgaatcctatatgatttgtaattcctatggaaagtcgcggtgaatgcgtgcatgtctcaatgtccacaaaggattctggctaccctttggtagccaatgttttttttgtcttgtcatcacaggcgcctatacagcttctgtctcaatagggtcagatattttgcactgtatattctgtgaattaaaagttatgtgattggtgtcaaacttaaggagattcaagacctggcagaaaatgtaagaggatttttgctgcttttggggtgcatggggatctcccctgtaaactttcctttgcccaattatatgtacatgtccattcttaagttggtgtttggaggtggggaggatgctactttactggagttgagacaccccctaaaattctcaccctcagctattttgtgggcagtattcaggaagagctacttcaaacctttctttaaatggctttttggaaatacagaagtcgtttcctcaagtttgactgttttaatggggtttcacccaaattgtttaatgcttctgctgtaaatgtcatactgtgtattcattatgaaaatatgtacagcttaaggaagatgttaacacctgtaatccactaaggaactgaatggcaatttgctcaatattcagtattttcttttcagcggcaacttgtttttgatttttttaaaaaaccatttcagtgtacattgtgtactaattccctactagccagtttgggacattggctgagcactgcctgacagaaagcccgtatttgtaagatgcttaccaccaaataaatgtacatagactgtgaaaaaaaaaaa

SEQ ID NO: 460 - DNA, 2573 bp, Homo sapiens
gggtggcgccgggagtgggaacgccacacagtgccaaatccccggctccagctcccgactcccggctcccggctcccggctcccggtgcccaatcccgggccgcagccatgaacggcgaggagcagtactacgcggccacgcagctttacaaggacccatgcgcgttccagcgaggcccggcgccggagttcagcgccagcccccctgcgtgcctgtacatgggccgccagcccccgccgccgccgccgcacccgttccctggcgccctgggcgcgctggagcagggcagccccccggacatctccccgtacgaggtgccccccctcgccgacgaccccgcggtggcgcaccttcaccaccacctcccggctcagctcgcgctcccccacccgcccgccgggcccttcccggagggagccgagccgggcgtcctggaggagcccaaccgcgtccagctgcctttcccatggatgaagtctaccaaagctcacgcgtggaaaggccagtgggcaggcggcgcctacgctgcggagccggaggagaacaagcggacgcgcacggcctacacgcgcgcacagctgctagagctggagaaggagttcctattcaacaagtacatctcacggccgcgccgggtggagctggctgtcatgttgaacttgaccgagagacacatcaagatctggttccaaaaccgccgcatgaagtggaaaaaggaggaggacaagaagcgcggcggcgggacagctgtcgggggtggcggggtcgcggagcctgagcaggactgcgccgtgacctccggcgaggagcttctggcgctgccgccgccgccgccccccggaggtgctgtgccgcccgctgcccccgttgccgcccgagagggccgcctgccgcctggccttagcgcgtcgccacagccctccagcgtcgcgcctcggcggccgcaggaaccacgatgagaggcaggagctgctcctggctgaggggcttcaaccactcgccgaggaggagcagagggcctaggaggaccccgggcgtggaccacccgccctggcagttgaatggggcggcaattgcggggcccaccttagaccgaaggggaaaacccgctctctcaggcgcatgtgccagttggggccccgcgggtagatgccggcaggccttccggaagaaaaagagccattggtttttgtagtattggggccctcttttagtgatactggattggcgttgtttgtggctgttgcgcacatccctgccctcctacagcactccaccttgggacctgtttagagaagccggctcttcaaagacaatggaaactgtaccatacacattggaaggctccctaacacacacagcggggaagctgggccgagtaccttaatctgccataaagccattcttactcgggcgacccctttaagtttagaaataattgaaaggaaatgtttgagttttcaaagatcccgtgaaattgatgccagtggaatacagtgagtcctcctcttcctcctcctcctcttccccctccccttcctcctcctcctcttcttttccctcctcttcctcttcctcctgctctcctttcctccccctcctcttttccctcctcttcctcttcctcctgctctcctttcctccccctcctctttctcctcctcctcctcttcttccccctcctctccctcctcctcttcttccccctcctctccctcctcctcttcttctccctcctcttcctcttcctcctcttccacgtgctctcctttcctccccctcctcttgctccccttcttccccgtcctcttcctcctcctcctcttcttctccctcctcttcctcctcctctttcttcctgacctctttctttctcctcctcctccttctacctccccttctcatccctcctcttcctcttctctagctgcacacttcactactgcacatcttataacttgcacccctttcttctgaggaagagaacatcttgcaaggcagggcgagcagcggcagggctggcttaggagcagtgcaagagtccctgtgctccagttccacactgctggcagggaaggcaaggggggacgggcctggatctgggggtgagggagaaagatggacccctgggtgaccactaaaccaaagatattcggaactttctatttaggatgtggacgtaattcctgttccgaggtagaggctgtgctgaagacaagcacagtggcctggtgcgccttggaaaccaacaactattcacgagccagtatgaccttcacatctttagaaattatgaaaacgtatgtgattggagggtttggaaaaccagttatcttatttaacattttaaaaattacctaacagttatttacaaacaggtctgtgcatcccaggtctgtcttcttttcaaggtctgggccttgtgctcgggttatgtttgtgggaaatgcttaataaatactgataatatgggaagagatgaaaactgattctcctcactttgtttcaaacctttctggcagtgggatgattcgaattcacttttaaaattaaattagcgtgttttgttttg

SEQ ID NO: 461 - DNA, 3567 bp, Homo sapiens
agagctcgccactccttagtcgaggcaagacgtgcgcccgagccccgccgaaccgaggccacccggagccgtgcccagtccacgccggccgtgcccggcggccttaagaacccggcaacctctgccttcttccctcttccactcggagtcgcgctccgcgcgccctcactgcagcccctgcgtcgccgggaccctcgcgcgcgaccgccgaatcgctcctgcagcagagccaacatgcccatcactcggatgcgcatgagaccctggctagagatgcagattaattccaaccaaatcccggggctcatctggattaataaagaggagatgatcttccagatcccatggaagcatgctgccaagcatggctgggacatcaacaaggatgcctgtttgttccggagctgggccattcacacaggccgatacaaagcaggggaaaaggagccagatcccaagacgtggaaggccaactttcgctgtgccatgaactccctgccagatatcgaggaggtgaaagaccagagcaggaacaagggcagctcagctgtgcgagtgtaccggatgcttccacctctcaccaagaaccagagaaaagaaagaaagtcgaagtccagccgagatgctaagagcaaggccaagaggaagtcatgtggggattccagccctgataccttctctgatggactcagcagctccactctgcctgatgaccacagcagctacacagttccaggctacatgcaggacttggaggtggagcaggccctgactccagcactgtcgccatgtgctgtcagcagcactctccccgactggcacatcccagtggaagttgtgccggacagcaccagtgatctgtacaacttccaggtgtcacccatgccctccacctctgaagctacaacagatgaggatgaggaagggaaattacctgaggacatcatgaagctcttggagcagtcggagtggcagccaacaaacgtggatgggaaggggtacctactcaatgaacctggagtccagcccacctctgtctatggagactttagctgtaaggaggagccagaaattgacagcccagggggggatattgggctgagtctacagcgtgtcttcacagatctgaagaacatggatgccacctggctggacagcctgctgaccccagtccggttgccctccatccaggccattccctgtgcaccgtagcagggcccctgggcccctcttattcctctaggcaagcaggacctggcatcatggtggatatggtgcagagaagctggacttctgtgggcccctcaacagccaagtgtgaccccactgccaagtggggatggggcctccctccttgggtcattgacctctcagggcctggcaggccagtgtctgggtttttcttgtggtgtaaagctggccctgcctcctgggaagatgaggttctgagaccagtgtatcaggtcagggacttggacaggagtcagtgtctggctttttcctctgagcccagctgcctggagagggtctcgctgtcactggctggctcctaggggaacagaccagtgaccccagaaaagcataacaccaatcccagggctggctctgcactaagagaaaattgcactaaatgaatctcgttcccaaagaactacccccttttcagctgagccctggggactgttccaaagccagtgaaatgtgaaggaaagtggggtccttcggggcgatgctccctcagcctcagaggagctctaccctgctccctgctttggctgaggggcttgggaaaaaaacttggcactttttcgtgtggatcttgccacatttctgatcagaggtgtacactaacatttcccccgagctcttggcctttgcatttatttatacagtgccttgctcggcgcccaccaccccctcaagccccagcagccctcaacaggcccagggagggaagtgtgagcgccttggtatgacttaaaattggaaatgtcatctaaccattaagtcatgtgtgaacacataaggacgtgtgtaaatatgtacatttgtctttttataaaaagtaaattgtttataaggggtgtggcctttttagagagaaatttaacttgtagatgattttactttttatggaaacactgatggacttattattggcatcccgcctgaacttgactttggggtgaacagggacatgcatctattataaaatcctttcggccaggcgcggtggctcacacctgtaatcccagcactttgggaggccgagatgggtggatcacctgaggtcaggagttcgagaccagcctggtgaaactccatttctactaaaaatgcaaaaattagctgggcgtggttgcgggtgcttgtaatcccagctactcaggaggctgaggcaagagaatcgcttgaacctgggaggtggaggttgcagtgagccgagaacatgccattgcactccagcccgggcaccaaaaaaaaaaaaaaaaaaaaaaacctttcatttggccgggcatggtggcttatgcctgtaatcctggcactttgggaggccaaggtgggcagatcacctgaggtcaggagtttgagaccagcctggccaacatggtgaaacctcatctctactaaaaatacaaaaattaggccgggcacggtggctcacgcctgtaatcccagcactttgggaggcagaggcgggcggatcacgaggtcaggagatcaagaccatcctggctaacacggtgaaaccccgtctctactaaaaatataaaaaattagccgggcctagtggcgggtgcctgtagtcccagctactcgggaggctgaggcaggagaatggcatgaaccccggaggcagagcttgcagtgagccgagattgcaccactgcactacagcctgggcgacagagcgagactccgtctcaaaaaaaaaaaaaaaaattagccgggcctggtggcgggcgcctgtaatcccagctactgtggaggctgaagcacaagaatcacttgaacccgggagatggaggttgcagtgagctgagactgtgccactgcactccagcctgggtgacaagagtgagactttgtctcaaaaaaaaaaaaatccttttgtttatgttcacatagacaatggcagaaggaggggacattcctgtcataggaacatgcttatataaacatagtcacctgtccttgactatcaccagggctgtcagttgattctgggctcctggggcccaaggagtgttaagttttgaggcatgtgccataggtgatgtgtcctgctaacacacagatgctgctccaaaaagtcagttgatatgacacagtcacagacagaacagtcagcagcccaagaaaggtcctcacggctgctgtgctgggtagcacttgccatccagtttctagagtgatgaaatgctctgtctgtaccgttcaatacagtaggcactggcactagccacatgtgccagctaagcacttgaaatgtggccagtgcaataaggaattgaacttttaattgcatttaataaactgtatgtaaatagtcaaaaaaaaaaaaaa

SEQ ID NO: 462 - DNA, 2302 bp, Homo sapiens
agccgcggctcttcgcagtttcctctccttgttttgctttcgatctggactgttctcaggcaagccggggagtaacttttagttttgctcctgcgattattcaactgacgggctttcatttccatttcacataccctagcaacacttataccttgcggaattgtattggtagcgtgaaaaaagcacactgagagggcaccatgccggtggaaaggatgcgcatgcgcccgtggctggaggagcagataaactccaacacgatcccggggctcaagtggcttaacaaggaaaagaagatttttcagatcccctggatgcatgcggctagacatgggtgggatgtggaaaaagatgcaccactctttagaaactgggcaatccatacaggaaagcatcaaccaggagtagataaacctgatcccaaaacatggaaggcgaatttcagatgcgccatgaattccttgcctgatattgaagaagtcaaggataaaagcataaagaaaggaaataatgccttcagggtctaccgaatgctgcccctatcagaacggccttctaagaaaggaaagaaaccaaagacagaaaaagaagacaaagttaagcacatcaagcaagaaccagttgagtcatctctggggcttagtaatggagtaagtgatctttctcctgagtatgcggtcctgacttcaactataaaaaatgaagtggatagtacggtgaacatcatagttgtaggacagtcccatctggacagcaacattgagaatcaagagattgtcaccaatccgccagacatttgccaagttgtagaggtgaccactgagagcgacgagcagccggtcagcatgagcgagctctaccctctgcagatctcccccgtgtcttcctatgcagaaagcgaaacgactgatagtgtgcccagcgatgaagagagtgccgaggggcggccacactggcggaagaggaatattgaaggcaaacagtacctcagcaacatggggactcgaggctcctacctgctgcccggcatggcgtccttcgtcacttccaacaaaccggacctccaggtcaccatcaaagaggagagcaatccggtgccttacaacagctcctggcccccttttcaagacctccccctttcttcctccatgaccccagcatccagcagcagtcggccagaccgggagacccgggccagcgtcatcaagaaaacatcggatatcacccaggcccgcgtcaagagctgttaagcctctgactctccgcggtggttgttggggcttcttggctttgttttgttgtttgtttgtattttatttttttctctctgacacctattttagacaaatctaagggaaaaagccttgacaatagaacattgattgctgtgtccaactccagtactggagcttctctttaactcaggactccagcccattggtagacgtgtgtttctagagcctgctggatctcccagggctactcactcaagttcaaggaccaacaagggcagtggaggtgctgcattgcctgcggtcaaggccagcaaggtggagtggatgcctcagaacggacgagataatgtgaactagctggaattttttattcttgtgaatatgtacataggcagcactagcgacattgcagtctgcttctgcaccttatcttaaagcacttacagataggccttcttgtgatcttgctctatctcacagcacactcagcacccccttctctgcccattccccagcctctcttcctatcccatcccatcccatcccatcccatcccatcccatcccgctcttttcctacttttccttccctcaaagcttccattccacatccggaggagaagaaggaaatgaatttctctacagatgtcccattttcagactgctttaaaaaaaatccttctaatctgctatgcttgaatgccacgcggtacaaaggaaaaagtatcatggaaatattatgcaaattcccagatttgaagacaaaaatactctaattctaaccagagcaagcttttttattttttatacaggggaatattttattcaaggtaaaattctaaataaaatataattgttttttatcttttctacagcaaatttataattttaagattccttttcttgtttatcagcagttgttattacatccttgtggcacatttttttttttaattttgtaaaggtgaaaaaagcttttatgagctcatgtagcaatcagattttcctgtggattgataataaatgaatatgatatatagttaaatttttaaaaaaaaaaaaaaaaaa

SEQ ID NO: 463 - DNA, 1614 bp, Homo sapiens
ggaaacccaaaaaagggcataggggcgggaacagcccagcgggccgtcccatcggcttttgggtctgttacccaaagaatgataaagttggttttatttcaagaagtcgatcaaaaagaaagccccagcgctctagagctcagctgacgggaaagggggtgcgcagcctcgagtttgagagctacccggagctccaagacaggggtgggttccagctgcccgcacgccccgaccttccatcgtaggccggaccatgggaaccccaaagccacggatcctgccctggctggtgtcgcagctggacctggggcaactggagggcgtggcctgggtgaacaagagccgcacgcgcttccgcatcccttggaagcacggcctacggcaggatgcacagcaggaggatttcggaatcttccaggcctgggccgaggccactggtgcatatgttcccgggagggataagccagacctgccaacctggaagaggaatttccgctctgccctcaaccgcaaagaagggttgcgtttagcagaggaccggagcaaggaccctcacgacccacataaaatctacgagtttgtgaactcaggagttggggacttttcccagccagacacctctccggacaccaatggtggaggcagtacttctgatacccaggaagacattctggatgagttactgggtaacatggtgttggccccactcccagatccgggacccccaagcctggctgtagcccctgagccctgccctcagcccctgcggagccccagcttggacaatcccactcccttcccaaacctggggccctctgagaacccactgaagcggctgttggtgccgggggaagagtgggagttcgaggtgacagccttctaccggggccgccaagtcttccagcagaccatctcctgcccggagggcctgcggctggtggggtccgaagtgggagacaggacgctgcctggatggccagtcacactgccagaccctggcatgtccctgacagacaggggagtgatgagctacgtgaggcatgtgctgagctgcctgggtgggggactggctctctggcgggccgggcagtggctctgggcccagcggctggggcactgccacacatactgggcagtgagcgaggagctgctccccaacagcgggcatgggcctgatggcgaggtccccaaggacaaggaaggaggcgtgtttgacctggggcccttcattgtagatctgattaccttcacggaaggaagcggacgctcaccacgctatgccctctggttctgtgtgggggagtcatggccccaggaccagccgtggaccaagaggctcgtgatggtcaaggttgtgcccacgtgcctcagggccttggtagaaatggcccgggtagggggtgcctcctccctggagaatactgtggacctgcacatttccaacagccacccactctccctcacctccgaccagtacaaggcctacctgcaggacttggtggagggcatggatttccagggccctggggagagctgagccctcgctcctcatggtgtgcctccaacccccctgttccccaccacctcaaccaataaactggttcctgctatgaa

SEQ ID NO: 464 - DNA, 5314 bp, Homo sapiens
agtttcaccgctcgatcttgggacccaccgctgccctcagctccgagtccagggcgagtgcagagcagagcgggcggaggaccccgggcgcgggcgcggacggcacgcggggcatgaacctggagggcggcggccgaggcggagagttcggcatgagcgcggtgagctgcggcaacgggaagctccgccagtggctgatcgaccagatcgacagcggcaagtaccccgggctggtgtgggagaacgaggagaagagcatcttccgcatcccctggaagcacgcgggcaagcaggactacaaccgcgaggaggacgccgcgctcttcaaggcttgggcactgtttaaaggaaagttccgagaaggcatcgacaagccggaccctcccacctggaagacgcgcctgcggtgcgctttgaacaagagcaatgactttgaggaactggttgagcggagccagctggacatctcagacccgtacaaagtgtacaggattgttcctgagggagccaaaaaaggagccaagcagctcaccctggaggacccgcagatgtccatgagccacccctacaccatgacaacgccttacccttcgctcccagcccagcaggttcacaactacatgatgccacccctcgaccgaagctggagggactacgtcccggatcagccacacccggaaatcccgtaccaatgtcccatgacgtttggaccccgcggccaccactggcaaggcccagcttgtgaaaatggttgccaggtgacaggaaccttttatgcttgtgccccacctgagtcccaggctcccggagtccccacagagccaagcataaggtctgccgaagccttggcgttctcagactgccggctgcacatctgcctgtactaccgggaaatcctcgtgaaggagctgaccacgtccagccccgagggctgccggatctcccatggacatacgtatgacgccagcaacctggaccaggtcctgttcccctacccagaggacaatggccagaggaaaaacattgagaagctgctgagccacctggagaggggcgtggtcctctggatggcccccgacgggctctatgcgaaaagactgtgccagagcaggatctactgggacgggcccctggcgctgtgcaacgaccggcccaacaaactggagagagaccagacctgcaagctctttgacacacagcagttcttgtcagagctgcaagcgtttgctcaccacggccgctccctgccaagattccaggtgactctatgctttggagaggagtttccagaccctcagaggcaaagaaagctcatcacagctcacgtagaacctctgctagccagacaactatattattttgctcaacaaaacagtggacatttcctgaggggctacgatttaccagaacacatcagcaatccagaagattaccacagatctatccgccattcctctattcaagaatgaaaaatgtcaagatgagtggttttctttttcctttttttttttttttttttgatacggggatacggggtcttgctctgtctcccaggctggagtgcagtgacacaatctcagctcactgtgacctccgcctcctgggttcaagagactctcctgcctcagcctccctggtagctgggattacaggtgtgagccactgcacccacccaagacaagtgattttcattgtaaatatttgactttagtgaaagcgtccaattgactgccctcttactgttttgaggaattcagaagtggagatttcagttcagcggttgaggagaattgcggcgagacaagcatggaaaatcagtgacatctgattggcagatgagcttatttcaaaaggaagggtggctttgcatttcttgtgttctgtagactgccatcattgatgatcactgtgaaaattgaccaagtgatgtgtttacatttactgaaatgcgctctttaatttgttgtagattaggtcttgctggaagacagagaaaacttgcctttcagtattgacactgactagagtgatgactgcttgtaggtatgtctgtgccatttctcagggaagtaagatgtaaattgaagaagcctcacacgtaaaagaaatgtattaatgtatgtaggagctgcagttcttgtggaagacacttgctgagtgaaggaaatgaatctttgactgaagccgtgcctgtagccttggggaggcccatcccccacctgccagcggtttcctggtgtgggtccctctgccccgccctccttcccattggctttctctccttggcctttcctggaagccagttagtaaacttcctattttcttgagtcaaaaaacatgagcgctactcttggatgggacatttttgtctgtcctacaatctagtaatgtctaagtaatggttaagttttcttgtttctgcatctttttgaccctcattctttagagatgctaaaattcttcgcataaagaagaagaaattaaggaacataaatcttaatacttgaactgttgcccttctgtccaagtacttaactatctgttcccttcctctgtgccacgctcctctgtttgtttggctgtccagcgatcagccatggcgacactaaaggaggaggagccggggactcccaggctggagagcactgccaggacccaccactggaagcaggatggagctgactacggaactgcacactcagtgggctgtttctgcttatttcatctgttctatgcttcctcgtgccaattatagtttgacagggccttaaaattacttggctttttccaaatgcttctatttatagaatcccaaagacctccacttgcttaagtatacctatcacttacatttttgtggttttgagaaagtacagcagtagactggggcgtcacctccaggccgtttctcatactacaggatatttactattactcccaggatcagcagaagattgcgtagctctcaaatgtgtgttcctgcttttctaatggatattttaaattcattcaacaagcacctagtaagtgcctgctgtatccctacattacacagttcagcctttatcaagcttagtgagcagtgagcactgaaacattattttttaatgtttaaaaagtttctaatattaaagtcagaatattaatacaattaatattaatattaactacagaaaagacaaacagtagagaacagcaaaaaaataaaaaggatctccttttttcccagcccaaattctcctctctaaaagtgtccacaagaaggggtgtttattcttccaacacatttcacttttctgtaaatatacataaacttaaaaagaaaacctcatggagtcatcttgcacacactttcatgcagtgctctttgtagctaacagtgaagatttacctcgttctgctcagaggccttgctgtggagctccactgccatgtacccagtagggtttgacatttcattagccatgcaacatggatatgtattgggcagcagactgtgtttcgtgaactgcagtgatgtatacatcttatagatgcaaagtattttggggtatattatcctaagggaagataaagatgatattaagaactgctgtttcacggggcccttacctgtgaccctctttgctgaagaatatttaaccccacacagcacttcaaagaagctgtcttggaagtctgtctcaggagcaccctgtcttcttaattctccaagcggatgctccatttcaattgctttgtgacttcttcttctttgtttttttaaatattatgctgctttaacagtggagctgaattttctggaaaatgcttcttggctggggccactacctcctttcctatctttacatctatgtgtatgttgactttttaaaattctgagtgatccagggtatgacctagggaatgaactagctatgaaatactcagggttaggaatcctagcacttgtctcaggactctgaaaaggaacggcttcctcattccttgtcttgataaagtggaattggcaaactagaatttagtttgtactcagtggacagtgctgttgaagatttgaggacttgttaaagagcactgggtcatatggaaaaaatgtatgtgtctcccaggtgcatttcttggtttatgtcttgttcttgagattttgtatatttaggaaaacctcaagcagtaattaatatctcctggaacactatagagaaccaagtgaccgactcatttacaactgaaacctaggaagcccctgagtcctgagcgaaaacaggagagttagtcgccctacagaaaacccagctagactattgggtatgaactaaaaagagactgtgccatggtgagaaaaatgtaaaatcctacagtgaaatgagcagcccttacagtattgttaccaccaagggcaggtaggtattagtgtttgaaaaagctggtctttgagcgagggcataaatacagctagccccaggggtggaacaactctgggagtcttgggtactcgcacctcttggctttgttgatgctccgccaggaaggccacttgtgtgtgcgtgtcagttacttttttagtaacaattcagatccagtgtaaacttccgttcattgctctccagtcacatgcccccacttccccacaggtgaaagtttttctgaaagtgttgggattggttaaggtctttatttgtattacgtatctcccgaagtcctctgtggccagctgcatctgtctgaatggtgcgtgaaggctctcagaccttacacaccattttgtaagttatgttttacatgccccgtttttgagactgatctcgatgcaggtggatctccttgagatcctgatagcctgttacaggaatgaagtaaaggtcagtttttttttgtattgattttcacagctttgaggaacatgcataagaaatgtagctgaagtagaggggacgtgagagaagggccaggccggcaggccaaccctcctccaatggaaattcccgtgttgcttcaaactgagacagatgggacttaacaggcaatggggtccacttccccctcttcagcatcccccgtaccccactttctgctgaaagaactgccagcaggtaggaccccagaggcccccaaatgaaagcttgaatttcccctactggctctgcgttttgctgagatctgtaggaaaggatgcttcacaaactgaggtagataatgctatgctgtcgttggtatacatcatgaatttttatgtaaattgctctgcaaagcaaattgatatgtttgataaatttatgtttttaggtaaataaaaacttttaaaaatttgtta

SEQ ID NO: 465 - DNA, 2870 bp, Homo sapiens
gcccggcaggttggcggaccggcgggaggcgcagcctgggcagagctcagcttggtcccgccgcccggccggtgctccctggcgcagccacgcaggcgcaccgcagacagacccctctgccatgaaccagtccatcccagtggctcccaccccaccccgccgcgtgcggctgaagccctggctggtggcccaggtgaacagctgccagtacccagggcttcaatgggtcaacggggaaaagaaattattctgcatcccctggaggcatgccacaaggcatggtcccagccaggacggagataacaccatcttcaaggcctgggccaaggagacagggaaatacaccgaaggcgtggatgaagccgatccggccaagtggaaggccaacctgcgctgtgcccttaacaagagccgggacttccgcctcatctacgacgggccccgggacatgccacctcagccctacaagatctacgaggtctgctccaatggccctgctcccacagactcccagccccctgaggattactcttttggtgcaggagaggaggaggaagaagaggaagagctgcagaggatgttgccaagcctgagcctcacagatgcagtgcagtctggcccccacatgacaccctattctttactcaaagaggatgtcaagtggccgcctactctgcagccgcccactctgcagccgcccgtggtgctgggtccccctgctccagaccccagccccctggctcctccccctggcaaccctgctggcttcagggagcttctctctgaggtcctggagcctgggcccctgcctgccagcctgccccctgcaggcgaacagctcctgccagacctgctgatcagcccccacatgctgcctctgaccgacctggagatcaagtttcagtaccgggggcggccaccccgggccctcaccatcagcaacccccatggctgccggctcttctacagccagctggaggccacccaggagcaggtggaactcttcggccccataagcctggagcaagtgcgcttccccagccctgaggacatccccagtgacaagcagcgcttctacacgaaccagctgctggatgtcctggaccgcgggctcatcctccagctacagggccaggacctttatgccatccgcctgtgtcagtgcaaggtgttctggagcgggccttgtgcctcagcccatgactcatgccccaaccccatccagcgggaggtcaagaccaagcttttcagcctggagcattttctcaatgagctcatcctgttccaaaagggccagaccaacaccccaccacccttcgagatcttcttctgctttggggaagaatggcctgaccgcaaaccccgagagaagaagctcattactgtacaggtggtgcctgtagcagctcgactgctgctggagatgttctcaggggagctatcttggtcagctgatagtatccggctacagatctcaaacccagacctcaaagaccgcatggtggagcaattcaaggagctccatcacatctggcagtcccagcagcggttgcagcctgtggcccaggcccctcctggagcaggccttggtgttggccaggggccctggcctatgcacccagctggcatgcaataacaaggctgcagacggtgactggccctggcttcctgggtggcggtgcggactgatgtggagatgtgacagccccgatgagcacctggctggctgcagggtcctacctctgggtttcctggaagtggatttgggccaagaaggagagggagaaaggcccgagcccctgccttcccgggcctttctctcctgggctgtctctggtctggtcagcctggctctcgggaaattcagccatgagcagggaaagaactctcccaaccctggggcctagctgtataggaggaattgcctaagggtggcccactcttgtgattgccccatttcctctggcaacaaaagccagagtgttgtgggccaagtccccccacagggcctctgcagggcatggccctgatttccctggtttgagactcacttcctcatctccctgtcctctgagataatatgagtgagcacttaggtatcatatcagatgctcaaggctggcagctacccccttcttgagagtccaagaacctggagcagaaataatttttatgtatttttggattaatgaatgttaaaaacagactcagctgtttctttccttttactactaccagttgctcccatgctgctccaccaggccctgtttcggatgccaactggcccactccccaagcacttgcccccagcttgcgaccattggcactgggagggcctggcttctgggctgatgggtcagttgggccttcataaacactcacctggctggctttgccttccaggaggaagctggctgaagcaagggtgtggaattttaaatgtgtgcacagtctggaaaactgtcagaatcagttttcccataaaagggtgggctagcattgcagctgcatttgggaccattcaaatctgtcactctcttgtgtatattcctgtgctattaaatatatcagggcagtgcatgtaaatcatcctgatatatttaatatatttattatattgtcccccgaggtggggacagtgagtgagttctcttagtccccccagagctggttgttaaagagcctggcacctacccgctctcacttcatctgtgtcatctctgcacactccagcccactttctgccttcagccattgagtggaagctgccccaggcccttaccaggtgcagatgcccaatcttgatgcccagccatcagaactgtgagccaaataaacctttttctgtataaaaaaaaaaaaaaaaaaaa

SEQ ID NO: 466 - DNA, 2171 bp, Homo sapiens
gagctcggcgcacctgggctgggcaggtaagggctggtgcgggacggggagaggaacctgcagtccctacttgggtagagccaggcgccccttggctaagacgtcgaggagcgtggtagcgacgggtgatcttcgctgcggacttggttcggagggacgtccgcttctggtggacagattgagcaaagaatctttgagcggtcaagggaaagacaagccgactcttcagatccctgtggacacactgcctgctcttccatatcatggccctccacccccgcagagtccggctaaagccctggctggtggcccaggtggatagtggcctctaccctgggctcatctggctacacagggactctaaacgcttccagattccctggaaacatgccacccggcatagccctcaacaagaagaggaaaataccatttttaaggcctgggctgtagagacagggaagtaccaggaaggggtggatgaccctgacccagctaaatggaaggcccagctgcgctgtgctctcaataagagcagagaattcaacctgatgtatgatggcaccaaggaggtgcccatgaacccagtgaagatatatcaagtgtgtgacatccctcagccccagggctcgatcattaacccaggatccacagggtctgctccctgggatgagaaggataatgatgtggatgaagaagatgaggaagatgagctggatcagtcgcagcaccatgttcccatccaggacaccttccccttcctgaacatcaatggttctcccatggcgccagccagtgtgggcaattgcagtgtgggcaactgcagcccggaggcagtgtggcccaaaactgaacccctggagatggaagtaccccaggcacctatacagcccttctatagctctccagaactgtggatcagctctctcccaatgactgacctggacatcaagtttcagtaccgtgggaaggagtacgggcagaccatgaccgtgagcaaccctcagggctgccgactcttctatggggacctgggtcccatgcctgaccaggaggagctctttggtcccgtcagcctggagcaggtcaaattcccaggtcctgagcatattaccaatgagaagcagaagctgttcactagcaagctgctggacgtcatggacagaggactgatcctggaggtcagcggtcatgccatttatgccatcaggctgtgccagtgcaaggtgtactggtctgggccatgtgccccatcacttgttgctcccaacctgattgagagacaaaagaaggtcaagctattttgtctggaaacattccttagcgatctcattgcccaccagaaaggacagatagagaagcagccaccgtttgagatctacttatgctttggggaagaatggccagatgggaaaccattggaaaggaaactcatcttggttcaggtcattccagtagtggctcggatgatctacgagatgttttctggtgatttcacacgatcctttgatagtggcagtgtccgcctgcagatctcaaccccagacatcaaggataacatcgttgctcagctgaagcagctgtaccgcatccttcaaacccaggagagctggcagcccatgcagcccacccccagcatgcaactgccccctgccctgcctccccagtaattgtgaatgccatcttcttccttctcttttttataatattgtacatatggatttttttattgtttagatttaaccagcttttaaatctctcttttctctaacagtgttagaagtttgtgattctccaaatatgcctagatttaaagctgatttaatttatggaaaaatcacccttcagactttgcttttctttttcaaatctcctaatggtagtatgatatagcatagtagaaggagatttggcctgggagtttggacaccaaagttctagctgcagctttgcttccaatgtgaccttgaacaagtcctttaacctctgggcttcagatttattgcttataaagtgaagagattggagtagtgcctgaaattgcatccagctttagaacggactcaatgaccttcttctacttgtacaaggctaaactgcctggaacagaatccttctgcattgttcttgtaccacatttttccttggttttgttaaagtttcctcaagcacta

SEQ ID NO: 467 - DNA, 1972 bp, Homo sapiens
gaaactcccgcctggccaccataaaagcgccggccctccgcttccccgcgagacgaaacttcccgtcccggcggctctggcacccagggtccggcctgcgccttcccgccaggcctggacactggttcaacacctgtgacttcatgtgtgcgcgccggccacacctgcagtcacacctgtagccccctctgccaagagatccataccgaggcagcgtcggtggctacaagccctcagtccacacctgtggacacctgtgacacctggccacacgacctgtggccgcggcctggcgtctgctgcgacaggagcccttacctcccctgttataacacctgaccgccacctaactgcccctgcagaaggagcaatggccttggctcctgagagggcagccccacgcgtgctgttcggagagtggctccttggagagatcagcagcggctgctatgaggggctgcagtggctggacgaggcccgcacctgtttccgcgtgccctggaagcacttcgcgcgcaaggacctgagcgaggccgacgcgcgcatcttcaaggcctgggctgtggcccgcggcaggtggccgcctagcagcaggggaggtggcccgccccccgaggctgagactgcggagcgcgccggctggaaaaccaacttccgctgcgcactgcgcagcacgcgtcgcttcgtgatgctgcgggataactcgggggacccggccgacccgcacaaggtgtacgcgctcagccgggagctgtgctggcgagaaggcccaggcacggaccagactgaggcagaggcccccgcagctgtcccaccaccacagggtgggcccccagggccattcctggcacacacacatgctggactccaagccccaggccccctccctgccccagctggtgacaagggggacctcctgctccaggcagtgcaacagagctgcctggcagaccatctgctgacagcgtcatggggggcagatccagtcccaaccaaggctcctggagagggacaagaagggcttcccctgactggggcctgtgctggaggcccagggctccctgctggggagctgtacgggtgggcagtagagacgacccccagccccgggccccagcccgcggcactaacgacaggcgaggccgcggccccagagtccccgcaccaggcagagccgtacctgtcaccctccccaagcgcctgcaccgcggtgcaagagcccagcccaggggcgctggacgtgaccatcatgtacaagggccgcacggtgctgcagaaggtggtgggacacccgagctgcacgttcctatacggccccccagacccagctgtccgggccacagacccccagcaggtagcattccccagccctgccgagctcccggaccagaagcagctgcgctacacggaggaactgctgcggcacgtggcccctgggttgcacctggagcttcgggggccacagctgtgggcccggcgcatgggcaagtgcaaggtgtactgggaggtgggcggacccccaggctccgccagcccctccaccccagcctgcctgctgcctcggaactgtgacacccccatcttcgacttcagagtcttcttccaagagctggtggaattccgggcacggcagcgccgtggctccccacgctataccatctacctgggcttcgggcaggacctgtcagctgggaggcccaaggagaagagcctggtcctggtgaagctggaaccctggctgtgccgagtgcacctagagggcacgcagcgtgagggtgtgtcttccctggatagcagcagcctcagcctctgcctgtccagcgccaacagcctctatgacgacatcgagtgcttccttatggagctggagcagcccgcctagaacccagtctaatgagaactccagaaagctggagcagcccacctagagctggccgcggccgcccagtctaataaaaagaactccagaaca

SEQ ID NO: 468 - DNA, 645 bp, Homo sapiens
tggaacctggtatggtatttcagacgtcttgacttgcccagtaacttacctggattgattctttcttctgagcactgtaacaagtattcaaagattccccgccactgtatgtctgaagatagcaaatatgttttaatacaaatgttatgggacaatatgaagttacatcaggatccgggacagcccttgtacattctctggaatgcacacacccaaaaatatccaatggtccatttattgcaaaaaagtgataactcatttaaccaggaactgttgaaaagtatggtaaaaagcattaaaatgaatgatgtctatggaccaatgagtcagattttagagacactgaataagtgtccacattttaaaagacagaggagtttatacagagaaatactatttctctcacttgtggcactgggaagagaaaacattgatatagatgcttttgataaagagtacaagatggcatacgatcgtctcacacctagtcaagtcaagagtacacacaactgtgatagaccaccaagtacaggggtgatggaatgtcgaaaaacctttggagaaccttatctttaagatgtatttgtatgtgtaaacattcaatgtatattgtatagtcagtgtataaaataacacttttagacg

SEQ ID NO: 469 - DNA, 280 bp, Homo sapiens
cgcggatctcagcctcttctcgcagatgggctcgcagtatgaactgaaggacaaccctggggtgcaccccgccaccttcgcagcccacacggcgccggcttattacccctacggccagttccaatacggggaccccgggcggcccaagaacgccacccgcgagaacaccagcacgctcaaggcctggctcaacgagcaccgcaagaatccctaccccaccaagggcgagaagatcatgctggccatcatcaccaagatgaccctcacgcaggtctccacc

SEQ ID NO: 470 - DNA, 245 bp, Homo sapiens
ccacccgtacggcagcgcggcctacccgtaccagctcaacgaccccgcgtaccgcaagaacgccacgcgggacgccacggccactctcaaggcctggctcaacgagcaccgcaagaacccctaccccaccaagggcgagaagatcatgctagccatcatcaccaagatgaccctcacccaggtctccacctggttcgccaacgcgcgccggcgcctcaagaaggagaacaagatgacctgggccc

SEQ ID NO: 471 - DNA, 259 bp, Homo sapiens
cgcgcagtatgagctgaaggacagccccggggtgcagcatccggccgcggctgccgcgtttccgcacccgcaccccgccttctacccgtatggccagtaccagttcggagacccgtcccgtcccaagaacgccaccagggagagcaccagcacgctgaaggcctggctcaacgagcaccgcaagaacccctaccccaccaagggcgagaagatcatgctggccatcatcaccaagatgaccctcacccaggtgtccacc

SEQ ID NO: 472 - DNA, 2229 bp, Homo sapiens
tcctgcttcgccctcccagcgcctagaagcctgcagctccggagcagtggccgcgccacgccggccccagcgcgcagaaccctgcaggccccgcccgtccgccccgggccgcgcccgccatgtcctacccgcagtttggatacccctactcctcggctccccagttcttgatggccaccaactccctgagcacgtgctgcgagtccggaggccgcacgctggcggactccgggcccgccgcctcggcccaggcgccggtctactgcccggtctacgagagccggctgctggccaccgcgcgccacgagctcaactcggccgcggcgctgggcgtctatgggggtccctatggcggatcgcagggctatggcaactacgtgacctacggctcggaggcgtccgccttctactcgctgaacagctttgattccaaggatggttcgggatctgcgcatgggggcctggcaccagccgctgccgcctactacccttacgagccagctctgggccagtacccctatgacaggtatggaaccatggacagcggcacgcggcgcaagaacgccacgcgcgagaccaccagcacgctcaaggcctggctgcaggagcaccgcaagaacccctaccccaccaagggcgagaagatcatgctggccatcatcaccaagatgaccctcacacaggtctccacctggttcgccaacgcgcgccggcgcctcaagaaggagaacaagatgacgtggccgccgcggaacaagtgcgcagacgagaagcggccctacgcggagggcgaggaggaggaggggggcgaggaggaggcgcgggaggagcccctcaagagctccaagaacgcagagcccgtgggcaaagaggagaaggagctggagcttagtgacttggacgacttcgacccgctggaagcagagccgccggcgtgcgagctgaagccgcccttccactccctggacggcggtctggagcgcgtccccgccgcgcccgacggcccggtcaaggaggcctcaggcgcgctccggatgtctctggccgcgggtggcggagctgctctggacgaggacctggagagggcccggagctgtctccgcagcgcggcggccgggccggagccactgccgggcgcagagggcggccctcaggtctgcgaggccaagctggggtttgtgccggcgggggcgtcggcaggcctggaggctaagccgcgcatctggtccctggcccacacagccaccgccgccgccgccgccgccacctccctgagccagactgagtttccgtcgtgcatgctcaagcgccaaggtcccgcggcccctgcggctgtgtcctccgcgcccgccacgtccccgtctgtggcccttccccactctggcgccctggacaggcaccaggactccccggtaaccagtctcagaaactgggtggacggggtcttccacgaccccatcctcaggcacagcactttgaaccaggcctgggccaccgccaagggcgccctcctggaccccgggcctctgggacgctcgctgggggcgggcgcgaacgtgctgactgcacccctggcccgcgcctttccgcctgccgtgccccaggacgccccagctgcaggcgccgccagggagctgctcgccctgcccaaggccggcggcaaacccttctgcgcctgaggcgggcgggtcccgagcccaggagggaacccgcgctcaggcggacggcgccgactcttttcactgagtttccagaggaagactagcgcggccaccgcgaagccgccaacccaccggagagggggcttctgaacttggactcctgggaacatggacaagcccggcgctgccacgccggggcctccaccgcctgggcctgagcctgaccgggccattcccaaatttgggacgcggaaggagaggctctcggagcagaagaggccagataccctgaagcataaagtttacgtcaaaagtttacatggagaaggcggttccgttctgaagcgtggtctgctgtcccctgggcgtgaggcctcctgggcctgtcgggcctccgatttcatcctcagcacgtaatgctcaccaacagcacttgcactgagttgactcttgcacactcttgactccataatatgatgctttttaagatgtatgttcacaccaataattgcctgcttcagaggctaatataacaaaaccaataaaaccgagtgatggtgaaaaaaaa

SEQ ID NO: 473 - DNA, 2078 bp, Homo sapiens
atgtcctatccgcagggctacttgtaccagccgtccgcctcgctggcgctctactcgtgcccggcgtacagcaccagcgtcatttcggggccccgcacggatgagctcggccgctcttcttcgggctccgcgttctcgccctacgctggctcgactgccttcacggcgccctcgccgggctacaactcgcacctccagtacggcgccgaccccgcggccgccgccgccgccgccttctcctcgtacgtgggctctccctacgaccacacacccggcatggcgggctccttggggtaccatccttacgcggcgcccctgggatcgtacccttacggggacccagcgtaccggaagaacgccacaagggacgccacggctaccctcaaggcctggctcaacgagcaccgcaagaacccctaccccaccaagggcgagaagatcatgctggccatcatcaccaagatgaccctcacccaggtgtccacctggttcgccaacgcgcgccggcgcctcaagaaagagaataaaatgacgtggacgccgcggaaccgcagcgaggacgaggaagaggaggagaacattgacctggagaagaacgacgaggacgagccccagaagcccgaggacaagggcgaccccgagggccccgaagcaggaggagctgagcagaaggcggcttcgggctgcgaacggcttcagggaccacccacccctgcaggcaaggagacggagggcagcctcagcgactcggattttaaggagccgccctcggagggccgcctcgacgcgctgcagggccccccccgcaccggcgggccctccccggctgggccagcggcggcgcggctggcggaggacccggcccctcactaccccgccggagcgccggcgcccggcccgcatccagccgcgggcgaggtgcctccgggtcccggcgggccctcggttatccattcgccgcctccgccgccgcctcctgcggtgctcgccaagcccaaactgtggtctttggcagagatcgccacatcgtcggacaaggtcaaggacgggggcggcgggaacgagggctctccatgcccaccgtgtcccgggcccatagccgggcaagccctaggaggcagccgggcgtcgccggccccggcgccgtcacgctcgccctcggcgcagtgtccttttccaggcgggacggtgctgtcccggcctctctactacaccgcgcccttctatcccggctacacgaactatggctccttcggacaccttcatggccacccggggcccgggccaggccccacaaccggtccggggtctcatttcaatggattaaaccagaccgtgttgaaccgagcggacgctttggctaaagacccgaaaatgttgcggagccagtctcagctagacctgtgcaaagactctccctatgaattgaagaaaggtatgtccgacatttaacgcgggctgcgtcggtcccggacttttctaatttattaaaaacatggccttggcagttatttttccatcaccgagagagagagacagagagagaaaataaactacccctcctattcagaagtttatagtttatggagatggatgacataaaaatgtaaacatctccacacaaaaaaaaaaatgtcttaaccaaccgaaaagaaaaattaaaaaaggatttgtattaaatcttattctgtatatttaatgtagcatttttgtatttaaattgataattcaatatctttgaagtaaattatgaaatcaagacacctgtacaggcatttaatgtttttttgtaatataaatatatacatttgtgtttcccccaaaactgtttcatagttaaaaaatacaagtttaatttaattttttacacctattgattctgctgggtatgagctaaagtattacagaaaggaaacaggttatactcttagatttaaaaagtgaaagaaactgcaggcgcctttgtaaaatgcaaaatatttaattaaaagagattttaacataatgagagccactcattactttttagaagcctcaataaactgtccattgccttggtcaaaaaaaaaaaaaaaaaa

SEQ ID NO: 474 - DNA, 808 bp, Homo sapiens
attgatagctctttctcgattccgtgggtggtggtgcatggccgttcttagttggtggagcgatttgtctggttaattccgataacgaacgagactctggcatgctaactagttacgcgacccccgagcaggaactgagacacctcactgctgggggcgcggaacagctgggctgagacgggaactcgacagggaagagagagacgggccagggacagccaccatgtccttcccacactttggacacccgtaccgcggcgcttcccagtttctggcgtcggcaagttccagcaccacatgctgcgaatctacccaacgctctgtctcagatgtggcatcaggctccaccccagcgcccgctctctgctgcgcaccctacgatagtcgactgctgggcagtgcgcgaccggagctgggcgccgccttgggcatctatggagcaccctatgcggccgctgcagctgcccagagctaccctggctacctgccctatagcccagagcccccctcactgtatggggcactgaatccacagtatgaatttaaggaggctgcagggagttttacatccggcctggcacaaccaggagcctattatccctatgagcggactctggggcagtaccaatatgaacgatatggcgcagtggaattgagtggcgccggtcgccgaaagaacgcgacccgggagaccaccagtacactcaaggcctggctcaacgagcaccgcaaaaacccctaccccactaagggtgagaagatcatgctggccatcatcaccaagatgaccctcacccaggtgtccacc

SEQ ID NO: 475 - DNA, 10932 bp, Homo sapiens
gcagaactttggcgggcaaggagacaaacagccacactgtgctgccggggaagagaagaagaaggaaaggccagacacacaggcgtcgtgcagctgcggaaggattccgtttcctgcagggggcggagggatttgacagcacggtaacttccggaaaagtcctgaacctcagtggaaaagccttgcaagaaacaataacaaacgggaggaggaagcgattctggggtttctgtgttgaacggttcttgtccgcgaagatgcgcttcggcctctgtcaggggacttgaacgggcttagtgggcttcagccagcttttctccaccggttccccacggggacccccccccccccccggccgttgcaatggcgggcgtggggccggggggctacgcggcggagttcgtgccaccgccagagtgccccgtctttgagccgagttgggaggagttcacagatccgctcagctttatcggccgcatccggcctttggcggagaaaaccggcatctgcaaaattcggccgcccaaggactggcagcctccatttgcctgtgaagtaaaaagctttcgtttcactccaagagtccagcgcctgaatgaacttgaggcaatgaccagagtgagattggatttcttggatcaactagcaaaattttgggaacttcaaggatctactctgaagatccctgtggtagagagaaaaatcctggatctgtatgctttgagcaagattgttgccagcaaaggaggttttgaaatggtcaccaaagagaagaaatggtctaaagtgggtagtcgcttgggatatctgccaggaaaaggaactgggtctcttttgaagtcacattatgaaagaattctctacccatatgagcttttccagtctggtgtgagccttatgggtgtgcagatgcctaatttagatcttaaagaaaaagtggagcctgaggttctcagcactgatacccaaacttccccagagccaggcacaaggatgaacattctgccgaagagaacaagacgtgtgaagactcagtcagaatctggagatgtgagtagaaacacggaactgaagaaacttcagatttttggggctgggcccaaggttgtgggcttggcaatgggaacaaaagataaagaagatgaggtcacccgaagacgaaaagttaccaacaggtcagacgcatttaacatgcaaatgagacaacggaaaggcactctctctgttaactttgttgatctctatgtttgtatgttttgtggtcggggaaacaatgaagataaattgcttttgtgtgatggatgtgatgacagctatcatacattttgtctaattcctccactacctgatgtgcccaaaggagactggaggtgtcctaaatgtgtcgccgaggaatgtagcaaacctcgagaagcctttggatttgaacaagctgtacgagagtatacacttcagagctttggagagatggcagataattttaagtctgattattttaatatgccagtccatatggttcccacagaactagtagaaaaggaattttggcggctggtaagcagcattgaagaagatgttattgtggaatatggagcagatatctcctcaaaagactttggaagtggatttccggtgaaggatgggcggagaaagattctgccagaagaagaggaatatgcactttctggttggaatttgaataacatgcctgtcctggaacagtctgttcttgcacatattaatgtggacatctctggtatgaaagtgccgtggctctatgtgggaatgtgcttctcttctttttgctggcacattgaggatcactggagttattccatcaactacttgcactggggggagccaaagacatggtatggtgtgccatctcatgctgcagagcaactggaggaggtgatgagagagctggcccccgagttatttgaatcccagcctgatcttctgcatcagttagttaccatcatgaaccccaacgtgctaatggagcatggtgtgcctgtgtacaggaccaatcagtgtgctggcgagtttgttgtgacatttcctcgtgcctatcactctggatttaaccagggctacaactttgctgaagctgtgaacttctgtactgctgactggttgcccattggacgtcaatgtgtaaatcattaccgacgcctaaggcgccactgtgtcttttcacacgaggaactaattttcaagatggcagcagatccagaatgcttagatgtggggctggctgccatggtctgcaaagaattgactctcatgactgaagaagaaacacgattaagagagtctgttgtacagatgggtgtcctgatgtcagaagaagaagtgtttgaacttgttcctgatgatgagcggcagtgttcagcatgcagaaccacatgttttctctctgctctcacatgttcctgtaatcctgagcggcttgtatgtctctaccatccaactgatctgtgcccctgccccatgcagaagaaatgtcttagatatcgctacccattagaagacctcccttctctgctatatggtgtaaaagtcagggcacagtcctatgacacttgggtcagtcgtgttacagaagcattgtctgctaacttcaaccacaaaaaagatttgattgaattgcgagtaatgctggaagatgctgaggataggaaatacccagagaatgatctctttcgaaaactcagggatgctgtaaaagaagctgagacctgtgcttctgtggctcagctgcttctgagcaaaaagcagaaacacagacagagcccagatagtgggaggactcggaccaaactgacagtggaagaattgaaggcctttgtccaacaactttttagtcttccgtgtgtcatcagccaagctcggcaagtaaagaatctgctagatgatgtggaagagtttcatgaacgtgctcaggaggccatgatggatgaaaccccagattcttccaaactccagatgttgatagatatgggctctagtctctatgtggaactccctgaattaccacgactgaagcaagagctacaacaggctcggtggttggacgaagtaagactgaccttatcagatccgcaacaagtcactttggatgtcatgaagaagctgatagactctggggtagggttggcaccccaccatgctgtggagaaagcaatggctgaactacaggagctccttacagtctctgaacgatgggaagaaaaggctaaggtctgcctacaggcaagaccgaggcacagtgtggcaagtttagaaagcattgtgaatgaagccaagaacattccagcctttctacccaatgtgttgtccttgaaagaagccttacaaaaggctcgagaatggaccgctaaagtggaagctattcagagtggcagcaattacgcttatttggagcagcttgagagcttgtctgcgaaaggacgccctattcctgtgcgtcttgaagcactgccgcaagtggaatcacaggtagcagcagcacgggcatggagagaacggactgggcggacgtttcttaagaagaattctagccatacattgttacaggtgctgagcccccggaccgacattggtgtatatgggagtggcaaaaataggaggaaaaaagtaaaagaactaatagaaaaagaaaaagaaaaggatctggacctggagcctctgagtgatctggaggaaggattggaggaaaccagagatacagccatggtggtggcagttttcaaagaacgggagcaaaaagagattgaagccatgcattctctcagagcagccaacctagccaagatgacaatggtggaccgcatagaagaagtaaaattttgcatttgccgcaagacagccagtgggtttatgctacagtgtgagctctgcaaagactggttccataacagctgtgttcctcttcctaaatcaagttcccaaaaaaaaggatccagctggcaagctaaagaagtaaaattcctttgccctctttgtatgcggtctcgaaggcccaggctagagactattctgtcactcctggtatcccttcagaagttgcccgtacggttgcctgaaggagaggccctgcagtgtttgacagaacgtgctatgagttggcaagatagagcgcggcaggctctagccacagatgaactatcctctgccctggccaaactatctgtgttgagccagcgtatggtggaacaggcggctcgagaaaaaactgaaaagatcatcagtgcagaactccaaaaagcagctgccaatccagacttacagggacacttacctagtttccagcagtctgcttttaaccgggtggtgagcagtgtgtcatcttctcctcgacaaacaatggactatgatgatgaagaaacagactctgatgaagacattcgagagacatatggctacgacatgaaggacacagccagtgtgaagtcctctagtagtcttgaacccaatcttttttgtgatgaagagattcccatcaaatccgaggaggtggtgacccacatgtggacagcaccttcattttgtgcagagcatgcttattcttctgcttctaagagttgttctcaagtattttttgggaaaggttctagcaccccaaggaaacaacctcggaagagccctttggtgccccgaagtttggaacctccagtgctggagttgtcacctggagctaaggcacaactggaagaacttatgatggttggagatctcctggaagtatctctggacgagactcaacacatatggcggattttgcaggccacacacccaccctctgaagacagattcttgcatatcatggaggatgacagcatggaagagaaaccactaaaagtgaaaggaaaggactcttcagagaagaaacggaaacggaagctagaaaaggtagagcaactttttggagaaggaaaacagaagtccaaggagttaaagaaaatggacaaacctagaaagaagaaattaaaattaggtgcagacaaatcaaaggagctgaataaactggccaagaaactagcaaaagaagaagagagaaagaaaaagaaggagaaggctgctgcagccaaagttgaacttgtgaaagagagcactgaaaagaaaagagagaaaaaggtgctggacatcccctcaaagtatgactggtcaggagcagaggagtctgatgatgagaatgctgtgtgcgcagcacagaactgccaaaggccctgcaaggacaagggagttgtatttgtaacggaagaagagaagaataaaaaatattagttttaaaagtggcctatgtgactgcttttctaaaaaggtagactgggtacaatgtgatggtggctgtgatgagtggtttcatcaagtttgtgtgggtgtatctccagaaatggctgaaaatgaagattacatctgtataaactgtgcaaagaagcaggggccagttagcccaggtccagcaccacctccttccttcataatgagctacaaactaccaatggaggatcttaaagagaccagttagcagatgcttggttagtttgggacatggggggacatggaccacattgagaccttagtcatcaagtagagtggtttatatccacttggaatgttgcttccaaagatgaatggccttcagagaaagtccccttagtgctggcttcctctttgcatggactctgtgggttacattctctatcaacatatctatgcagagggtgtcttctttggtacaacagccaatatttcatgtctcctttgagtgtggtttactgcattaaggccagatgcttaattgagctctagggtggctggttagtattaatacattggtgtgctaacagggcatataggatgtggcttttgtccagctgatagtagttagaggcttacaacttaggagcagcaccaactgaaggtgctaattgcttggatctccttcattgggatagttggagagggattggagtaccactttccttccactgttacctggtacttaatgccctaaagatacaactaggagtaacagggccaaagttatttctgttagacgtcaaggaatggtatcacagtctattgacctcagcgatttgtgcttgtttgtgctagaagaacatcccaaataggagaacctctcacaagctggggcaggtcaccttatctttgtaagatgaggatatcatctagatcagaaatctgactagattggattctgaggagaagaacctactacaaggcaaggagccgttttttggctttgaaaagtcttgctgtcttgggtctacattttagggaagagcaggtacatggatccaggcttctgccaaaaaaaaaaagagaagaagatgacgatgatgaccagtcgtactatcttactgagccacagtgatgcatgcttttcggggaaaacttcattcacaagtattccagacaccaggcttcaggcatggccatgagcaagaccagcaaataacagctttttgccttgcagccctgaccccaatgtctgctgtttccaacactggtgatttctaactacggcccacagcagatgctgttgaataacaccatggcttcatcagaggatgtggggttgtagtacctctgggtgatgaagttgttttagtaaatccatttttaaaaaaaaaaaaggacttgtttttacttttttctaaatgtctctgactactgactgttctatacatagattatttttccttttttaatatacatatatgaatatataaatatatatatttactgttaccagcagcatatgacagagtttcaacatcaaaaatccatttgggggcttgctttttcttttttgctttaaaaaaaaaaatcccattccttctttgtagtacaaggagttagcactccctcctccatcccagcctgaccagatcttccattttgcttttgttcatatagataattatatgtcctttgtgtgttgggacttgtccctgtctgttgggaaacttggtctcactctagtctgtgctggctcttttttcttttgtgtgtgaatgtttgaaactatggtgctgtgtcctcttccctcctgttgtgttctctgttcttcttaaggtattaggtaagctgtatgtaaactcttattagaaggggactaatttttttttaaaggacaaaaaaaaaaatgactaaaaatagtgttttgtcatcactgtctggtgtctttattttggtttaaaaaaatctgtggtttgacttaaattcatcagttttccttttaaaggggggattggggtggacctagcaacagcttatagtttcctcttccctttttgccccagtctcttttaaagaactgtcttctagtaactagaagtgaaatgtactgtccagttacagtttgagtgggtatgagatttaactcaaaaggaatcttacaaaaaaaaagatgttttcttataaaatccaatttctgtaaatgttttctctgaagttcatactacctactttttattcattcttaatactgtataacattttgagtgttttgacttgttcagaggtttgttagtgttgctgtgcatatgtcttgaggtctcatctgaagtaagtttgtgtatgatcgaagatttcaatggatattgcaaggtaactaattaactgatttcataagttttcgttttgccaagctaacgattatcaattaagaatttcctctggttgatgttatacaagaaagcacaatattttttgcctgttgatcttctttgtaacagtcttcagatatttgtgggttaaaaattgaatgtaattttaagtgacagatgcctggaatacatttaaaatttttatttttccttcctaatcatccattaactattccactatcagtggagagtcatgaggatgctgagaaagtatgaatagcttcctgtcaccttctgacgttttgaaacttaaatatgtcttttcgttgatactgtgggattttctgtatttacttgacagtcatggaggatttggtatgacttgaccacaggtttagaccaaggctgagaagaacagaagggagaaattaatggcaaaacaaaaaatacacaaatctgcggttttggaattaatgaaacaagattcatctatttaaagaaatgttggtgttctaatacaaagcattattttcacttagagaaaattacttacttgctcccttctgtattgtaatattttgtattaagacatgatttaaaatgtctttctacccttatctcctctaaactgcaactgaagttgcaattcttcatcattagtattttaactctggcaaaggttatagaaagaaaaatggaaatatggtaggcctgtggtattcttaaaagctaagtcattagaactatgcagatccccaagtttaaaagtacaaatacagcaccagtagttagctttctagctgggggagaagacaggagatttttcttccacagatgtttattttgcttcctgataggtactgcagcaaagccatgttgatgtgtagatgcatgacttcctcactaagctgctgcacaccagctttgcctgcatgattcaaatttgtgcctcagtaaaattataaattattgcatgtcataccttgaataatggaaacggcaaacattaaacctgtgattacccataatgtactttaataataaaaaacatggcagccaggtgcagtagagtgcacctgtggtcaggaggctgaagtgggaagattgcttcaacctgtgagtttgagtcccgcctggtcaacagcgagaccccatgtgtctgtctgtctctctctttttttaaaggacagaggctaagctgtaaggttagcatggttctgcctgggctttgcttctgtgcttctgtgcaggctgagctgtaaggttagcatggttctgcctgggctttgcttctgcgcttctgtgcaggctgagctgtaaggttagcatggttctgcctgggctttgcttctgcgcttctgtgcaggctgagctgtaaggttagcatggttctgcctgggctttgcttctgcgcttctgtgctagcaggtgcccacaaaatgtctttttgaatttcttaatttttgggttctggatgcaattcgtgcacgccaagaaactacttgcttgtcagtattttaattctgtagtacatgtgtgtgaatatcagccagtacttacagtaggaggatgaacagaaaaactgagaagacctgtctttcaaaagatgggtttatccactttttaagggaaaaagtgacagtttggcatgggatttgaaaagtggaaattgtggaaaaattgagctgttgaagtcccacatataaccagatttaataaagcttcacatgtgaattagctccatatgtgtgtagaaggttgcttttatagcaggtccttaagtactccttttgaaattcctcctttttttttaagtcataccattacttctttggatatgaatgtcccaagtggtatctcctactgtagtatgaggaagaatggctgttaatgtattttttgaattttggtcttgtcttggcctggatcatatccagtcaccactatgcaacaaatgatgtgcactgggcaaggatatgatgggttatgaaagctgtatcttgtttgttttttcttttgcagtactccaagtggtctaaacaggaatgtcttgtaaaacctcaagactccctattgattattcccttacatatttatttacaatttatcagggtaattggtggtgccttatgaaaagtataactcgatttcttgatctttgagcatgttttgtgtttcttgtgttttctaaaagaatattagatatggttaattgcattacatctaaaagatttaaaaaattgtgtgtatgctcaggttccccacacccatacccaccctaacccctgtcatttacattggtggcaactttaaatggtaaccaagcaaaagtacattttgataatgagtattgataatcctgaggaaaactagtgagtatatgggagccacctttgacctgtgccaaagcagtttctaatttcatttgctaactataaaataaagaactgagccaaaataatttgatcagtggtgtgattagcctattatcattgctgagaatagtgtttttggagtgtgaagtgattcctgaagatttcacctgccttctgtttccagcaagaatccagtgatgaccaacacatttcctcacttttggttcttgagaagtttatccctttgcaacaaaccattaatagggaaaacaaggaaatgctttccctttctctttggcttcttaaagctcacaaccaattcagaccccaagttacttcagagaagcaaatggcaccttttccccattgccaaggatcccagcttatgcagatatgaaggacggatcatttctgaaaatgttaagactctgcttgcagtggacttggcctcagtttcatgaaatgtgtaactctgtatgtgtatgttaggaggagggttggttgaaagagcgggggcagggaggggaatctgattacctcttgggaaataattttcttgccaacaaaaagatacacttgaagtttcttaaggtggcaagtccattaaaaaaaaaaattgtgttggaccctcccagtttagatcaagtatttcttgggggtcttgctattgtggttgataccaataaatggaagatccagaatattttcatttaaagctcaaccattaattggaacatggtgaaacattgtacacattgtaaaagtagggaacagtacaaaagaatggaatcaaatactatattatgtgaataaactagagtgattttggaatttcactctcttcaccccttctcacttgtatgttctgtaaagtgtatttctactttggtaggaagaaagacttgatttaatatttc

SEQ ID NO: 476 - DNA, 6393 bp, Homo sapiens
gtacaactcggacttgctgttgctcgagccgcgtctgcacgggtctcggaccgagcggagctcgcagcctcggtcccggagcccaccttcgcctcgcccttgcccagcctgcggtgatggaggcggccaccacactgcacccaggcccgcgcccggcgctgcccctcgggggcccgggcccgctgggcgagttcctgcctccacccgagtgcccggtcttcgaacccagctgggaagagttcgcggaccccttcgctttcatccacaagatccggcccatagccgagcagactggcatctgtaaggtgcggccgccgccggattggcagccaccatttgcatgtgatgttgataaacttcattttacgccacgtatccagagactgaatgaattggaggcccaaactcgtgtaaaattgaatttcttggaccagattgcaaagtactgggagttacagggaagtactctgaaaattccacatgtggagaggaagatcttggacttatttcagcttaataagttagttgcagaagaaggtggatttgcagttgtttgcaaggatagaaaatggaccaaaattgctaccaagatggggtttgctcctggcaaagcagtgggctcacatatcagagggcattatgaacgaattctcaacccctacaacttattcctgtccggagacagcctaaggtgtttgcagaagccaaacctgaccacagacactaaggacaaggagtacaaaccccatgatattccccagaggcagtctgtgcagccttcggaaacgtgccccccagcccgacgagcaaaacgcatgagagcagaggccatgaatattaaaatagaacccgaggagacaacggaagccagaactcataatctgagacgtcgaatgggttgtccaactccaaaatgtgaaaatgagaaagaaatgaagagtagcatcaagcaagaacctattgagaggaaagattatattgtagaaaatgagaaggaaaagcccaagagtcgatctaaaaaagccaccaatgctgtggacctgtatgtctgtcttttatgtggcagtggcaatgatgaagaccggctactgttgtgtgatggctgtgatgacagttaccataccttttgcttgatcccacctctccatgatgttcccaagggagactggaggtgtcctaagtgtttggctcaggaatgtagtaagccacaagaagcatttggctttgaacaagcagccagggactataccctccgtacttttggggaaatggcagatgcgttcaaatctgattacttcaacatgccagtccatatggtccccacagagcttgttgagaaagaattttggagactagtaagcactattgaggaggatgtcacagtggaatatggagctgacattgcctcaaaggaatttggcagtggctttcctgtccgagatgggaaaatcaaactctcacctgaggaagaggagtatcttgatagtggctggaatttgaacaacatgccagtgatggagcagtctgtccttgcacatattactgctgatatatgtggcatgaaacttccttggttgtatgtgggaatgtgcttttcttcattctgttggcacattgaagaccactggagctattcaattaactacttgcactggggtgagccaaaaacctggtatggagtcccagggtatgctgctgagcagctagaaaatgtaatgaagaaactagctccagaactctttgtgtcccagccggatctcctccatcagcttgtgaccatcatgaaccccaataccctgatgactcatgaagtgcctgtttaccgaactaatcagtgtgctggggagtttgtgattacatttccaagagcctaccacagtggttttaaccagggttttaattttgctgaggctgttaacttctgcactgttgattggctgccattaggccgacagtgtgtggagcattatcgcttgcttcatcgatattgtgtgttttcccacgatgagatgatctgcaagatggcttccaaggctgatgtattagatgttgtagtggcttcaactgttcagaaagacatggccattatgattgaggatgagaaagctttaagagaaactgtccgtaaattgggagtgattgattcggaaagaatggattttgagctgttgccagatgatgaacgtcagtgtgtaaaatgcaaaactacatgcttcatgtctgccatctcctgttcttgtaaacctggccttcttgtttgcctgcatcatgtaaaagaattgtgttcctgtcctccttacaaatataaattgcggtataggtacacgctggatgatctctaccctatgatgaatgcattgaagcttcgagcagaatcttacaacgaatgggccttgaatgtgaatgaagctttggaggcaaagatcaacaagaagaaaagccttgtcagcttcaaggctttaattgaagaatctgaaatgaagaaattcccagacaatgatcttttgcgacaccttcgcctagtcacacaggatgcagagaagtgtgcctctgttgcgcagcagttgcttaatggcaaaaggcaaactagatatcgatctggtggagggaaatcccaaaatcagttgacagtgaatgagctccggcagtttgtaacacagctgtatgctcttccatgtgtcctcagtcagacaccattactaaaggatctcttgaatcgtgtagaagattttcaacagcatagtcagaaactactctctgaggaaacgcctagtgctgcggagctgcaggacttgctagatgtcagctttgaatttgatgttgaacttccacagcttgctgagatgcgtatccgtttggaacaagcccgttggctagaagaggtgcagcaagcttgcctagaccccagctcccttactttagatgatatgagacgtctcatagacctaggggtagggctggccccgtattcagcagtggagaaagctatggcccggctgcaggaactgctcacagtgtcagagcactgggacgacaaagccaagagtctcctcaaggccaggccacgacattcattgaatagccttgctacggcagtaaaggaaatcgaagagatccctgcatatctgcccaatggtgcggctctgaaagactcagtgcagagagccagagactggcttcaggatgtagagggcctgcaggctggaggacgtgtgccagtgttagacacactcatagaacttgttacacgaggccgatctatccccgtacatctgaattctttgccaagactggaaaccctagtagctgaggttcaggcttggaaagaatgtgctgttaatacattcttgactgagaattctccatattctctcttagaggtgctgtgtcctcgatgtgatattggccttttgggattgaaaaggaagcagagaaagttaaaggagcccttgccaaatggaaagaaaaaaagcaccaaattagagagtctgagtgacctggagagagctttaactgaaagcaaggagactgcttcagctatggcaactcttggggaagctcgcctaagggaaatggaagccttgcagtctctcagactcgccaatgaagggaaattgctgtcgcctctccaagatgtggatataaaaatctgcctatgtcagaaggccccagctgcccctatgattcaatgtgaactctgcagggatgctttccacaccagttgtgtggcggtacccagtatttcacagggcctgcgaatctggctttgtccccattgtcggaggtcagagaaacctccattagagaaaattctgcccctgctcgcctcccttcagcgtatccgagttcgccttcctgagggagatgcacttcgatatatgattgaaagaaccgtgaactggcagcacagagcccagcaactgctttcgtcagggaatcttaaatttgtgcaagatcgagtgggctcaggactgttatatagcagatggcaagcctcagcaggacaggtgtcagacacaaacaaggtatctcaacctcctggcacaacatcattttctttgcctgatgactgggacaacagaacctcatatttgcactcccccttctcaactggacgaagttgtatccccctccatggtgttagtccagaagtgaatgaactattgatggaagcccagctgctccaggtatcccttcctgaaattcaggaactttaccagactttacttgcaaagccaagccctgctcagcagactgaccgaagctcaccagtgagacccagcagtgagaagaatgactgttgccgagggaagcgagatggaattaacagtcttgagagaaaactgaagagacgcctggaaagagagggcctctccagtgagcggtgggaacgagttaagaaaatgcggacccccaaaaagaagaaaatcaaactgagccaccccaaggacatgaacaatttcaagttagagagagagcgtagctatgaattagttcgttctgctgaaactcattccctgccctcagacacatcctattccgaacaggaagactctgaggatgaagatgccatctgcccagctgtgagctgcctgcagccagaaggagatgaggtggactgggtccagtgtgatggcagctgcaatcagtggtttcatcaggtctgtgttggtgtctccccagagatggcagagaaagaagactacatctgtgtgcgctgtactgtgaaggacgcaccaagccgaaagtaaaaacacaaaaacagatacccccctacttaatgtaattcaggactccaaccaagaggatttcttcaaatctcagcaaagctacaggactggtactcaagccagcctgtaaacggtgctatttctattccttatgggatcatttttccaggactctttgaagaaaagaaaaaacaactaaaaaaatttttgacactttttgtattttttccttaagagctatttgtggttgttgaggtttgaaaagctgactgttttttttgcaggggttcccaccaatttggaaggcattgaagcttgcaccttttcatgtacagcattaaaattttacctctctctgggatttaccagcttaagagtccaactcacttccagtgcccaaaagggcacccaccagaaattccagtaaatcctcatttgaggaagctctcccttgtttactctgttaccacattggggaaatttttaagtttttcactttgggagtttttgtttgtttcttcttttcctttatccacttttcttcttcctggtagactaggtttatttatctgagcaataacttctatgttggtttcagtggctggaattaaaacaaaacaaaacaaacttccaaacagtgtgttggtgctttagcgattgattgatgtacagaacacaaatgtctagtttctagtgtcactgatgaactagtgatgtagaaaagagacttctctgtaagtaattgccacagctgtattttggctttctccctgtcccttcctttctcccctattttttggtagcttgtatcaaatgttacagtttatattgtggaataaatccttcgtcctaacataacactaaatgctgattatttagagccattagagcacagcttcttctgcccctctactgttgcacagccagaaggggctgcttgcttttgcctctgcccaaccaggttgcagtagcagtggatgttagcctgcaaacaacattaggggattcttcttttgtgtcctgctctgtttggtgggccatatgcctacagccctcactaacaaagaacccctctgtcttcaaggactagaacctatctttaaagccgtgctcttttaaaataagctttctcagaatgttggcaaatcacttcaatcctcaaatcagtcttccttgtggaatgctgcctttattatatttgaattgacaggggaacttggtttagggttaagacgttggaaggaaatctaaggaaaattaatcctcacagaggtccgggtttagtatatgtcttgagaggagacttgtgaattcccagactctgcctcctggtttcctttctcatttctttctaactgtagctatcattactggctgtggatagcccatagctattttccttgcttttcttttttaaaggggtctgttctgcagtggagaagacattctggtgaccagacttttgcttaccttttcctattctgttgccaatttttgttttccccacattctatagccataaacctgaagatgagtaaaactggtgggtctttaataaaacaacaacaaaaacagcagtttgtgatatagcagaggtttaaatgtaccctccccttttatgcacttcaaataattaaatctctttaagaatgaaaaaaaaaaa

SEQ ID NO: 477 - DNA, 5502 bp, Homo sapiens
cattttaaaaaagatccggccatactatttttatcttgctttttcgttctgtcgcagtactgtttaatatgagtccagcgacggctctgtgactgttttcctctggtaaaatcgctcttgcgtcctcagcgtttatctcaggtgcggaaggtctcacaggtttggaaatagcgccggaaaaatcgatccgcggagtgagacggctcgtaccacactgcagggcccggaggtcaagatggtggctgtaaaactaggatccctgacgattgcttagcattaaggcccgacatggaaccggggtgtgacgagttcctgccgccaccggagtgcccggtttttgagcctagctgggctgaattccaagacccgcttggctacattgcgaaaataaggcccatagcagagaagtctggcatctgcaaaatccgcccacccgcggattggcagcctccttttgcagtagaagttgacaatttcagatttactcctcgcgtccaaaggctaaatgaactggaggcccaaactagagtgaaattgaactatttggatcagattgcaaaattctgggaaattcaaggctcctctttaaagattcccaatgtggagcggaagatcttggacctctacagccttagtaagattgtgattgaggaaggtggctatgaagccatctgcaaggatcgtcggtgggctcgagttgcccagcgtctccactacccaccaggcaaaaacattggctccctgctacgatcacattacgaacgcattatttacccctatgaaatgtttcagtctggagccaaccatgtgcaatgtaacacacacccgtttgacaatgaggtaaaagataaggaatacaagccccacagcatcccccttagacagtctgtgcagccttcaaagttcagcagctacagtcgacgggcaaaaaggctacagcctgatccagagcctacagaggaggacattgagaagcatccagagctaaagaagttacagatatatgggccaggtcccaaaatgatgggcttgggccttatggctaaggataaggataagactgtgcataagaaagtcacatgccccccaactgttacggtgaaggatgagcaaagtggaggtgggaacgtgtcatcaacattgctcaagcagcacttgagcctagagccctgcactaagacaaccatgcaacttcgaaagaatcacagcagtgcccagtttattgactcatatatttgccaagtatgctcccgtggggatgaagatgataagcttcttttctgtgatggctgtgatgacaattaccacatcttctgcttgttaccaccccttcctgaaatccccagaggcatctggaggtgcccaaaatgtatcttggcggagtgtaaacagcctcctgaagcttttggatttgaacaggctacccaggagtacagtttgcagagttttggtgaaatggctgattccttcaagtccgactacttcaacatgcctgtacatatggtgcctacagaacttgtagagaaggaattctggaggctggtgagcagcattgaggaagacgtgacagttgaatatggagctgatattcattccaaagaatttggcagtggctttcctgtcagcaatagcaaacaaaacttatctcctgaggagaaggagtatgcgaccagtggttggaacctgaatgtgatgccagtgctagatcagtctgttctctgtcacatcaatgcagacatctcaggcatgaaggtgccctggctgtacgtgggcatggttttctcagcattttgttggcatattgaggatcactggagttactctattaactatctgcattggggtgagccgaagacctggtatggtgtaccctccctggcagcagagcatttggaggaggtgatgaagatgctgacacctgagctgtttgatagccagcctgatctcctacaccagcttgtcactctcatgaatcccaacactttgatgtcccatggtgtgccagttgtccgcacaaaccagtgtgcaggggagtttgtcatcacttttcctcgtgcttaccacagtggttttaaccaaggctacaattttgctgaagctgtcaacttttgtactgctgactggctacctgctggacgccagtgcattgaacactaccgccggctccggcgctattgtgtcttctcccacgaggagctcatctgcaagatggctgccttcccagagacgttggatctcaatctagcagtagctgtgcacaaggagatgttcattatggttcaggaggagcgacgtctacgaaaggcccttttggagaagggcgtcacggaggctgagcgagaggcttttgagctgctcccagatgatgaacgccagtgcatcaagtgcaagaccacgtgcttcttgtcagccctggcctgctacgactgcccagatggccttgtatgcctttcccacatcaatgacctctgcaagtgctctagtagccgacagtacctccggtatcggtacaccttggatgagctccccaccatgctgcataaactgaagattcgggctgagtcttttgacacctgggccaacaaagtgcgagtggccttggaggtggaggatggccgtaaacgcagctttgaagagctaagggcactggagtctgaggctcgtgagaggaggtttcctaatagtgagctgcttcagcgactgaagaactgcctgagtgaggtggaggcttgtattgctcaagtcctggggctggtcagtggtcaggtggccaggatggacactccacagctgaccttgactgaactccgggtccttcttgagcagatgggcagcctgccctgtgccatgcatcagattggggatgtcaaggatgtcctggaacaggtggaggcctatcaagctgaggctcgtgaggctctggccacactgccctctagtccagggctattgcggtccctgttggagagggggcagcagctgggtgtagaggtgcctgaagcccatcagcttcagcagcaggtggagcaggcgcaatggctagatgaagtgaagcaggccctggccccttctgctcacaggggctctctggtcatcatgcaggggcttttggttatgggtgccaagatagcctccagcccttctgtggacaaggcccgggctgagctgcaagaactactgaccattgcagagcgctgggaagaaaaggctcatttctgcctggaggccaggcagaagcatccaccagccacattggaagccataattcgtgagacagaaaacatccctgttcacctgcctaacatccaggctctcaaagaagctctgactaaggcacaagcttggattgctgatgtggatgagatccaaaatggtgaccactacccctgtctagatgacttggagggcctggtggctgtgggccgggacctgcctgtggggctggaagagctgagacagctagagctgcaggtattgacagcacattcctggagagagaaggcctccaagacctttctcaagaagaattcttgctacacactgcttgaggtgctttgcccgtgtgcagacgctggctcagacagcaccaagcgtagccggtggatggagaaggcgctggggttgtaccagtgtgacacagagctgctggggctgtctgcacaggacctcagagacccaggctctgtgattgtggccttcaaggaaggggaacagaaggagaaggagggtatcctgcagctgcgtcgcaccaactcagccaagcccagtccactggcaccatccctcatggcctcttctccgacttctatctgtgtgtgtgggcaggtgccagctggggtgggagttctgcagtgtgacctgtgtcaggactggttccatgggcagtgtgtgtcagtgccccatctcctcacctctccaaagcccagtctcacttcatctccactgctagcctggtgggaatgggacacaaaattcctgtgtccactgtgtatgcgctcacgacggccacgcctagagacaatcctagccttgctggttgccctgcagaggctgcccgtgcggctgcctgagggtgaggcccttcagtgtctcacagagagggccattggctggcaagaccgtgccagaaaggctctggcctctgaagatgtgactgctctgttgcgacagctggctgagcttcgccaacagctacaggccaaacccagaccagaggaggcctcagtctacacttcagccactgcctgtgaccctatcagagaaggcagtggcaacaatatttctaaggtccaagggctgctggagaatggagacagtgtgaccagtcctgagaacatggctccaggaaagggctctgacctggagctactgtcctcactgttgccgcagttgactggccctgtgttggagctgcctgaggcaatccgggctcccctggaggagctcatgatggaaggggacctgcttgaggtgaccctggatgagaaccacagcatctggcagctgctgcaggctggacagcctccagacctggacagaattcgcacacttctggagctggaaaaatttgaacatcaagggagtcggacaaggagccgggctctggagaggcgacggcggcggcagaaggtggatcagggtagaaacgttgagaatcttgttcaacaggagcttcagtcaaaaagggctcggagctcagggattatgtctcaggtgggccgagaagaagaacattatcaggagaaagcagaccgtgaaaatatgttcctgacaccttccacagaccacagccctttcttgaaaggaaaccaaaatagcttacaacacaaggattcaggctcttcagctgcttgtccttctttaatgcctttgctacaactctcctactctgatgagcaacagttgtgacagtggcaccaaaggtcatttgtggttgtttttgtttgtttgtttcttaaatcctactatctcctggcctggacctcagaaggagctttttgcttatctataatttttcactgccaatttttgatatcctctctcctagagttactgttaaaaggttggttcgtaaagtccacaccccgatgctcagaagtgtcttgccagcaacattcctgctagcatacaggagtgatttcctaaaccagtttcattctagtctgaatagggacaaacaaatcttgaggaagcccaagtgcgtacctttatttttgcccccaccaccctctttctgtacttcaatttttgtttgttttttgtttttttgtccctgtcataaaatattttggtgcttcaaaacttgtaccttcattgtacatccttttcttttctccccttgggtcttattataaaagaagacaatgtacgttgtaattaccaaaaagaatagggaaaaacaagaatttcatgactctacctgtggtctatctttaatttcatttcttttgttaaaaataaaacaatgagtatgtttggatactatgaaaaaaaaaaaaaaaa

SEQ ID NO: 478 - DNA, 4007 bp, Homo sapiens
gccccagcccagccccgcggggaggctcccgcagcccagggacctcgagctttccccgcgccgggcgctgcagccgggcccctcccgcgaggcgcccggcagcctgaggcttccttttggttcccgccccgggacgggaggctccgtccgctccctggacagccggggtgctccctccttctccctcccgcgctctcctcccccgtccgtttgcagggaggtgctctcctcgggcggcggggaaggcggggctggcctgccactcctcctgctatgatgcctgggcagatcccggacccttcggtgaccacaggctccctgccagggcttggccccctgaccgggctccccagctcggccctgactgtggaggagctgaaatacgctgacatccgcaacctcggggccatgattgcacccttgcacttcctggaggtgaaactgggcaagaggccccagcccgtgaaaagtgagctagatgaggaagaggagcgaaggaaaaggcgccgggagaagaacaaagtcgcagcagcccgatgccggaacaagaagaaggagcgcacggagtttctgcagcgggaatccgagcggctggaactcatgaacgcagagctgaagacccagattgaggagctgaagcaggagcggcagcagctcatcctgatgctgaaccgacaccgccccacctgcatcgtccggaccgacagtgtcaagacccccgagtcagaaggcaacccactgctcgagcagctcgagaagaagtgaccatgggctgggaggaggtggaggaggaggaagaggagaaggaaaagtgacgaagagagaggaggaggggggccccagatggcccttcctttggtgcatgaaaaactgtacaatgaggttcagcacagccagcatcagccgagcttttttgtgaaactcagatcagccacccaggaggaagagcgggctgaggaaacccagagggaccaagcgctgagaccaaagttgaccctcgggtagggttgtcctgcctggggccccacttgaaggaggcaggacagaggcaccgaggccagggagacgcccaacgaggcagccctgggctcttctctggcctcttcaccagggcacccatccaaggaacctccgaacagccaggaaaagccatgagttgcaaccaaaacgcggctgaggatggaactcagaatgaaactgcaacccacctgcccccagccctgcccctcgccctgatgcgaagctggagaggggcgtgctgcggggccctgatgcccccacccacctcggtccagcgcggccctgcccaggaggcggcagccgggcgcaccctcgccagccctgctggagtttgctgtgggcactgaggcgcgggcgcccttccaaagcacatactcaccgaatgtttacagactggctgtcctggcagggctttcaactgcacatgttttttatactttcctttttttttttttttttaatattttttacaaaaaaaaagattttatacaagcaatatatatatggatttctataatcactcgatgtgatacagtataaatatgctatggtttgtttgttatgaacagatagccaccagttacggccgttgtgtgtaactcctaagtactgtagtctctgggtgtcgggggtggccagggcgggggcggggtgcatttccatccttgtaaacccttcatagtactcagtcctgtatcgctcagtaaacattgctcttacttacatagccgccttgcgtggtgtctgcctggggaatgggtgcaaggccctctcagggtcggagactgtttggagcctctgctataggcctgttcattttcacaacagctctcctatttcacagatgaggaagctaaggctcagagacattaagccacctgcagttactattttgagagcagtcagagtgttcgctcactctgcagatgttttctgagggcctgttgtgtgtgccaggccctgagaattcactggaggatgaaacagacctaagtcttgcccttgtggggcctccagtaaggagtgaatcctgtgcttgctccataagttgtctcatttcgtcttcatggcagccttgccagggaacagcacttgtccccaattcacagatggcgaattagaggtccagggaattaaactcgcagacaccatttgttgaagacttattttgtgacaagcagacatagtctcttcccttctcacaagagcacaaactaggcacgattcttctcattttacagatggtttaactgaggctcagagaaggtaagcgacttatccaaggtaacccagctagcaagggatagagctggtgtttgaactctccctccagaggcctgtgactctcctcctgtcaccaacccactatgattgtcctcatggttgaataggaagcttatgaggccacagttatagatttagtttctgggaaggctggatagagttccaggttgtcccatgatcacagagtgaaccaactaccctggtcaatgtgtgtctgacccagggaagggtgtggatggcttctctgccccctcacctcgacagctgaatccctgccacccagggccggagcagctcagtggcattcactcagtgcctgctgtgtacctggcactcggcagttctcaaggcatgtcacgcatgaggaaggcgggagaggtgtttttagcttccttgtatactgaagcttgcaaaggctacagtttacccaactaaacttgactcctgcattctaatcatgtgttctttctcctccatccctggacttaggataactagttgctggtgatgacttcgtgtcaagaacagcagtgaacctgggttgcttcccaaattgtggacgaggccttctgggatgggcagaagtggagaatggtgattaacacacctgtgatccctccctcgctcactcctctcagtttccctccacccaacacacttggtgtggactcccctgcaccccgccctagaaacaggacctggtcctctcactgtcagctgtggcagaaggttgtggcagcgggttgccttctgtctcgggggtcttgaggctgtcggtccggacgatgcaggtgaggcagtgtcagttctgcatcaggaacccctcgcgctgtaatcctttgatatttttcaagccatgagaaaaatgaagtggacttaccagggtccctccagtgacctagtggatgttcttacaggactgccgtgtgccactggctgtggcttccctggtcctgtgcttggccaccgggagctggcatctccaaaatagagcctccttagcctgtgcaggtgggctgtcttccaaagtcaccacaccagtgacttgtgctgtgcggagccttcctcaccaggaccactggctgctcctgtggctagaagtcacaattataggcttcattgcaagagccagcatttgagtttcttctgggcacctgccactgtgcatgtgtgacctcaactgctttgtgcaccctgactggggggtaggtgctagcgttccaacattacagatgagaaaaccgaggcacacagaagaggtaacctgcccaaggtcacaggtgttaggtggcagagccaagatgttattgtcagtctgacttcaggtgcataaaacctgaggctgagcctccccatgagaggaaaaatgtgtttgtggtgtgacctcagttgccagggaacttgtgcaggaagccgggagagatggcacagacccacctgtgctcacagtacatgttaagaattcccaagtctcaggcaaaccatctccaagggtgttcacagaagacacaccttaaaggcaaacgggttcatgatgtaatcttctattgactagctgtgaacctcatttttcttatctgtgaagtgggaacagtaataatccaagtctttttatggagttatcaagatcaaaaaaggaatggatatacaaagtgttttgtgaaataaaagctccctaaaatggtaaaaaaaaaaaaaaaaaa

SEQ ID NO: 479 - DNA, 5756 bp, Homo sapiens
gttttactaaagtgaatttttttttgtttgcttcgttcgtctttggctctttttttttccttcccaatttcggatttatttcaaggcgaatctggctttgggggaagaggaagaaaagtcggattacaagatcaaccaccaccaacaacaataaaaaccaccaggatatttttttgcaaatttctgacggctttaaattcatgaagcaattgtccccttttgcaatcagcatttggatctcagaatgagcaaggaaagacccaagaggaatatcattcagaagaaatacgatgacagtgatgggattccgtggtcagaagaacgggtggtacgtaaagtcctttatttgtctctgaaggagttcaagaattcccagaagaggcagcatgcggaaggcattgctgggagcctgaaaactgtgaatgggctccttggtaatgaccagtctaagggattaggaccagcatcagaacagtcagagaatgaaaaggacgatgcatcccaagtgtcctccactagcaacgatgttagttcttcagattttgaagaagggccgtcgaggaaaaggcccaggctgcaagcacaaaggaagtttgctcagtctcagccgaatagtcccagcacaactccagtaaagatagtggagccattgctaccccctccagctactcagatatcagacctctctaaaaggaagcctaagacagaagattttcttacctttctctgccttcgaggttctcctgcgctgcccaacagcatggtgtattttggaagctctcaggatgaggaggaagtcgaggaggaagatgatgagacagaagacgtcaaaacagccaccaacaatgcttcatcttcatgccagtcgacccccaggaaaggaaaaacccacaaacatgttcacaacgggcatgttttcaatggttccagcaggtcaacacgggagaaggaacctgttcaaaaacacaaaagcaaagaggccactcccgcaaaggagaagcacagcgatcaccgggctgacagccgccgggagcaggcttcagctaaccaccccgcagcggccccctccacgggttcctcggccaaggggcttgctgccacccatcaccacccccctctgcatcggtcggctcaggacttacggaaacaggtttctaaggtaaacggagtcactcgaatgtcatctctgggtgcaggtgtaaccagtgccaaaaagatgcgcgaggtcagaccttcaccatccaaaactgtgaagtacactgccacggtgacgaagggggctgtcacatacaccaaagccaagagagaactggtcaaggacaccaaacccaatcaccacaagcccagttccgctgtcaaccacacaatctcagggaaaactgaaagtagcaatgcaaaaacccgcaaacaggtgctatccctcgggggggcgtccaagtccactgggcccgccgtcaatggcctcaaggtcagtggcaggttgaacccaaagtcatgcactaaggaggtgggggggcggcagctgcgggagggcctgcagctgcgggaggggctgcggaactccaagaggagactggaagaggcacaccaggcggagaagccgcagtcgccccccaagaagatgaaaggggcggctggccccgccgaaggccctggcaagaaggccccggccgagagaggtctgctgaacggacacgtgaagaaggaagtgccggagcgcagtctggagaggaatcggccgaagcgggccacggccgggaagagcacgccaggcagacaagcacatggcaaggcggacagcgcctcctgtgaaaatcgttctacctcgcaaccggagtccgtgcacaagccgcaggactcgggcaaggccgagaagggcggcggcaaggccgggtgggcggccatggacgagatccccgtcctcaggccctccgccaaggagttccacgatccgctcatctacatcgagtcggtccgcgctcaggtggagaagttcgggatgtgcagggtgatcccccctccggactggcggcccgagtgcaagctcaacgatgagatgcggtttgtcacgcagattcagcacatccacaagctgggccggcgctggggccccaacgtgcagcggctggcctgcatcaagaagcacctcaaatctcagggcatcaccatggacgagctcccgctcatagggggctgtgagctcgacctggcctgctttttccggctgattaatgagatgggcggcatgcagcaagtgactgacctcaaaaaatggaacaaactagcagacatgctgcgcatccccagaactgcccaggaccggctggccaagctgcaggaggcctactgccagtacctactctcctacgactccctgtccccagaggagcaccggcggctggagaaggaggtgctgatggagaaggagatcctggagaagcgcaaggggccgctggaaggccacacagagaacgaccaccacaagttccaccctctgccccgcttcgagcccaagaatgggctcatccacggcgtggcccccaggaacggcttccgcagcaagctcaaggaggtgggccaggcccagttgaagactggccggcggcgactcttcgctcaggaaaaagaagtggtcaaggaagaggaggaggacaaaggcgtcctcaatgacttccacaagtgcatctataagggaaggtctgtttctctaacaactttttatcgaacagcgaggaatatcatgagcatgtgtttcagcaaggagcctgccccagccgaaatcgagcaagagtactggaggctagtggaagagaaggactgccacgtggcagtgcactgcggcaaggtggacaccaacactcacggcagtggattcccagtaggaaaatcagaacccttttcgaggcatggatggaacctcaccgtcctccccaataacacagggtccatcctgcgtcacctcggtgctgtgcctggagtgactattccctggctaaatattggcatggtcttttctacctcatgctggtctcgagaccaaaatcaccttccatacattgactacttacacactggtgctgactgcatttggtattgcattcctgctgaggaggagaacaagctggaagatgtggtccacaccctgctgcaagccaatggcaccccagggctgcagatgctggaaagcaacgtcatgatctccccggaggtgctgtgcaaagaggggatcaaggtgcacaggaccgtgcagcagagtggccagtttgtcgtctgcttcccgggatcctttgtgtccaaagtgtgctgtgggtacagcgtgtctgaaaccgtgcactttgctaccacccagtggacaagtatgggctttgagaccgccaaggaaatgaagcgtcgccatatagctaagccattctccatggagaagttactctaccagattgcacaagcagaagcaaaaaaagaaaacggtcccactctcagtaccatctcagccctcctggatgagctcagggatacagagctgcggcagcgcaggcagctgttcgaggctggcctccactcctccgcacgctatggcagccacgatggcagcagcacggtggcggacgggaagaaaaagcctcgaaagtggctgcagttggagacgtcagagaggaggtgtcagatctgccagcacctgtgctacctgtccatggtggtacaagagaacgaaaacgtcgtgttctgtctggagtgtgctctgcgccacgtggagaaacagaagtcctgccgagggctgaagttgatgtaccgctacgatgaggaacagattatcagtctggtcaatcagatctgcggcaaagtgtctggtaaaaacggcagcattgagaactgtctcagtaaacccacaccaaaaagaggtccccgcaagagagcgacagtggacgtgcccccctcccgtctgtcagcctccagttcatccaaaagtgcttcgagctcatcatgaagatgccaacgcccgtggtcgatttatatatatttttttgtaattattatattctagtttggagtacttgctgtaggattcaagctgtctttgcactagctctaaagaagattttcttctggttttagagaactaattttgttttagcattaaactgttgaacttttttttgtacttagaaaacctagatactgcagtcagattttggaaactgccgtatagtcactgttttaaaaaccccggaggggctgtattaatttgtattgccccatggctgacaaaagcctttttttttggttttgatttttttttttttgtaactgttggggggaaaaaggctttttaacccatttttgaagagggtgaagtttggagaacaaatttaaaaaccatcagtcatgtgagcagattttttagaagggataggagacacacgcgcacacacacacacacacgaaacttgaaatggctttgctttggctgtcgtcttctgccgtgtgccagatgagcttgtgatctgggaagccggggcacccccgttttgtttctctgggcggttgtggcagctgaaggcggacgttgtttcctaaccataggtggaacgaggagacgggagcgagtgggctctccaccagcacatcactatgcatctgttccaggaaagaagaaaagcgagcgaggaagacggaaaagactgcctgccttggaggggtcacatgagggagacctgtgcctgatttcattaggaaatccattctgttattttttggtgctgttggctactttatcaaaaaacccttcaatagcatccttaagatttaaaaaaaaaaaaaaaaaaaaggaaaaaaaagtgatggaagccgtaagtgcttctttgtcatcgacgtgcaatctttctaacattccatctccatctcaccgcttcttgtttgacaccttcacaagtcagcattaatctttcttttaaaacttgtttcatttatgatcatgtagagagccactaggaggcctgcagttatttttgaatgtgaaaatgcatttgcgttcatcttgtctattttttctcttcatgttgtaacaaaaaggaaaaaagaaaaaaaaatcccatcccttttgtacatatgcctgtaaattgttttaaatacttgagcctttttctcggtggggggtggggaggggggtgagaagacaagatgaagaaaagccttacatttcagtttcttcatcggttggattggatgcttacagggtttttcttgtaacatttataagtgctgcttacatcactgaacaacaacaaaaaaataataatggagtagctgttgcccttctccggttgtgtgtacagtatgtgtggaataaaaaagggaaactgttttcacaagctgttctttgtttcataattggattcatcaatcccgtagctacccatattgcactgagcttgccagtggtgactgccaggaacgtcctatgatccactttgttggttgttgttgcagaagactgaactgttttggaatatttaacaattacagaaacagtcaagtgttttccaatgtggttgtccggtttctatggccttgctgtgtactttccctctttttgacagtaaacttctgcctatggcttacagtttgacatttaatttattagcgctgctctgcacccctcccttgggagggagacttcatgtggtttattgcgagttttttgtttacttttcaggtttgtactacaaggtttaataataaaaacaaagttttttgga

SEQ ID NO: 480 - DNA, 4907 bp, Homo sapiens
taatgggggtcgcccgggagtcggaagggggaggggaaagggaggaggcagccaaggaattgtttttttctctggccccgccctcgcccggggggccaatggtgatgatctgtttcccccggagcctcgcccagctcctgtgtttcagccaatgagcggcggaagcggctccgaggggggcgggtccgggaggctgtgcgtgtcttgtgagagctcttgaaccaagtcagcgctggagtcggctaggcggctggaaacggcggctgccgccggtgactcagggaggcgggaggcgggggaggagctcttcctgcaggcgtggaaaccatggtgctcacgctcggagaaagttggccggtattggtggggaggaggtttctcagtctgtccgcagccgacggcagcgatggcagccacgacagctgggacgtggagcgcgtcgccgagtggccctggctctccgggaccattcgagctgtttcccacaccgacgttaccaagaaggatctgaaggtgtgtgtggaatttgatggggaatcttggaggaaaagaagatggatagaagtctacagccttctaaggagagcatttttagtagaacataatttggttttagctgaacgaaagtcacctgaaatttctgaacgaattgtacagtggcctgcaataacgtacaaacctctgttggacaaagctggtttgggatccataacttctgttcgctttctgggagatcaacaaagagtatttctttctaaagaccttttgaagcctatacaggatgtaaacagtcttcgactttctcttacggataatcagattgtcagtaaagaatttcaagctttgattgtgaagcatttagatgaaagccatcttttaaaaggtgacaaaaacttagttggttcagaagtaaaaatttatagcttggacccatctactcagtggttttcagcaaccgttataaatggaaacccagcatcaaaaactcttcaagtcaactgtgaggagattccagcactgaaaattgttgatccgtcactgattcatgttgaagttgtacacgataaccttgtgacatgtggtaattctgcaagaattggagctgtaaaacgcaagtcttctgagaataatggaaccctggtttccaaacaagcaaaatcttgctctgaggcctctcccagtatgtgtcctgtgcagtctgtacctacaacagtttttaaggagatactgcttggctgtactgcggcaactccacctagtaaggacccaagacagcaaagtactccccaggctgccaactctccacctaaccttggagcaaaaattcctcaaggatgtcataaacaaagtttaccagaggaaatttcttcctgtctaaatacaaagtctgaagctctgagaacaaaaccagatgtctgcaaagcagggttgctctcaaagtcctctcagattggaactggagacttgaaaattctgactgagccaaaaggcagctgtactcagcctaagacaaacactgatcaggaaaacagattggagtctgttccacaagcattgactggccttcctaaggagtgcttacctacaaaggcttcttctaaggcagaattggaaattgccaatcctcctgaactgcagaagcacctagaacatgcaccttccccatcggatgtttcaaatgcaccagaagtgaaagcaggtgtcaatagtgatagccctaataactgttcaggaaaaaaggtagaaccttcagctttagcttgccgatcacagaatttaaaggaatcttcagtaaaagtagataatgaaagctgttgttcaagaagcaacaataaaatccagaatgccccatccaggaagtcggttttgacagacccagctaaactcaaaaagctgcaacagagtggcgaggccttcgtacaggatgattcttgtgtgaacatcgtggcacagttgcctaaatgccgagagtgtcgcttggacagtctccgcaaggataaggagcaacagaaggactcacctgtgttttgccgcttctttcacttcaggaggttacaattcaacaaacatggtgtgttgcgggtagaaggcttcttaacaccaaacaagtatgacaatgaagcaattggcttgtggttacctttaaccaaaaacgttgtggggattgatttggacacagcaaagtacatcttggccaacattggagaccacttctgtcaaatggtgatttctgaaaaggaagctatgtcaactattgagccacacagacaggttgcttggaagcgagctgtcaaaggtgttcgagaaatgtgtgatgtgtgcgacaccaccatcttcaacctgcactgggtgtgtcctcggtgtgggtttggagtatgtgtggactgctaccggatgaagagaaagaattgccaacagggtgctgcttacaagactttctcttggctaaaatgtgtgaagagtcagatacatgaaccagagaacttaatgcccacacagatcattcctggaaaagcactctatgatgttggagacattgttcattctgtaagagcgaaatggggaataaaggcaaactgcccttgttcaaacaggcaattcaaactcttttcaaagccagcctcaaaggaagacctaaaacagacttctttagctggagaaaaaccgactcttggtgcagtgctccagcagaatccctcagtgttggagccagcagctgtgggtggggaagcagcctccaagccagccggcagcatgaagcctgcctgtccagccagcacatctcctctaaactggctggccgacctaaccagcgggaatgtcaacaaggaaaacaaggaaaaacaaccaacaatgccaattttaaagaatgaaatcaaatgccttccacccctcccacctttaagcaaatccagcacagtcctccatacgtttaacagcacaattttgacacccgtaagcaacaacaattctggtttcctccggaatctcttgaattcttctacaggaaagacagaaaatggactcaagaatacaccaaaaatccttgatgacatctttgcctctttggtgcaaaataagacgacttctgatttatctaagaggcctcaaggactaaccatcaagcccagcattctgggctttgacactcctcactattggctttgtgataatcgcttgctgtgcttgcaagaccccaacaataagagcaactggaatgtgtttagggagtgctggaaacaagggcagccagtgatggtgtctggagtgcatcataaattgaactctgaactttggaaacctgaatccttcaggaaagagtttggtgagcaggaagtagacctagttaattgtaggaccaatgaaatcatcacaggagccacagtaggagacttctgggatggatttgaagatgttccaaatcgtttgaaaaatgaaaaagaaccaatggtgttgaaacttaaggactggccaccaggagaagattttagagatatgatgccttccaggtttgatgatctgatggccaacattccactgcccgagtacacaaggcgagatggcaaactgaatttggcctctaggctgccaaactactttgttcggccagatctgggccccaagatgtataatgcttatggattaatcactcctgaagatcggaaatatggaacaacaaatcttcacttagatgtatctgatgcagctaatgtcatggtctatgtgggaattcccaaaggacagtgtgagcaagaagaagaagtccttaagaccatccaagatggagattctgacgaactcacaataaagcgatttattgaaggaaaagagaagccaggagcactgtggcacatatatgctgcaaaggacacggagaagataagggaatttcttaaaaaggtatcagaagagcaaggtcaagaaaacccagcagaccacgatcctattcatgatcaaagctggtatttagaccgatcattaagaaaacgtcttcatcaagagtatggagttcaaggctgggctattgtacagtttcttggggatgtggtgtttatcccggcaggagctccacatcaggttcataacttatatagctgcatcaaagtggctgaagattttgtttctccagagcatgttaaacactgcttctggcttactcaggaattccgatatctgtcacagactcataccaatcacgaagataaattacaggtgaagaatgttatctaccatgcagtgaaagatgcagttgctatgctgaaagccagtgaatccagttttggcaaaccttaatctccctgcacattggaaatgaattacaggcagctgttcaaactcttcaggcaggattcctgtggactttgagattcatgttacctcatcttcttttttaaactgtacccaacttgtgagggtactctgtctaatgtatatttctagtgtttacagacagtaaatgtgtatatgtagtaactatttacagaacatgcatccttaaactgtgacttctcacctagtgcagaacttttaccaggctgtaaaagcaaaacctcgtatcagctctggaacaatacctgcagttattcttcagctgtttggacaacttagattgggtttataactattaggaatcactgcacagtttatttgggttgtgttttgtgtctgagtcccctccctcatcccttagggtccagaagagcaatggaggaagtgacagctaatgttgcagttcttattgtatggcataggactggcattatatagcagaaatcaactactgtacaatttcttggggttaaccatctttagttaaatggaattttaatttaaatgacgctttgctaattttaagtgttaagcattttgcattaaaatattcatataataaaaaaaaaaaaaaaaaa

SEQ ID NO: 481 - DNA, 3454 bp, Homo sapiens
ggagtttcggccttcgcctgctggaaaagcagtaggatcggccagtggcgacagcaggagctgagcctaagccctggcggggctttgggctgtagattcctgtctgactaaagggacctcaaaaaggagggaaaatggcttctgagtctgaaactctgaatcccagtgctaggataatgaccttttatccaactatggaagagttccgaaacttcagtagatacattgcctacattgaatcccaaggagctcatcgggcagggctagccaaggttgttcctccaaaagagtggaagccacgagcatcctatgatgacattgatgatttggtcattcctgcccccattcaacagctggtgacggggcagtctggcctctttactcagtacaacatacagaagaaagccatgactgttcgagagttccgcaagatagccaatagcgataagtactgtaccccacgctatagtgagtttgaagagctcgagcggaaatactggaaaaatcttacattcaatcctccaatctatggtgcagatgtgaatggtaccctctatgaaaagcatgttgatgagtggaatattggccggctgagaacaatcctggacttggtggaaaaggagagtgggatcaccattgagggtgtgaacaccccatacctgtactttggcatgtggaagacatcctttgcttggcacactgaagacatggacctctacagcatcaactacctgcactttggagaaccaaagtcctggtactctgttccacctgagcatggaaagcggttggaacgcctcgccaaaggctttttcccaggaagtgctcaaagctgtgaggcatttctccgccacaagatgaccctgatttccccgttaatgctgaagaaatatggaattccctttgacaaggtgactcaagaggctggagagtttatgatcactttcccttatggttaccatgccggctttaaccatggttttaactgtgcggagtctaccaattttgctacccgtcggtggattgagtacggcaagcaagctgtgctgtgctcctgtagaaaggacatggtgaagatctccatggatgtgtttgtgagaaagttccagccagaaaggtacaaactttggaaagctgggaaggacaacacagttattgaccatactctgcccacgccagaagcagctgagtttcttaaggagagtgaactgcctccaagagctggcaacgaggaggagtgcccagaggaggacatggaaggggtggaggatggagaggaaggagacctgaagacaagcctggccaagcaccgaatagggacaaagaggcaccgagtttgtcttgaaataccacaggaggtgagtcagagtgagctcttccccaaggaggatctgagttctgagcagtatgagatgacggagtgcccggcagccctcgcccctgtgaggcccacccatagctctgtgcggcaagttgaggatggtcttaccttcccagattattctgactccactgaagtcaaatttgaagagcttaaaaatgtcaaactagaagaggaggatgaggaggaagaacaagaagcagctgccttggatctttctgtgaatcctgcgtctgtagggggacgccttgtcttctcaggctccaaaaagaaatcatcttctagcctgggctctggctcttcacgggattctatctcttctgattcagaaactagtgagcctctctcctgccgagcccaagggcaaacgggagttctcactgtgcacagttatgccaaaggggatggcagggtcactgtgggagagccatgcacgaggaagaaaggaagcgccgctagaagtttcagtgagcgggagctggcagaggttgcagatgaatacatgttttccctagaagagaataagaagtccaagggacgccgtcagcctttaagcaagctcccccgccatcacccacttgtgctgcaggagtgtgtcagtgatgatgagacatctgaacagctgacccctgaggaagaggctgaggagacagaggcctgggccaagcctctgagccaactgtggcagaaccgacctccaaactttgaggctgagaaggaattcaatgagaccatggcccaacaggcccctcactgcgctgtctgtatgatcttccagacttatcatcaggttgaatttggaggctttaatcagaactgtggaaatgcttcagatttagccccccagaagcagaggaccaagccattgattccagaaatgtgcttcacttcgactggctgcagcacggacatcaacctttctactccttatcttgaggaggatggcaccagcatactcgtttcctgcaagaagtgcagcgtccgggtccatgccagttgctatggggtcccccctgcaaaggcttctgaagactggatgtgttctcggtgttcagccaatgccctagaggaggactgctgtttatgctcattacgaggaggggccctgcagagagcaaatgatgacaggtgggtccacgtttcatgtgctgtggcaattctggaagcaaggtttgtcaacattgcagaaagaagtccggtggatgtgagcaaaatccccctgccccgcttcaaactgaaatgtatcttctgtaagaagcggaggaaaagaactgctggctgctgtgtgcagtgttctcacggccgctgcccaactgccttccatgtgagctgcgcccaggctgccggtgtgatgatgcagcctgacgactggccttttgtggtcttcattacctgctttcggcacaagattcctaatttggagcgtgccaagggggccttgcaaagcatcactgcaggccagaaagtcattagcaagcataagaacgggcgcttctaccagtgtgaagtggtcaggctcaccaccgagaccttctatgaagtcaactttgatgatggctccttcagcgacaatctttatcctgaggacatagtgagccaggactgtctccagtttggtcctcctgctgaaggggaagtggtccaagtgagatggacagacggccaagtctatggagccaagtttgtggcctcccaccctatccaaatgtaccaggtggagtttgaggatggctcacaacttgtggttaagagagatgatgtatacacactggatgaagagcttcccaagagagtcaaatctagactgtcagtagcctcagacatgcgcttcaatgagattttcacagagaaagaggttaagcaagaaaagaaacggcaacgagttatcaactcaagataccgggaagattatattgagcctgcactataccgggccatcatggagtaggtgcttccagggtccaagggattctcagccatccaggcaagagcactctgggttccacagcacagcagacatggaacgctgaagtctctgaaagtgaagttgtaaaaagaaaaaaaaaaaaaaaa

SEQ ID NO: 482 - DNA, 3058 bp, Homo sapiens
ctaccaacttcgccaccctgcggtggattgactacggcaaagtggccactcagtgcacgtgccggaaggacatggtcaagatctccatggacgtgttcgtgcgcatcctgcagcccgagcgctacgagctgtggaagcagggcaaggacctcacggtgctggaccacacgcggcccacggcgctcaccagccccgagctgagctcctggagtgcgtcccgggcctcgctgaaggccaagctcctccgcagacaaattagtctgaaagaaaacagacactggagaaagactgaggaggagaggaaaccaagtctagaaaggaagaaagagcagaccaaaaggccggggctgtcgtctcaccggaaacggagccagcccaagaagccgaagcccgaagaccccaagttccctggggagggtacggctggggcagcgctcctagaggaggctgggggcagcgtgaaggaggaggctgggccggaggttgaccccgaggaggaggaggaggagccgcagccactgccacacggccgggaggccgagggcgcagaagaggacgggaggggcaagctgcggccaaccaaggccaagagcgagcggaagaagaagagcttcggcctgctgcccccacagctgccgcccccgcctgctcacttcccctcagaggaggcgctgtggctgccatccccactggagcccccggtgctgggcccaggccctgcagccatggaggagagccccctgccggcaccccttaatgtcgtgccccctgaggtgcccagtgaggagctagaggccaagcctcggcccatcatccccatgctgtacgtggtgccgcggccgggcaaggcagccttcaaccaggagcacgtgtcctgccagcaggcctttgagcactttgcccagaagggtccgacctggaaggaaccagtttcccccatggagctgacggggccagaggacggtgcagccagcagtggggcaggtcgcatggagaccaaagcccgggccggagaggggcaggcaccgtccacattttccaaattgaagatggagatcaagaagagccggcgccatcccctgggccggccgcccacccggtccccactgtcggtggtgaagcaggaggcctcaagtgacgaggaggcatcccctttctccggggaggaagatgtgagtgacccggacgccttgaggccgctgctgtctctgcagtggaagaacagggcggccagcttccaggccgagaggaagttcaacgcagcggctgcgcgcacggagccctactgcgccatctgcacgctcttctacccctactgccaggccctacagactgagaaggaggcacccatagcctccctcggagagggctgcccggccacattaccctccaaaagccgtcagaagacccgaccgctcatccctgagatgtgcttcacctctggcggtgagaacacggagccgctgcctgccaactcctacatcggcgacgacgggaccagccccctgatcgcctgcggcaagtgctgcctgcaggtccatgccagttgctatggcatccgtcccgagctagtcaatgaaggctggacgtgttcccggtgcgcggcccacgcctggactgcggagtgctgcctgtgcaacctgcgaggaggtgcgctgcagatgaccaccgataggaggtggatccacgtgatctgtgccatcgcagtccccgaggcgcgcttcctgaacgtgattgagcgccaccctgtggacatcagcgccatccccgagcagcggtggaagctggtgaggagcctggggcctggaggggcttggccgatcatggcctgggctgcagccctgcagggctgtctgctgcacaccctgtagcccacctgcgcacaaggcacttggggctgtccacgcctgctggaaaatgacactcagctggccctttaaatcagcttcctgcagagccttgggacctggcccagaaagaagatgaggaggccaggcctggtggctcatgcctgtaatcccagcactttgggaggccgaggcgggtcgatctcctgaggtcaggagttcgagaccagcctggccaacatatgaaaccccgtctctactgaaaatgcaaaacttagctctgcatggcgggacgtgcctgtgatcccagctactcgggagactaaggcgggagaattgcttgaacctgggcggcggaggttgcagtgagctgagattgcgccactgcactccagcctgggcgacagagtaagactctgtctcaaaaaaaaaaaagatgaggagagcaaaatgcagatgttgctggggccgcgtccccactaagggctgtgcatgtggcagcgctgatggggaggacgcatttgtccctgtgcactccggcctctgcacacgtgtctcgtgggcccctggaggctgggcccgcagccagtagcacccagcagcgtcctgcctgcttttcctgcctggtttatcttcccagccgcggacacagtgcctggtgttgacattcaggcttgcgtggaggtggggctggaagcagacagatcagtctggcagggtgggtctgctggggagaccacaagggtgggactgatgccggccacaaagcccgggctcccatgcactggtgcgaggtgcccacgagcccggcgggcttggatgccatgcttggagcccacaggtgctgggccacctgggcagggctgtgcaggcagtcacagaggctcatctggaaggggagccctctttccttgttcgtggagtggagtgtgcagtgggtcacgccggcctggccgggcacggccaggcgattaggaagccggcagcccgcgggtgatgcttccgaggcaccagtgactcagtccacaaacgtgggcgtaaaaggcctcatgattcaggtggagtgatggtgcgatgcgtggtgcagtgataagtcctcctgcccgacgccttatggatcatctgacatttccagaacgcagcctcttcattaccggtgcttgtaacgatgaattaaaaatccttttacacgaaaaaaaaaaaaaaaaaaa

SEQ ID NO: 483 - DNA, 3338 bp, Homo sapiens
gacatcatgggctatttttaggggttgactggtagcagataagtgttgagctcgggctggataagggctcagagttgcactgagtgtggctgaagcagcgaggcgggagtggaggtgcgcggagtcaggcagacagacagacacagccagccagccaggtcggcagtatagtccgaactgcaaatcttattttcttttcaccttctctctaactgcccagagctagcgcctgtggctcccgggctggtgtttcgggagtgtccagagagcctggtctccagccgcccccgggaggagagccctgctgcccaggcgctgttgacagcggcggaaagcagcggtacccacgcgcccgccgggggaagtcggcgagcggctgcagcagcaaagaactttcccggctgggaggaccggagacaagtggcagagtcccggagcgaacttttgcaagcctttcctgcgtcttaggcttctccacggcggtaaagaccagaaggcggcggagagccacgcaagagaagaaggacgtgcgctcagcttcgctcgcaccggttgttgaacttgggcgagcgcgagccgcggctgccgggcgccccctccccctagcagcggaggaggggacaagtcgtcggagtccgggcggccaagacccgccgccggccggccactgcagggtccgcactgatccgctccgcggggagagccgctgctctgggaagtgagttcgcctgcggactccgaggaaccgctgcgcccgaagagcgctcagtgagtgaccgcgacttttcaaagccgggtagcgcgcgcgagtcgacaagtaagagtgcgggaggcatcttaattaaccctgcgctccctggagcgagctggtgaggagggcgcagcggggacgacagccagcgggtgcgtgcgctcttagagaaactttccctgtcaaaggctccggggggcgcgggtgtcccccgcttgccagagccctgttgcggccccgaaacttgtgcgcgcagcccaaactaacctcacgtgaagtgacggactgttctatgactgcaaagatggaaacgaccttctatgacgatgccctcaacgcctcgttcctcccgtccgagagcggaccttatggctacagtaaccccaagatcctgaaacagagcatgaccctgaacctggccgacccagtggggagcctgaagccgcacctccgcgccaagaactcggacctcctcacctcgcccgacgtggggctgctcaagctggcgtcgcccgagctggagcgcctgataatccagtccagcaacgggcacatcaccaccacgccgacccccacccagttcctgtgccccaagaacgtgacagatgagcaggagggcttcgccgagggcttcgtgcgcgccctggccgaactgcacagccagaacacgctgcccagcgtcacgtcggcggcgcagccggtcaacggggcaggcatggtggctcccgcggtagcctcggtggcagggggcagcggcagcggcggcttcagcgccagcctgcacagcgagccgccggtctacgcaaacctcagcaacttcaacccaggcgcgctgagcagcggcggcggggcgccctcctacggcgcggccggcctggcctttcccgcgcaaccccagcagcagcagcagccgccgcaccacctgccccagcagatgcccgtgcagcacccgcggctgcaggccctgaaggaggagcctcagacagtgcccgagatgcccggcgagacaccgcccctgtcccccatcgacatggagtcccaggagcggatcaaggcggagaggaagcgcatgaggaaccgcatcgctgcctccaagtgccgaaaaaggaagctggagagaatcgcccggctggaggaaaaagtgaaaaccttgaaagctcagaactcggagctggcgtccacggccaacatgctcagggaacaggtggcacagcttaaacagaaagtcatgaaccacgttaacagtgggtgccaactcatgctaacgcagcagttgcaaacattttgaagagagaccgtcgggggctgaggggcaacgaagaaaaaaaataacacagagagacagacttgagaacttgacaagttgcgacggagagaaaaaagaagtgtccgagaactaaagccaagggtatccaagttggactgggttgcgtcctgacggcgcccccagtgtgcacgagtgggaaggacttggcgcgccctcccttggcgtggagccagggagcggccgcctgcgggctgccccgctttgcggacgggctgtccccgcgcgaacggaacgttggacttttcgttaacattgaccaagaactgcatggacctaacattcgatctcattcagtattaaaggggggagggggagggggttacaaactgcaatagagactgtagattgcttctgtagtactccttaagaacacaaagcggggggagggttggggaggggcggcaggagggaggtttgtgagagcgaggctgagcctacagatgaactctttctggcctgccttcgttaactgtgtatgtacatatatatattttttaatttgatgaaagctgattactgtcaataaacagcttcatgcctttgtaagttatttcttgtttgtttgtttgggtatcctgcccagtgttgtttgtaaataagagatttggagcactctgagtttaccatttgtaataaagtatataatttttttatgttttgtttctgaaaattccagaaaggatatttaagaaaatacaataaactattggaaagtactcccctaacctcttttctgcatcatctgtagatactagctatctaggtggagttgaaagagttaagaatgtcgattaaaatcactctcagtgcttcttactattaagcagtaaaaactgttctctattagactttagaaataaatgtacctgatgtacctgatgctatggtcaggttatactcctcctcccccagctatctatatggaattgcttaccaaaggatagtgcgatgtttcaggaggctggaggaaggggggttgcagtggagagggacagcccactgagaagtcaaacatttcaaagtttggattgtatcaagtggcatgtgctgtgaccatttataatgttagtagaaattttacaataggtgcttattctcaaagcaggaattggtggcagattttacaaaagatgtatccttccaatttggaatcttctctttgacaattcctagataaaaagatggcctttgcttatgaatatttataacagcattcttgtcacaataaatgtattcaaataccaaaaaaaaaaaaaaaaa

SEQ ID NO: 484 - DNA, 1832 bp, Homo sapiens
gagcggccaggccagcctcggagccagcagggagctgggagctgggggaaacgacgccaggaaagctatcgcgccagagagggcgacgggggctcgggaagcctgacagggcttttgcgcacagctgccggctggctgctacccgcccgcgccagcccccgagaacgcgcgaccaggcacccagtccggtcaccgcagcggagagctcgccgctcgctgcagcgaggcccggagcggccccgcagggaccctccccagaccgcctgggccgcccggatgtgcactaaaatggaacagcccttctaccacgacgactcatacacagctacgggatacggccgggcccctggtggcctctctctacacgactacaaactcctgaaaccgagcctggcggtcaacctggccgacccctaccggagtctcaaagcgcctggggctcgcggacccggcccagagggcggcggtggcggcagctacttttctggtcagggctcggacaccggcgcgtctctcaagctcgcctcttcggagctggaacgcctgattgtccccaacagcaacggcgtgatcacgacgacgcctacacccccgggacagtacttttacccccgcgggggtggcagcggtggaggtgcagggggcgcagggggcggcgtcaccgaggagcaggagggcttcgccgacggctttgtcaaagccctggacgatctgcacaagatgaaccacgtgacaccccccaacgtgtccctgggcgctaccggggggcccccggctgggcccgggggcgtctacgccggcccggagccacctcccgtttacaccaacctcagcagctactccccagcctctgcgtcctcgggaggcgccggggctgccgtcgggaccgggagctcgtacccgacgaccaccatcagctacctcccacacgcgccgcccttcgccggtggccacccggcgcagctgggcttgggccgcggcgcctccaccttcaaggaggaaccgcagaccgtgccggaggcgcgcagccgggacgccacgccgccggtgtcccccatcaacatggaagaccaagagcgcatcaaagtggagcgcaagcggctgcggaaccggctggcggccaccaagtgccggaagcggaagctggagcgcatcgcgcgcctggaggacaaggtgaagacgctcaaggccgagaacgcggggctgtcgagtaccgccggcctcctccgggagcaggtggcccagctcaaacagaaggtcatgacccacgtcagcaacggctgtcagctgctgcttggggtcaagggacacgccttctgaacgtcccctgcccctttacggacaccccctcgcttggacggctgggcacacgcctcccactggggtccagggagcaggcggtgggcacccaccctgggacctaggggcgccgcaaaccacactggactccggccctcctaccctgcgcccagtccttccacctcgacgtttacaagcccccccttccacttttttttgtatgttttttttctgctggaaacagactcgattcatattgaatataatatatttgtgtatttaacagggaggggaagagggggcgatcgcggcggagctggccccgccgcctggtactcaagcccgcggggacattgggaaggggacccccgccccctgccctcccctctctgcaccgtactgtggaaaagaaacacgcacttagtctctaaagagtttattttaagacgtgtttgtgtttgtgtgtgtttgttctttttattgaatctatttaagtaaaaaaaaaattggttctttaaaaaaaaaaaaaaaaa

SEQ ID NO: 485 - DNA, 1890 bp, Homo sapiens
aggagccgccgccagtggagggccgggcgctgcggccgcggccggggcgggcgcagggccgagcggacgggggggcgcgggccccccgggaggccgcggccactcccccccgggccggcgcggcgggggaggcggaggatggaaacacccttctacggcgatgaggcgctgagcggcctgggcggcggcgccagtggcagcggcggcagcttcgcgtccccgggccgcttgttccccggggcgcccccgacggccgcggccggcagcatgatgaagaaggacgcgctgacgctgagcctgagtgagcaggtggcggcagcgctcaagcctgcggccgcgccgcctcctacccccctgcgcgccgacggcgcccccagcgcggcaccccccgacggcctgctcgcctctcccgacctggggctgctgaagctggcctcccccgagctcgagcgcctcatcatccagtccaacgggctggtcaccaccacgccgacgagctcacagttcctctaccccaaggtggcggccagcgaggagcaggagttcgccgagggcttcgtcaaggccctggaggatttacacaagcagaaccagctcggcgcgggcgcggccgctgccgccgccgccgccgccgccggggggccctcgggcacggccacgggctccgcgccccccggcgagctggccccggcggcggccgcgcccgaagcgcctgtctacgcgaacctgagcagctacgcgggcggcgccgggggcgcggggggcgccgcgacggtcgccttcgctgccgaacctgtgcccttcccgccgccgccacccccaggcgcgttggggccgccgcgcctggctgcgctcaaggacgagccacagacggtgcccgacgtgccgagcttcggcgagagcccgccgttgtcgcccatcgacatggacacgcaggagcgcatcaaggcggagcgcaagcggctgcgcaaccgcatcgccgcctccaagtgccgcaagcgcaagctggagcgcatctcgcgcctggaagagaaagtgaagaccctcaagagtcagaacacggagctggcgtccacggcgagcctgctgcgcgagcaggtggcgcagctcaagcagaaagtcctcagccacgtcaacagcggctgccagctgctgccccagcaccaggtgcccgcgtactgagtccgcgcgcggggcgcatgcgcggccaccctccccaaggggcgggctcgcgggggggtgtcgtgggcgccccggacttggagagggtgcggccctggggaccccccctccccgagtgtgcccaggaactcagagagggcgcggcccccggggattccccccccccgagggtgcccaggactcgacaagctggaccccctgctcccgggggggcgagcgcatgacccccccgccctcgcgctgcctctttcccccgcgcggccgccccgtgttgcacaaacccgcgcgtctcggctgcccctttgtacaccgcgccgcggaagggggctccgagggggcgcagcctcaaaccctgcctttcctttacttttacttttttttttttttctttggaagagagaagaacagagtgttcgattctgccctatttatgtttctactcgggaacaaacgttggttgtgtgtgtgtgtgttttcttgtgttggttttttaaagaaatgggaagaagaaaaaaaaattctccgcccctttcctcgatctcgctccccccttcggttctttcgaccggtcccccctcccttttttgttctgttttgttttgttttgctacgagtccacattcctgtttgtaatccttggttcgcccggttttctgttttcagtaaagtctcgttacgccagctcggcaaaaaaaaaaaaaaaaaaaa

SEQ ID NO: 486 - DNA, 2472 bp, Homo sapiens
ctttttacagctagacctgtgtgctgcaaggagctaaggccttcagtgtccccttccttacccaggtttctcacagaatggattcccagcgggaacttgcagaggaactgcggctttaccaatccacccttcttcaggatggtctaaaagatctcctggatgagaaaaaattcatcgattgcaccctaaaagcaggtgacaaaagtcttccttgccacagattgattttgtcagcttgtagtccttacttccgtgagtactttttatctgaaattgatgaggcgaaaaaaaaggaggtagtgctagacaatgtggatcctgctatacttgatttaatcatcaaatacctgtactctgccagtattgatctcaatgacggaaatgtgcaagatatttttgcattggccagccgctttcagatcccctcagtgtttactgtctgcgtttcttatcttcagaaaagacttgctcctggtaactgtctagccatcctaagattaggacttcttcttgactgcccgagactcgccatttctgcccgtgaatttgtgtctgatcgctttgtacagatttgtaaggaagaggactttatgcaactgtctccacaggaactgatctcagtcatttcaaatgacagcctaaatgtagaaaaagaagaagcagtatttgaggcagtgatgaaatgggtgcgaacagacaaggaaaacagggttaaaaaccttagtgaagtgtttgattgtatccgttttcgccttatgacagaaaaatattttaaggatcatgttgagaaagatgatataattaaaagcaacccagacctccagaaaaaaatcaaagttctaaaagatgctttcgcaggcaaactcccagaacctagcaaaaatgccgcgaagactggggctggtgaggtgaatggtgatgttggtgatgaagatttacttcctggttacctgaatgacattcccaggcatggaatgtttgtaaaagacctcatcctcttggttaatgacacagcagcagtggcttatgaccccacggaaaatgaatgctaccttactgcactggctgagcagattcccagaaatcattccagcattgttacccagcaaaatcagatatatgtggtaggaggactatatgtggatgaagaaaataaggatcaacctctacagtcatacttcttccagctcgatagcatagcatctgaatgggttggacttccacctctgccttcagccaggtgtctcttcggtctgggagaggtggatgataaaatctatgtagttgcaggcaaagaccttcaaacagaggcttcgctggattcagtattatgctatgatcctgtggctgcaaaatggaacgaagtaaaaaaactccctatcaaagtctatggccataatgtgatttcacataaagggatgatatattgtctaggaggaaagacagatgacaaaaaatgtacaaacagggtgtttatcttcaaccccaaaaaaggagattggaaagatctggctccaatgaaaattcctcgttccatgtttggagtagcagtccataaaggcaaaattgtgattgcaggaggtgtcactgaagatggtctttcagcttcagttgaagcttttgaccttacaacaaataaatgggatgtaatgaccgaatttccccaagaaagaagctccatcagtttggtcagcctggctggatctctgtatgcaattggtggttttgctatgattcaactggagtctaaagaatttgcacccactgaagtcaatgacatatggaagtatgaagatgataaaaaagaatgggctgggatgttgaaggaaatacgttatgcttcaggagctagttgcctagcaacacgtttaaatctcttcaaactgtctaaactgtgaacaaggtgacaaaacataatagattgggaggtggtttgtttggtgaatggggctttaatttattctgttttttaaaagcttgtacagacactcatgtagaaattattcaagaagttattgtctaagagatgagcagtaggtaagaaaacctcagtcattgactcttcaatgtaatgatcagagtttaaaaccattttctaataataaattaaatcttcagttgaacaaattattttgtgaatctgtttcactcaatggattgtaaagaaggctcctaaatttgagttgtttgctaatcatttcatttgcatcattagggtatccttaaactgattttctattacaattggaagtggagaatatgtgcatctacactaaaaaaatgtttaagatatcaaaaacctctcctcgtgcttcaaaatgacaggaatcctgtgcattatactaagaattacatgccataagatgacttcagaaatcctacttcagaagtgtaataaatggatggggaaatcgtttgatggggaaaagtctcttgtaagtaaaagtagtcaaattcaaatggcaaaaaaaa

SEQ ID NO: 487 - DNA, 2423 bp, Homo sapiens
cctcgaagacagctgctcagtctaagcaaaccccagcaggaaagcaggggtacagagaggagcccccttggcaccgccaccgcaccctaggccacccaccatggcgctgggcttggagcaggcggaggagcagcggttgtaccagcagacgctcctgcaagacgggctcaaagacatgctggaccatggcaagttcctcgactgtgtggtgcgggcgggcgagcgcgagttcccgtgccatcgcctggtgctggccgcctgcagcccctacttccgggcgcgctttctagccgagccggagcgcgcgggcgagctgcacctggaggaggtgtccccggacgtggtggcccaggtgctgcactacctgtacacatcagagatcgcgctggatgaggcgagcgtgcaggatttgttcgccgcggcacaccgcttccagatcccttccatcttcaccatctgcgtgtccttcctgcagaagcgcctgtgcctctccaactgcttggccgtcttccgtctcggcctcctgctcgactgcgcgcgtctcgccgtggctgcccgcgacttcatctgcgctcacttcacgctggtggcgcgcgacgctgacttcctcggactctcggccgacgagctcatcgccatcatctccagcgacggccttaacgtggagaaggaggaggcagtgttcgaggcggtgatgcggtgggcgggtagcggcgacgccgaggcgcaggctgagcgccagcgcgcgctgcccaccgtcttcgagagcgtgcgctgccgcttgctgccgcgcgcctttctggaaagccgcgtggagcgccaccctctcgtgcgtgcccagcccgagttgctgcgcaaggtgcagatggtgaaggatgcacacgagggccgcatcaccacgctgcggaagaaaaagaaggggaaggatggagccggggccaaggaggctgataagggcacaagcaaagccaaagcagaggaggatgaggaggccgaacgtatccttcctgggatcctcaatgacaccctgcgcttcggcatgttcctgcaggatctcatcttcatgatcagtgaggagggcgctgtggcctacgatccagcagccaacgagtgctactgtgcttccctctccaaccaggtccccaagaaccacgtcagcctggttaccaaggagaaccaggtcttcgtggctggaggcctcttctacaacgaagacaacaaagaggaccccatgagcgcatacttcctgcagtttgaccatctggactcagagtggctggggatgccaccgctgccctcgccccgctgcctctttggcctgggagaagctctcaactccatctacgtggtcggtggcagagagatcaaggacggcgagcgctgcctggactcggtcatgtgctacgacaggctgtcattcaaatggggtgaatcggacccgctgccttacgtggtgtatggccacacagtgctctcccacatggaccttgtctacgtaattggcggcaaaggcagtgacaggaagtgcctgaacaagatgtgcgtctatgaccccaagaagtttgagtggaaggagctggcacccatgcagaccgcccgctcactctttggggccactgtccatgatggccgcattatcgtggcagctggggtcaccgacacagggctgaccagttctgccgaagtgtacagcatcacagacaacaagtgggcacccttcgaggccttcccacaggagcgtagctcactcagcctggtcagcctggtgggtaccctctatgccattggtggctttgccacactggagacggagtctggagagctggttcccacagagctcaatgacatctggaggtataacgaggaggagaagaaatgggagggtgtcctgcgggagatcgcctatgcagcaggtgccaccttcctaccagtgcggctcaatgtgctgtgcctgactaagatgtgaccagctcaggcagactgaactaagcacccctcccatcctgcgaccctcactggcctggccttgtgggggctccagaaaagaggctaggagaggccagagtctacctggatccagttatggtgcctcaggggctgcgtcagccaaggaaagggaagtgctgcttagtcctggacttttgggcaagggtgagaaactagaggcttctccagtgttgccatatccccctaggttgtcttgatccatgaaccagaaccacagggcggtatcccaggccgtgtgctggccctgccccagcctagctgagtgtgctggcaaagttccccacaggactcagccttctcgtctgtccgatgggagcatccccatcaagtgcagtgtacagtgcagatatgtctccttctttaggaagaataaagtgccttctgagcaagcagctcagggtctgcatcagtgaaaa

SEQ ID NO: 488 - DNA, 3008 bp, Homo sapiens
agttctcccgggcgcctagcgggatcgccagcgcggcagtgggggcttccgcggctgcaagccagcgggtcctgtgagggcgagcggaggcggagaaagggcgcgggagtgagagagggtgagtcagccactgtctatgcaataaagggaggcctcaccgcgggatagggctgaattcagaagtgcggcccgtgccgcagtctgttccaggacgcggcttgtcttagcgtcagcgagggaaggttgaggaggagccagagcctggtcctgcagcctttctcgccgtcagcgcccgtcgccatctccaccatgcagtcccgggaagacgtcccgcgctctcgccgcctcgccagtccccgtggtgggaggcggcccaagaggatttccaagccctcggtttcggcctttttcacgggtccagaggagttaaaggacacggcccattctgcagccctgctggcacagctcaagtccttctacgacgcgcggctgctgtgtgatgtgaccatcgaggtggtgacgcctggcagcgggcctggcacgggtcgcctcttttcctgcaatcgcaacgtgctagcagctgcgtgtccctacttcaagagcatgttcacaggtggcatgtacgagagccagcaggccagcgtgaccatgcacgatgtggacgccgagtccttcgaggtgttggtcgactactgctacacgggtcgtgtgtctctcagtgaggccaatgtgcagcgcctgtacgcggcctccgacatgctacagctggaatatgtgcgggaagcctgtgcctccttcttagcccgacgtcttgacctgaccaactgcaccgccatcctcaagtttgcagacgccttcgaccatcacaagcttcgatctcaggcccagtcctacatagctcacaacttcaagcagctcagccgaatgggttcaattcgggaggagactctagcagatctaaccctggcccagctgctggctgtcctacgcctggatagtctggacatagagagtgagcggactgtatgccatgtagctgtgcagtggctggaggctgctgccaaagagcggggtcccagtgctgcagaagtcttcaagtgcgtgcgctggatgcacttcactgaagaagatcaggactacttagaagggctgctgaccaagcccatcgtgaagaagtactgcctggacgttattgaaggggccctgcagatgcgctatggtgacctgttgtacaagtctctggtgccagtgccaaacagcagcagcagcagtagcagcagcaactctcttgtatctgcagcagaaaatccaccccagagactgggtatgtgtgccaaggagatggtgatcttctttggacatcctagagatccctttctctgctatgacccttactcgggggacatttacacaatgccatcccctttgaccagctttgctcacactaagactgtcacctcctcagctgtctgtgtgtccccagaccatgacatctatctagctgctcagcccaggaaagacctctgggtgtataaaccagctcagaatagttggcagcaacttgcagatcgcttgctgtgtcgtgagggcatggatgtggcatatctcaatggctacatctacattttggggggacgagaccctattactggagttaagttgaaggaagtggaatgctacagtgttcagagaaaccagtgggcattggtggctcctgtccctcattccttctattcctttgaactcatagtggttcagaactatctttatgctgtcaacagtaagcgcatgctttgctatgatcctagccacaatatgtggctgaactgtgcttctcttaaacgtagtgactttcaggaagcatgtgtcttcaatgatgaaatctattgtatctgtgacatcccagtcatgaaggtctacaacccagctaggggagaatggaggcggattagtaatattcctttggattcagagacccacaactaccagattgtcaatcatgaccaaaagttgcttctcatcacttctacaaccccacaatggaaaaagaaccgagtgacagtgtatgagtatgatactagggaagatcagtggattaatataggtaccatgttaggccttttgcagtttgactctggctttatttgcctttgtgctcgtgtttatccttcctgccttgaacctggtcagagttttattactgaggaagatgatgcacggagtgagtctagtactgaatgggacttagatggattcagtgagctggactctgagtcaggaagttcaagttctttttcagatgatgaagtctgggtgcaagtagcacctcagcgaaatgcacaggatcagcagggttctttgtaaatagtattttgagacactaagatgtttctactgctacggaatgtattttaaacacatatcgtttctttttcttggaaaaaaagttgattaggaccacagatttggtttagaaagggtaatattttgaaatactacaaggtttagacagtccatgaaatcgacctgtttaataatttaccatcctgaaagtccagaattaaaatatggaagcaagaactatataattgattaggatgcttggtaggtttttttcattgttcaaatattcattgcacagtggattgttttgattagttagtatgctttttttttaattaattcagtcttctgttaatttttaagttttggttagtgccacaaggaatttaactttttgatttgtataatagaaaactgaactaggaattgttagcggggttttgaaggatgtgtactttccttcaaaataaagtggtagattttcaaaattttacactagtcagttctttatattctaagttaaatgtagtttgtaaaattattttggttttcttctacaaaggaaaaaattggatttatatatataaggttactgcataatgatttcattttgataatgtgcagaatggcctcataagctcacagaaagcaaaaaaaaaaaaaaa

SEQ ID NO: 489 - DNA, 2020 bp, Homo sapiens
caggcagcaggcagcaggcgggcgcgctgtggctccgcgccgcgcggtccgggctctgttcattcatgattggtactcggccctccgagacccagcccgagcgcagggaggggagccgagtgtgcggcaggaggggcgggcggacggcggctcccgcaccgcacgcggcgctggctcggcagcctcggccgggcggccgctctggccccgtgtccagtgccaggcaggcttcagggcaccgtcctcggccctgggcgagggaaccgccgggccgggtcctcgcgcggggaagcggttccgaaggctcgcggggagcggctagccctgagtccctgcatgtgcggggctgaagaaggaagccagaagcctcctagcctcgcctccacgcttgctgaataccaagctgcaggcgagctgccgggcgcttttctctcctccaattcagagtagacaaaccacggggatttctttccagggtaggggaggggccgggcccggggtcccaactcgcactcaagtcttcgctgccatgggggccgtcatgggcaccttctcatctctgcaaaccaaacaaaggcgaccctcgaaagataagattgaagatgagctggagatgaccatggtttgccatcggcccgagggactggagcagctcgaggcccagaccaacttcaccaagagggagctgcaggtcctttatcgaggcttcaaaaatgagtgccccagtggtgtggtcaacgaagacacattcaagcagatctatgctcagtttttccctcatggagatgccagcacgtatgcccattacctcttcaatgccttcgacaccactcagacaggctccgtgaagttcgaggactttgtaaccgctctgtcgattttattgagaggaactgtccacgagaaactaaggtggacatttaatttgtatgacatcaacaaggacggatacataaacaaagaggagatgatggacattgtcaaagccatctatgacatgatggggaaatacacatatcctgtgctcaaagaggacactccaaggcagcatgtggacgtcttcttccagaaaatggacaaaaataaagatggcatcgtaactttagatgaatttcttgaatcatgtcaggaggacgacaacatcatgaggtctctccagctgtttcaaaatgtcatgtaactggtgacactcagccattcagctctcagagacattgtactaaacaaccaccttaacaccctgatctgcccttgttctgattttacacaccaactcttgggacagaaacaccttttacactttggaagaattctctgctgaagactttctatggaacccagcatcatgtggctcagtctctgattgccaactcttcctctttcttcttcttgagagagacaagatgaaatttgagtttgttttggaagcatgctcatctcctcacactgctgccctatggaaggtccctctgcttaagcttaaacagtagtgcacaaaatatgctgcttacgtgcccccagcccactgcctccaagtcaggcagaccttggtgaatctggaagcaagaggacctgagccagatgcacaccatctctgatggcctcccaaaccaatgtgcctgtttctcttcctttggtgggaagaatgagagttatccagaacaattaggatctgtcatgaccagattgggagagccagcacctaacatatgtgggataggactgaattattaagcatgatattgtctgatgacccaaactgcccatgtcatttgtttccagaaacgaggaccaataattctctcacactggcatttgtgctggtagtacaagtcctttaatatgtccaggaagggagccattgcccagtggtccatatctccaccacatcccctgcttgagcccagcgctgcatgtccctcccaagaagtccagaatgcctgcaaattgctgtaattttataccatgttctaaccaataaacagaactatttcttacactctcaaaaaaaaaaaaaaaa

SEQ ID NO: 490 - DNA, 2608 bp, Homo sapiens
aaagggtggggggcgggggtagggggagccaatcccggcagcgccaaagaggggaggaggcggtgacagccgcggggagggggcgggaggagagaggcagctcggctcggctccgcgctcagctccgctctgcctccggctctgcgctcacctgctgcctagtgttccctctcctgctccaggacctccgggtagacctcagaccccgggcccattcccagactcagcctcagcccggacttccccagccccgacagcacagtaggccgccagggggcgccgtgtgagcgccctatcccggccacccggcgccccctcccacggcccgggcgggagcggggcgccgggggccatgcggggccagggccgcaaggagagtttgtccgattcccgagacctggacggctcctacgaccagctcacgggccaccctccagggcccactaaaaaagcgctgaagcagcgattcctcaagctgctgccgtgctgcgggccccaagccctgccctcagtcagtgaaattggccgggtcttccgctttctcggtgacagttcgctcccttcagcattagccgccccagcctccctccgcccccacagaccccgcctgctggacccagacagcgtggacgatgaatttgaattgtccaccgtgtgtcaccggcctgagggtctggagcagctgcaggagcaaaccaaattcacgcgcaaggagttgcaggtcctgtaccggggcttcaagaacgaatgtcccagcggaattgtcaatgaggagaacttcaagcagatttactcccagttctttcctcaaggagactccagcacctatgccacttttctcttcaatgcctttgacaccaaccatgatggctcggtcagttttgaggactttgtggctggtttgtccgtgattcttcggggaactgtagatgacaggcttaattgggccttcaacctgtatgaccttaacaaggacggctgcatcaccaaggaggaaatgcttgacatcatgaagtccatctatgacatgatgggcaagtacacgtaccctgcactccgggaggaggccccaagggaacacgtggagagcttcttccagaagatggacagaaacaaggatggtgtggtgaccattgaggaattcattgagtcttgtcaaaaggatgagaacatcatgaggtccatgcagctctttgacaatgtcatctagcccccaggagagggggtcagtgtttcctggggggaccatgctctaaccctagtccaggcggacctcacccttctcttcccaggtctatcctcatcctacgcctccctgggggctggagggatccaagagcttggggattcagtagtccagatctctggagctgaaggggccagagagtgggcagagtgcatctcggggggtgttcccaactcccaccagctctcacccccttcctgcctgacacccagtgttgagagtgcccctcctgtaggaattgagcggttccccacctcctacccctactctagaaacacactagacagatgtctcctgctatggtgcttcccccatccctgacctcataaacatttcccctaagactcccctctcagagagaatgctccattcttggcactggctggcttctcagaccagccattgagagccctgtgggagggggacaagaatgtatagggagaaatcttgggcctgagtcaatggataggtcctaggaggtggctggggttgagaatagaagggcctggacagattatgattgctcaggcataccaggttatagctccaagttccacaggtctgctaccacaggccatcaaaatataagtttccaggctttgcagaagaccttgtctccttagaaatgccccagaaattttccacaccctcctcggtatccatggagagcctggggccagatatctggctcatctctggcattgcttcctctccttccttcctgcatgtgttggtggtggttgtggtgggggaatgtggatgggggatgtcctggctgatgcctgccaaaatttcatcccaccctccttgcttatcgtccctgttttgagggctatgacttgagtttttgtttcccatgttctctatagacttgggaccttcctgaacttggggcctatcactccccacagtggatgccttagaagggagagggaaggagggaggcaggcatagcatctgaacccagtgtgggggcattcactagaatcttcaatcaacctgggctctccccaccccaccccagataacctcctcagttccctagggtctcttcttgcttgactcaatctacccagagatgccccttagcacacctagagggcagggaccataggacccaggttccaaccccattgtcagcaccccagccatgcggccaccccttagcacacctgctcgtcccatttagcttaccctcccagttggccagaatctgaggggagagcccccagagagcccccttccccatcagaagactgttgactgctttgcattttgggctcttctatatattttgtaaagtaagaaatataccagatctaataaaacacaatggctatgcaaaaaaaaaaaaaaaaaaaa

SEQ ID NO: 491 - DNA, 2361 bp, Homo sapiens
gctcccagcgccacggacgcccccgggccgagcggcggtgcgctcccgtgcagacccgtggacagacgcccctggccggtggactctcgagtctcgcttctgcaccctgcgtccctagacatgaatgtgaggagggtggaaagcatttcggctcagctggaggaggccagctctacaggcggtttcctgtacgctcagaacagcaccaagcgcagcattaaagagcggctcatgaagctcttgccctgctcagctgccaaaacgtcgtctcctgctattcaaaacagcgtggaagatgaactggagatggccaccgtcaggcatcggcctgaagcccttgagcttctggaagcccagagcaaatttaccaagaaagagcttcagatcctttacagaggatttaagaatgaatgccccagtggtgttgttaatgaagaaaccttcaaagagatttactcgcagttctttccacagggagactctacaacatatgcacattttctgttcaatgcatttgatacagaccacaatggagctgtgagtttcgaggatttcatcaaaggtctttccattttgctccgggggacagtacaagaaaaactcaattgggcatttaatctgtatgacataaataaagatggctacatcactaaagaggaaatgcttgatataatgaaagcaatatacgatatgatgggtaaatgtacatatcctgtcctcaaagaagatgctcccagacaacacgttgaaacattttttcagaaaatggacaaaaataaagatggggttgttaccatagatgagttcattgaaagctgccaaaaagatgaaaacataatgcgctccatgcagctctttgaaaatgtgatttaacttgtcaaatagatcctgaatccaacagacaaatgtgaactattctaccacccttaaagttggagctaccacttttagcatagattgctcagcttgacactgaagcatattatgcaaacaagctttgttttaatataaagcaatccccaaaagatttgagctttcagttataaatttgcatccttttcataatgccactgagttcaggggatggtctaactcatttcatactctgtgaatattcaaaagtaatagaatctggcatatagttttattggttccttagccatgggattattgaggctttcacatatcagtgattttaaaatatcagtgttttttgctactcatttgtatgtattcagtcctaggattttgaatggttttctaatatagtgacatctgcatttaatttccagaaattaaattaattttcatgtttgaatgctgtaattccatttaaattccatttatatactttaaggaaacaagattacaacaattaaaaaaacacatagttccagtttctatggccttcccaccttctgttagaaattagttttatctggcatttttaaacatttaaaaattattaaacatttaaaaattagtttattatcagatatcagcatatgcctaataaaacttattttaataagcatttaattttccataatatgttacagccaaggcctatataataattttggatttgttcaatctttcttacaggctgttttctattgtatcaatcattagtatcaatcattaagtggaagttgaagaaggcatcaaacaaaacaaggatgtttacagacatatgcaaagggtcaggatatctatcctccagtatatagtaatgcttaataacaagtaatcctaacagcattaaaggccaaatctgtcctctttcccctgacttccttacagcatgtttatttatattacaagccattcagggacaaagaaagaaaccttgactaccccactgtctactaagaacaaacagcaagcaaaattagcaagcaaaattcactttgaaagcaccagtggttccattacattgacaactactaccaagatttagtagaaaataagtgctcaacaactaatccagattacagtatgatttagctcatcataattcagattatttttaatcatcttagccaaaactgtaaagttgccacattactaaagccacacacatcgtccctgttttgtagaaatatcacaaagaccaagaggctacagaaggaggaaatttgcaactgtctttgcaacaataaatcaggtatctattctggtgtagagataggatgttgaaagctgccctgctatcaccagtgtagaaattaagagtagtacaatacatgtacactgaaatttgccatcacgtgtttgtgtaaactcaatgtgcacattttgtatttcaaaaagaaaaaataaaagcaaaataaaatgttaaaaaaaaaaaaaaaaaaaaaa

SEQ ID NO: 492 - DNA, 2577 bp, Homo sapiens
tctgcttagtcatggtgacctgcgcgcgctccgcgcctcccccacgcgcagcgatggaggcgccggggctcgggcggtggaggcggagccggagcgcggccatggcggggtccctgagtgccagaggtggtggtgttgcttatcttctggaaccccatgcagccagatcccaggcctagcggggctggggcctgctgccgattcctgcccctgcagtcacagtgccctgagggggcaggggacgcggtgatgtacgcctccactgagtgcaaggcggaggtgacgccctcccagcatggcaaccgcaccttcagctacaccctggaggatcataccaagcaggcctttggcatcatgaacgagctgcggctcagccagcagctgtgtgacgtcacactgcaggtcaagtaccaggatgcaccggccgcccagttcatggcccacaaggtggtgctggcctcatccagccctgtcttcaaggccatgttcaccaacgggctgcgggagcagggcatggaggtggtgtccattgagggtatccaccccaaggtcatggagcgcctcattgaattcgcctacacggcctccatctccatgggcgagaagtgtgtcctccacgtcatgaacggtgctgtcatgtaccagatcgacagcgttgtccgtgcctgcagtgacttcctggtgcagcagctggaccccagcaatgccatcggcatcgccaacttcgctgagcagattggctgtgtggagttgcaccagcgtgcccgggagtacatctacatgcattttggggaggtggccaagcaagaggagttcttcaacctgtcccactgccaactggtgaccctcatcagccgggacgacctgaacgtgcgctgcgagtccgaggtcttccacgcctgcatcaactgggtcaagtacgactgcgaacagcgacggttctacgtccaggcgctgctgcgggccgtgcgctgccactcgttgacgccgaacttcctgcagatgcagctgcagaagtgcgagatcctgcagtccgactcccgctgcaaggactacctggtcaagatcttcgaggagctcaccctgcacaagcccacgcaggtgatgccctgccgggcgcccaaggtgggccgcctgatctacaccgcgggcggctacttccgacagtcgctcagctacctggaggcttacaaccccagtgacggcacctggctccggttggcggacctgcaggtgccgcggagcggcctggccggctgcgtggtgggcgggctgttgtacgccgtgggcggcaggaacaactcgcccgacggcaacaccgactccagcgccctggactgttacaaccccatgaccaatcagtggtcgccctgcgcccccatgagcgtgccccgtaaccgcatcggggtgggggtcatcgatggccacatctatgccgtcggcggctcccacggctgcatccaccacaacagtgtggagaggtatgagccagagcgggatgagtggcacttggtggccccaatgctgacacgaaggatcggggtgggcgtggctgtcctcaatcgtctcctttatgccgtggggggctttgacgggacaaaccgccttaattcagctgagtgttactacccagagaggaacgagtggcgaatgatcacagcaatgaacaccatccgaagcggggcaggcgtctgcgtcctgcacaactgtatctatgctgctgggggctatgatggtcaggaccagctgaacagcgtggagcgctacgatgtggaaacagagacgtggactttcgtagcccccatgaagcaccggcgaagtgccctggggatcactgtccaccaggggagaatctacgtccttggaggctatgatggtcacacgttcctggacagtgtggagtgttacgacccagatacagacacctggagcgaggtgacccgaatgacatcgggccggagtggggtgggcgtggctgtcaccatggagccctgccggaagcagattgaccagcagaactgtacctgttgaggcacttttgtttcttgggcaaaaatacagtccaatggggagtatcattgtttttgtacaaaaaccgggactaaaagaaaagacagcactgcaaataacccatcttccgggaagggaggccaggatgcctcagtgttaaaatgacatctcaaaagaagtccaaagcgggaatcatgtgcccctcagcggagccccgggagtgtccaagacagcctggctgggaaagggggtgtggaaagagcaggcttccaggagagaggcccccaaaccctctggccgggtaataggcctgggtcccactcacccatgccggcagctgtcaccatgtgatttattcttggatacctgggagggggccaatgggggcctcagggggaggccccctctggaaatgtggttcccagggatgggcctgtacatagaagccaccggatggcacttccccaccggatggacagttattttgttgataagtaaccctgtaattttccaaggaaaataaagaacagactaactagtgtctttcaccctgaaaaaaaaaaaaaa

SEQ ID NO: 493 - DNA, 1615 bp, Homo sapiens
tcagagttcacgaggcagccgaggaagaggaggcttgaggcccagggtgggcaccagccagccatggccacagccgagaccgccttgccctccatcagcacactgaccgccctgggccccttcccggacacacaggatgacttcctcaagtggtggcgctccgaagaggcgcaggacatgggcccgggtcctcctgaccccacggagccgcccctccacgtgaagtctgaggaccagcccggggaggaagaggacgatgagaggggcgcggacgccacctgggacctggatctcctcctcaccaacttctcgggcccggagcccggtggcgcgccccagacctgcgctctggcgcccagcgaggcctccggggcgcaatatccgccgccgcccgagactctgggcgcatatgctggcggcccggggctggtggctgggcttttgggttcggaggatcactcgggttgggtgcgccctgccctgcgagcccgggctcccgacgccttcgtgggcccagccctggctccagccccggcccccgagcccaaggcgctggcgctgcaaccggtgtacccggggcccggcgccggctcctcgggtggctacttcccgcggaccgggctttcagtgcctgcggcgtcgggcgccccctacgggctactgtccgggtaccccgcgatgtacccggcgcctcagtaccaagggcacttccagctcttccgcgggctccagggacccgcgcccggtcccgccacgtccccctccttcctgagttgtttgggacccgggacggtgggcactggactcggggggactgcagaggatccaggtgtgatagccgagaccgcgccatccaagcgaggccgacgttcgtgggcgcgcaagaggcaggcagcgcacacgtgcgcgcacccgggttgcggcaagagctacaccaagagctcccacctgaaggcgcatctgcgcacgcacacaggggagaagccatacgcctgcacgtgggaaggctgcggctggagattcgcgcgctcggacgagctgacccgccactaccggaaacacacggggcagcgccccttccgctgccagctctgcccacgtgctttttcgcgctctgaccacctggccttgcacatgaagcgccacctttgagccctgccctggcacttggactctcctagtgactggggatgggacaagaagcctgtttggtggtctcttcacacggacgcgcgtgacacaatgctgggtggttttcccacgaatggaccctctcctggactcgcgttcccaaagatccacccaaatatcaaacacggacccatagacagccctgggggagcctcttacggaaaatccgacaagccttcagccacagggagccacacagagatgtccaaactgtcgtgcaaacccagtgagacagaccgccaaataaacggactcagtggacactcagaccagctcccagatggccctggacagcaggagagggtgtgggatgaggcttcccagagaccctgggtctagaaagcggctcctgaaggtcccttattgtggctgatattaactgtcaatggttatgggtcctataaaaatgcccctcccagataaa

SEQ ID NO: 494 - DNA, 10923 bp, Homo sapiens
attcatttcctgagaactgcagagagccgctgagaggctctgcgtgtgcgtgtgcgcgggtgacgccgtgtgtgtgcgagtgtgtgtgtgtgtgtgcgcgcgcgcgtgtgagagagagaaagggagagagagagggggactctgtgtgagggaaagaaaacaatttctcctgctctgcagcttctgttcaggatcaatgtgactctaagaacaaatggatgaatgaatatccatatgaagagaaaaacaataaagaatatcaacacctttgagaacagaatgttaatgcttgatgggatgccggcagtcagagtcaaaacagagcttttggaatctgaacaagggtctccaaacgtccacaactatcccgatatggaagccgttcccctgttgctaaataatgtgaaaggggagcccccggaggactcgttatctgtagatcacttccaaacacaaactgagccagtggacttgtcaataaacaaagccaggacgtcccctactgccgtttcatcctccccagtttccatgacagcatctgcctcctcaccttcttcaacttcaacctcttcatcgtcttctagtcgtctagcctcatccccaactgttatcacatcagtatcttcagcgtcatcttcgtcaacagtattaactccagggccccttgtggcctctgcatctggtgttggaggccagcagtttttgcacattatccatcccgtaccgccttcaagtcccatgaatttacagtctaacaaactgagtcatgttcaccgcatccccgtggtggtacagtcggtgcctgttgtctacacagctgtaaggtcacctggaaatgtgaacaacactattgtcgtgccgcttttggaggatgggagaggccatggcaaagcacaaatggacccccgaggcctatctcccagacaaagtaaaagtgacagtgatgatgatgacctgccaaatgtgaccttagatagcgttaatgaaactggatctacggccctttccatagccagagcagtacaagaggtacatccgtccccagtatcaagggtccggggcaatcgaatgaataatcaaaagtttccttgttcaatttcaccatttagtattgagagcacaagacgccagagacggtctgaatccccagactccagaaaacggcgtatccacagatgtgattttgagggatgcaacaaagtgtacacaaaaagttctcacctgaaggctcaccggaggacacatacaggagagaaaccttacaagtgtacctgggaaggctgcacctggaagttcgctcgttcagatgaactgacgaggcattaccgcaaacatacgggagtgaagccattcaagtgcgcggactgtgatcgcagcttttcccggtcagatcatttggccctgcaccgccggaggcatatgttggtgtgaggaatgctacctgtccagctgagcgtaagagctggatctcttagcggcacccaattcagcagggctgaatccccttcacagtgttaacacaaaagggcatcaccatcccacgatgtctgaaaccagagcaggaaaaagaaggcacacttcttttggtctgaaggtaacccccatcatgactagacgagaaccgtctttacccgggcctgggagctcagtgacataaatgctgaagagacaggcattgttttccgtgctgtgtcctctgccatttaaagatgtttgtagcttgtacattttctgagctgtcagacattttgttattgataccttaaaggtcacctaccacaaattgatggctagagcaagaccttttaaatttggatgaatctcccatcatcccatcccttaacccctttttacagaaattttagttacaatctgagtaagctagaacacacatccaatctgttaccagcaagcagcatgaaagtagaaacgaagaagcagatggagaggtcccattacctgcaaagaaagggcactcaggcagccctttgcaatcgcgatggcagccactagatatcactctcaacttgtcattctgccatgccctgaagaaaaccaacattgaatctttcatttgtttgtcgttgattgtttttgttttgtttcgattctgttttgttcatctgttcgagcagaggggcagttgaagtctcgtcctggtctctgccctggcatggactggcacagaggtgttctgtagttgaataggaagagcctgtctaaaaaactactgccccacttcaaattgcagtgttctgtcacctaggcatcatctcttcctgcccctagtatttgattacaaggaaccaggggaaaaaaactttcttagacacactggcaccaaggtaagaggtggggctgcccaggcaaagtcagtgaacatgaaaactcagacaaagcagagatggaaataatgcgcctcttgaggagaaaagcaataatgaataaaaggactttcctacaataacttcactgaggactcacgttaccaattttcatacttactaaagggattgtaaaaaacaccccagcattttaggtgtcttggttccatttacagcactgaggtaatctttctgctgtttgttgtcctgcttggttgagtaccacaattaaagattatgctccccttttcttgtttgaaaacagttatttggtgactagaaaggcaagggaggcatagccgggaattaactcttcggttaatgggtcagttctccttggaactgaatcagtggaaagagaatgcttcccatagaaagcccgacatggtgctagtttcctctcttggagagccaaggataagtgactctccaataggttcttctataccgatttcattttctaaactgtatcaggacccaggtgtcctgcattggcatctgcagggatattgaacccactcatcctgtgcagaggatgagaggaaggtgttagttccatcagccccataaaattatgaacctttttgcaactaggaacatatacagtaaacaagcaatacatcaccaacgagcattctttcagaaaaattaccatatttttgtccccaccacaagctgggtttttttccagctttctgtggctgaggggctggtgagattttttgttgttattgttgttgttgctagaattttttatagcttagatataaaaggtctccaacaaagacctttgcaatatattttaattacaaacacttgattttgggaattgcacatattaacctcacaatattactagctcatttttaaatgtctggacattctgaaataatttccggttacagaattaccctttttaggatcatcttctaattcagataatcttattctgatgaagcgagaactatgaacgttgaaacaaggacaatttgtgttggatggtattcaaaaggaattttttaaaacattaagcaacagtgtaatgattttcaggtcaaattatggcttcacaaatatgtgctctatattgtctgccaggtctcaaaaattcatcaagcaatttccctccaacaagggctgcagttctagtgataaatagcatctttagctgcacagtctactactcatcaaccagtgggttttttttagcacctggaaagtttttttgtactatatgcaactcctacttcacattgcctgtgaccattcagaatagaaaaaggtctgttgatgcatgccagtgctggttactagtcagtgacagagaacacagagagggacaaacacagccatgaaccccctggcactagtaccagcacctagttggcaagtagtgggtgcatctctcaagtgaagtgtagatttgtatttagtcctgcttgctctcataaaaagagccagttcttttctctgctgaaagatgtcttgagagtattacaggtagacttggtttttagaattcataaaactgacaggcaggggaatcttcctgagtgacagcttggtttaaatttagcacagaactagatgagttgcacttttctaataacataggatggatttggggaagggaacattttccctcatcctctgaaagtggaaaccagactgagatggtaagttaactgataaaacctgtcagcattccatcattttccccttttgacgtatcagtacttctaagaagggatctaagcacaattaagtgaattgagtccctggtctagcctcaggaactgaaacttctttggggcttgtcttgagacgtggcaaattctccttggtgagttttctaaaagtatttccccatggaaaggagaaagtggtttgggacagaaagaaatggaatgtcttcagtcatggaagagcctccatttcatctcatgtccatttctagcctctttcaaaaagcacagtgcatcatgagcaacagaaaagcagtagaatcctaaaggacataacagttgttccgtaactagaagcattctttgattttaaatttgaagctgttcagtttgcagctggggatatgtgcatggttgggaacttatacacatagagccattaactacttaagcagctgcagtagacctgattttctgtttgcagtatagagattgatttcaagggagttacattatttgaaaagttatgactttcagcctttgaggttttaagaatcccttttcatggtctgatcttaagttgtttgaaaaaagattcacgcttctgcatccacctctgccctcattctgtcaattgtgtgtggactctgagaagcctgcttgataacttgtcttaagttctattaaggcagttagactgagatttctaatgacttcaccataaagattatacttctgcctggcgtcgtttctataaaacactataggacatttgttttcaaaagcagttgagtaacagcaacataaaccacattttttaaaaaaatgagcacttttcattcacttgaaagcttaagtgggaaaaaggaagatgattgtcaggggaaaaacttacaaaatgctacagtgtttacaaatgccagttccaggtgattagaaaggccgttttcattatggttcagatttggaatagcttatgcaaagattgtgttcatttttatacaattctttttaactttaaattgccatctgtgttttaaacataattctgcactttggaatcagttcattagaatgataacatttatatggataaagatgcagtattccttattctgtacttgatttattatacttaccaaagctgcaactgaataaatctggtgaggtgaggccttcaaaatgtattaatacgcctttgttatgttgttatgactgcttagaaatgtagccatgatgttgttctaaagatgtcttaacatttatagtgaggattgacagaaattaagcagtgttaagaataccagcatccatgttacagtctgcgtataagggactgaatgtgaggtaactcttatgaatcataataggcccagaaagccttaatattcatagttcataatccagtctcagattttgctcttcaatgttgcctgtaaacttagcaggtaaatgtattctagtataaaacatcattgaccaaatctcttcctttagtttttctgaggtagtgcatcccattaaaaaagtctcttcaattagatttggctttagtttagaaaggggtttggtaagtcatgtcttccatatgacatttctactcatccccacactgccttccacttaacctgtacagacagccccaacacatgcacatgtgtgtacacaactgtatatgcagcagccagtgggctaacaaatatcagcaaagaacttttttaaaaagaatttgtaataatccgtgctgtctagaaatgtgagttacttaccttattaggaaaccggcttataatactatatatgactctgcctgcattttatagttaagaaatgtacataaaaattgctatattttcacagtttcattataatgtctgtttagtaacccatgtccactgatactttaaatatgctaattactgagcaattgcaatagaaatccagattttcataagaaaatgaaatagaaggatactgcatctttaaaaaatagagtgaagatattttactgtattcgtaacatatgtgatagtggaaaaagtattttcaaactcacaaattttacagaggttgtaaatagtttgatgaagtatgttgggaaagagagcttctagttttcatcacaataaaaagaaaaaacttgttcagatatgccttgtatatcttacacacaatgagtgaaattgccatgggaactctgtccaactttgtcagagcatgctcttcgtgttctgttcaaaatagagtggccacttgtcatggtttagccaggatggtttaaaatataatgaagtcattttaagttgcagacaactgattccaaactagtaatgtcttttcctgaaaagggcaaaacagctgcacaggattttgcttgtactaaagaggagcatcttacaattgttctcttttctcagttatctccctcctcaacagagtgtgaacaaccatacaggtgtttattcttgttttattccagggagactgcttttaggtataactacatgttgacaagattaagtgctgtggatatggccacgtgttaaaggaatctatactcgcaataggaataagctaatgcccattttcagaaataaattaaatgctgaaagtgcctgtcagtaaaccttatgaccaatgagatattcctatacttttacacagcaataattcttaataagactgggttttttcctgcacatgtgaacacacacacacatacacacagagagagtaaatacatacacatagtaaatcaaatctgttcacatgcccacaaaaaacgcttttatagctttcaaatatacctaatcttgtttacattaacatttcttaatttgatctttctaacttgcagaacgttaagaacacaaatctgaacattaagtttatcttcagtgaacactattgcatatggtaattataatttccagataaaaagttgactgtcatttgccccaaacttatgaaacagtatgtatgattcaaaaagttttgctcagttaaaaacaccaatttatttggcgcaaaagactgaaggatatttgtttgcttgttcattttatccactcatatcaaacgcacaaattcatctttacatttcttcattcccctttcccctaatatttcctattatcatcttaagaatcattttggaatgaatattgacagaatcatttctccccaaaaagtctgttgaagtaccactgacacttagtaagcctagcctttaaccatctttgcagttagtcctaaaaattaccagatgcacattcagaagctcacaggttttttcctgtaattactgtactgctaaaagtggagtcatggatagaaatatacaatgagactatatgaatagacatgaaccctggaaattctccaaccctgccatctcagagcacaaattcacccaaacaagctactgaggctatcagtaaaattatactcatggagagtcacacatcgggtaagggcaattttaaaagtaggactgtgattaaacattcaggctttagacttccatgatggactcagaccacaggcctcaaaaaaacatccactgttttctcctcccaatgttagaaagaagaaaagggagacggaaatgtaccaggataagggggtaaaataaccaattaagtgtcaaaggaaagctgctgggttccttaatctcactgaagtcaagtcttctgactgggcttcttaccatgtgttgtctgaaaaaactaaagtaccttgaaaggttacacattcagcaaaccatgaagataatagctattctttattaaacactgtgtgccaagcaatagactaggcaatttttagatacgttacctgcaacctgtacaacatttctacactttatggatgggaaacggagacatgggaagtgtggctgagttgttcatggatgtagaaatagtaaacggcagagtaggaaagtgaaaccgcctatctctgacctggaggtctgcctgtatctttcccactccaccacactgcacgtgggtgtcccgaaaccaccttcccagattcctgactctcagtaattttattatggacaacatgcatgagtagtcatcatatttttcaagtgaaatatcgggacatgatataacacatgacttaacaatggtactgaatatttgaaatcaggcctttcccggaaaatcatgcatgaaggatcattataaacaaacaatagcaaccagttgtctccccgaacttgtcacttttctcataaatgtctggcctggagctccaaaatcatccaaatacttagtagcattttagcctgagtacactttctcagttcctcaactctttgtatacctttccaccaatatagacattctagaatctgcttcagatgcatttgaaattttcacccccatggaactagtgattaatatcagagcccactcttgcagttggtaatggggtggcaatcaaacgttcagatgatgataaaggagagataatggataattctttttcagagttctcacttaacagctctgttgtggaatgttttaaatagtcttataaataatttgtttatagtattgttgttagtttaattgaattttatgtaagaagctgtccaacatcagagaaatgaaattcctcccactttctgtgtagaacaaggtctctgacagtattgattcatggaagtactaatggacttagaaaacattaagagaatgtcatttctcatagtgtttctgtttctgaaaatgaatctcctgaattattatctttctccctgttacttggctggggaaagagatagaagctgtataaacaaattctcttccatgctcaaagcaagtgttccatgtgcacaacctgctgcagactggggcccttctcagttaattgggtttcacaagcaataatttctccacaacaaaaaccacaacttgaagtgagttgaaaagagatcaatagtggaaacagtcgcctcagtactttttctttctggatttcatctctagaaatttgaagtgtttgagacagagtccaccctttgtgcaaggcgagaaccaatgaatggactccttgtgtgaattattgcatcttcttccaaagcaggttcatcaagactttcacagagattcatttttgttgagaagtaagggttaataggaggatagaatttggatccaaatctagtgataaaagtgtccaagcaatcaaaaagtaagatattttagggacataccaacatcttccctttctgctaatttcatgctccaaagatatggcaaaaaaaaaaatcataaaaagtgcttttgccctacttgtgttctagttttcccatggcagaattttgtaattacatccagaatatagtgtatattttgttcctcaaactttattacattggatggatattgttgaactggggcactggtgcctatattcaaggctctttcctatcaacgtgtctgtccacgatttgttgtgtttaaagcttcattttgaaaaatcactgtccccctgtggggtagtgactgtattgttttgttcatgtctatgtgggacacattgcatcacatggcaaaccaactctctgtggatgtgagataagtacttataaaaccagcttgaaaacatcgtcttatgtattatgtcatcctgcatcataatgcaattatgtgtatcataacatgctcatttaaaaaaagagaaaccagcaaattcatgtttgtccatagaagaatgtactcagaactttgtgttgtgaaacgatgagaacagaccacctttaagatacccacctgccacttaaaatgacttagttataattagtagtagtctagacgttgttcttggtgtgtgggggtcaattctaacgtcatgttcttttgaataaatctctcagtcatatttgaaaaaaaaatacatgggaataaagaaaaatatcatctttggccaaatcaagcaggcatcttttttcttttccttgacgtttagctcattatacgtggtgattggatcacgagatctgtccgtgtgaaaatacagaaacatcctttagtttacaaaacagttattctaggcttgaagcctctgaacagcaaattgaatagatgggctgcatctgatttgctttatggatgtaattttacaaaacactcttgggtctctgaccccagggagttaagagtgcccagaggaggtcctacacattaaaggataaagccccccagtgatgctggcaagcaaatgtgttgagttcttaaatcttcatttggttttctgttcaggattttaattgcaaatgaatttatttctccagtttatctaaagacctaatttcccaatagtttcctctgcatttatatactctgtagtgtttaggcaaccctgttataagtttattaatattatgtaagtgttgttcttgtatttatgtatagtgtatgtattgtaaatatactcagagcttttttccttttactgtaaaatggtgatttttttgccctatgataatgtaaagggagaccctcctaatgagattctctcagaggatgattattccagtctattctcagagatttaaatgaacaagtgttattgtttttaatggtgtctcagacatattctgttggtgcattgcttttctgtattcaactttcctatgaattgagctgtgaactgaaatagagtttaaacctttaactgtatgcatttgtataattatctgaatgaaggcatgaaggttaaataaagcattttgtatggaacaaaactccctaactgactcagacactttggaaatcatagttattaaccattctaattaaacctttgttatgaaaagttttaaaaaaaaaaaaaaa

SEQ ID NO: 495 - DNA, 6817 bp, Homo sapiens
gcgcggcgaagctgcggccgcgacttggcgaggtggtccctaacgttgccgctcggcatccttagaaccggccgcccctgacgccgcgcggggaccccagtcgcccgcgcgccccatgcgctcactcttcggtgcccggccgggccggcgcctcgcagacgcggagccgcgcgggtgacggcacaggcggctgcgcgcccagcccagcccagcccagcccgaggagagggcgcgccgcgcccccgccccccgcccgctctcccgaggccgtgggtgcggatgcgcggctgacgactcgcagcaagagcaccgccgccggccccagcccgcagcatggcagccgccgcctatgtggaccacttcgccgccgagtgcctcgtgtccatgtcgagccgcgcggtcgtgcacgggccgcgggaggggccggagtcccggcccgagggcgcggccgtggccgccacccccacgctgccccgcgtcgaggagcgccgcgacggtaaggacagcgcctcgctcttcgtggtggcgcggatcctagcggacctcaaccagcaagcgccggcgcccgccccggcggagcgcagggagggcgccgcggcccggaaggcgaggaccccctgccgcctgccgccgcccgcccccgagcccacctcccccggcgccgaaggcgcggcggccgcgccccccagcccggcgtggagcgagccggagcccgaggcggggctggagcccgagcgggagccggggcccgcggggagcggcgagcccggcctcagacaaagggtccggcggggccgaagtcgcgccgacctcgagtccccgcagaggaagcacaagtgccactacgcgggctgcgagaaagtttacgggaaatcttcgcacctcaaggcgcacctgagaactcacacaggtgagaggcccttcgcctgcagctggcaggactgcaacaagaagttcgcgcgctccgacgagctggcgcggcactaccgcacacacacgggcgagaagaagttcagctgccccatctgcgagaagcgcttcatgcgcagcgaccacctgaccaagcacgcgcgccgccacgccaacttccacccgggaatgctgcagcggcgcggcgggggctcgcggaccggctccctcagcgactacagccgctccgacgccagcagccccaccatcagcccggccagctcgccctgagcccgccacagccatgagcagccgctcccaccccctcgtgagtccctggcctttccttttgtaataagaaagaagagagagaacttgatgcaaagtccacgaaaaaacaatttttttcacctcaggtgtcaaagtaaatttgttaaaaaaacaaaaaaaacacaaaaatttcaaaaaacaccacccaccaaattgcacaatagatacacccacaaagttgagattcagcgttgttgaaccccctttctcagggatggacacgtttcacgaggtcagtgaggacaccccttcctgccgccttactctgtacatagatttgcactctggagttttctgttaggttcgggaacacgctggggacagagcaggccagccagtctggtggagctcagcgtctggctggctggccagcctgtgggtctgttgggagcagatgtgctcactgacgtttgtgcctccagggcagattcctaagcagctggcctgacctcttcctgcccagcccccaacccagtctctggcctctgcccaacgagcctggctgggcttgcaacgcagctgattctgagacaggcccctgcagagggatgccttaaagctgtccctggctggaggagcactccaccttggggatagtggagggggccttcagccctctgcaccctgcctgcctcacaccccgccttcaggagccctctcctacggcgctagggagcactggaagcagagatgccagccctggctgagcgtagcactgcaccgtccgacctccgaggcaggggccggggtcacacctgccaggactccgcttctccgtgtcccagcagaaggcatgcaggaccctgtcactactatacctgggcctctgatggggaattctggtcttctaaaaagatgttagaaattcctggtggcacatccagttccgagtttgcccgcatgggcacttttgttggaaacagtgggcaggtcatggggcctcctcatcagagggtctgtgtgagcggctgtgcatgtggcagcgcaccatgcttcacagagaccattctgtagcaagagaccggaacattgtgacttggaccttttcaggagtggcgcggatgttacaggaaatgctgtcggagagcgcgcattctatttcctccgcagggaatgccagatagaaagttgcgggcaacacttttctcagacccaccatgtccccaactcagacttagcaaacctccagcctctccgtttcccctggactcctcctcccttttcctcctgcttctccttgtcctgcctggaggctccaggccacacccagctggtggggctgctccagtgccccatcaccggccttctcctggcaggagaggaggagcagagagctgggtcctgggctgggattcgagccctgggcgggggtcagtcaagccgtggtccagcaaactcctctgcagatggctggagtgttgacccaggcttgtggcccaggtatcaccttcccttcctcctgagagttgaggcctgtaaatacaagggcccaggacagagtgtgtgcgtgcgtgtgggtgtgtgcgcgcgtgagcacacacgcgtgtgttggggggggtggggggattggggtggactcagggtatcttgccagagatacctgttttgatgagtacctattttgatgcaaaggaacggccctgggacctcagagggccacagatgggcttcctgggcctagcgtgccttggttgtggccatcctgcttctactcagccctgccatgctatggggtgcagcacaaacccaggacccaggcctagccactgcccacagctgatggtcactgttttggctggctccagagtggacaggtacgctctgtccacagcagctgctcaggcacagtatgccgtcaggtgcccgcttcttaccactgtgtgtcagctgggattggccgacagcgtggtggtgacttctaggtagaccgatggaccctaaattgggcagtggcattgtttctgctgtggtgggaactggcagggagagggtcacctccactctggttggatgcggagctggtccctctggctgccatgctgtgttggggctctctgacctccctgcttgcattgggtctgggagagagagtggaatatttggtagggaccttgacagaagagagccctgggtgcttgtggtgcaaagatcttcatgcccagttccaaagtgaggtccctcccaaagttgttttcgtgtgaggcagagaaagccacactctgaatacattttatgtctcaggaattcacattccaggttcaggaattttattccaaagtcctttggtgcactcaccgtccaccgttccccaaggcagggagagggagtggcccgtccctgggaggctggcaaagtgctctccagggaggggtcagacgtccttgtgatctgcccagggtgtcacggaaggagattttctagctccacatctgtctgcacataggaaggaaaagataggactctaaacctagtcatcttggaataaaaagaagagctggtttgttttagagcagggcggggggtgggggagggaagcgggtgttggctgtttccaaagagagcacttaatttaatttttcctttaaatgacccagggctgttccgtctgatagatggaagggtaacattgccttaaaacagaaatatgcaggcgttggctatttttggcataagagcgtgtcttcattcccaaagtggttctcgtttaatggcagggtgcggtccttaggccccggcctggactgggaaatgggggtagggcaccaggagagaaatcctcctgggtactcctggccagaccctcctgaatcatctgcggcttaaactcatctcgcttgaagggcagggagaaacccatgaatctcaggcacggttcacaggggtcctcaagggcaggtttccatttcatcatgaagtgagggactcctgtggaagagggtggtgggccttggaacgctgcctccactgaggcgggcacacaaggcggaccctcctgaaacagcctccattttcttcaaacatgcagaatgttttcccagactgcgtctatttcagggtcttccatttttgtggtttatggccatgcttgccagttttggtggggttgaggaacccataggactcatagaaataatagtgaaaactcaaacccttattttgggacttcagttctcgtggtccataggggcagagatgtcaaagtgaaggttgcctgagtgaagggagagttcccctataaaaggcctaaaattgatctggggctcagccatcaaggggctggtgttgctcctgtcccagacaaggaagcccctctttacatcagccatattaggggaacggttgtcagctccccaaatgcctactggatcctacagccatacaggaaaacagacggacacagccctttccttaaagagccctggggtcctgtcctgcaggatgctgcataggaatgggcagagatgtcctggatgggaacatggtcctggaggtgccctacctgcatcctgctgcacccccacccacgacactcgagtgcaagatcgcctcactcctaaccctgactttattcccaggccccacaccgaggcaggtgcaggattcgccatggtgcagcctccgggtacaaacatctgaggcactggcgatcccagtccttgcagcaccctgaacacagctcagaccagtgaggggtgattcagaggtggggatgggcagagagggctggccactctgcctcaggacttgacctcaagtgttctgtctccccacccggtgtgtccagaagaccagcctctttcttgccagaagcaggtgctaagatggactgcacagggtcccggcactccctcgggacccattcaggatctcagctgggcaggggtgccacccaacaggaagatgtgatctgagcaatagtgtggccttgtttctccgcttctggttgtggctgtgtgtacagggctacctattttgacttctgacaggtgtcactgattttctttcccccatttaaaaaaggtcatttagtcaaagacacagtgctagaggtttaaagggtgtaatgtgttggtcacatcacaaccagtaagaaacgcttggtaggttatccacatcttttgctgactgtttccatatacaattctggtcaccatattttccaaagctaaaatctgaggcgtgggctgatggtttttgaaatcaggattaccccaggaagaaccaggtcctattactaattttcctgattctgaggctctgaaggcttgtctgagacacattccggagacctttgtaccagaacttggatgcatagtccaccttactactgatacacgcctgagcaccctttagggcgaggcgccgcctcctgcctgctgtcctgtccctcagcatcagaagagttgaattcagcaggagacgggagcccggtgtccatgagggaagaggggtcgcgcttggtttctactgacccccatgaagatttcagacttgcagtgcggccacctggccctgccctgcctctctctttctcatacagctttaaaactttactacttttatttaaaaatgaactggatgggagagaagtagcgtcccctaccctacaagtcacacattccggggaggggggtggggggtggaggcaggaagtcatgggggtgggggtgggagcacgggaacagctttcttaaggcctcagggtcctgttttccctggcctcttctagagggcccgtggacaggtcgcagtgcgtgcttatttggaaaccaggtgtgtgagccgaatgcctgccaggccatgcactcagcagaggagcccttgtacctggctgccctgagaggagcaagaggccacctcccatgtggctctagacaccacgtgggctcattagccccagcgtctgtgccggctccaggtgcctgcctctgggtgtgtgagtgggagactttgctccctggcctcatcctagagaggcccctggtgcctagtgctgaggcctctggggctggaaagcctcagcagaaaggaggcactactgagcaactatgcattgtcattgtcgggtttggggctttcggtggttccttggtgactgggaattgcttgtgtgcatgtgttgggtgcatgcttccgggtctcagctgccccaggcccgcacaggcaaccccttcccatccaaagccattggtggagcttctctggaatcatttgccaaaagcccaaggcagaatccaagggtccaagaccatttccatggagctcatgtttttcttttctgtaggaacttttttttaaccagcacccaccataattccgaaggccacgtttcatctttcctggatcactacagtgaagtattacagttgtacagttcccagtctggccttggcttgctcggataaaactttgtatgtattttgtatggcatagattctatattgtaatgatgtcctatgcaaaaagaaaaattaacgaaattgtaaattttattgttttaacgtgtatgcatgtttagtgacgtttacattttgaaataaaatttatgattcattattttaaaaaaaaaaaaaaaaaa

SEQ ID NO: 496 - DNA, 1509 bp, Homo sapiens
cgctcgccggcggccgggcggtcccagcatgtcggccgccgtggcgtgcctggactacttcgccgccgagtgcctggtgtccatgtccgcgggcgccgtggttcaccgccgcccgccggaccccgagggcgcgggtggagccgcaggctcggaggtgggtgcggcgcatccggagtccgctctgccgggtccggggccatcggggcccgcgtcggtcccccagctcccgcaggtccccgcccccagccccggcgcgggcggcgccgcgccccacctgctggctgcaagcgtctgggcggacttgcgcggcagctctggcgagggctcctgggagaactcgggggaagctccacgcgcctcgtccggcttctccgacccgatcccgtgctccgtccagaccccgtgctccgagctggctcccgcctccggcgccgcggcggtctgcgctcccgagagctcctccgatgcgcccgccgtcccaagcgcgcctgctgccccgggcgcaccagcagcctctggtgggttctctggaggggccctaggggcaggccccgcccccgccgcggatcaggcgccccggaggaggtctgtcacacctgctgccaagcgccaccaatgccccttcccgggctgcaccaaagcctattacaagtcgtcgcacctcaagtcccaccagcgcacccacacgggtgagcgccctttctcctgcgactggctcgactgcgacaagaagtttacgcgttccgacgagctggcccgccactacaggacgcacacgggcgagaagcgcttctcctgccccctctgccccaagcagttctcccggagcgaccacctgaccaagcatgctcgccgccacccaacctatcatccagatatgatcgagtaccggggacgtcgtcgaactccccgcatcgacccgccactcaccagcgaggtggaaagctccgcctccggctccggtcccggcccggcgcccagcttcaccacctgcctgtaggacagtcattgctgtcagtcttaccctcaaggatgatcccccaggccgttgtccctgctttctctctgcccatccttctttcccagagtcattacaccaaggcacagactggttcctctgctctgagggtgggtccaggcagacatgtggactctggggaggtactgggggccggaaaatagcgggaattcttgcaacgtgtatatcatcctaaaagtgggggttgcctcaagacagcccccaggaactgataagaagggatgaactcccgtactctccagagtactgaagattctcccctccctggaaccagggatgtgaaactggaattctcagatgcctgaggagctcccagtctcaaaggactctggtgtctcacccatccaccaggcggaccttggagagggtgtcaggggtggcagtcttggaaatgtccaggactgggatggtgagaggcctttggaaacagaaatgatttctatttctgtaaacaaaaaaaaaaaaaaaaa

SEQ ID NO: 497 - DNA, 2539 bp, Homo sapiens
cgacccgcgggccggcgggcgatcgagccagcgcaggacccgcggctcggcccccggccgccgccggaccgagagtctagccgccgcccccagcccagcccgcccggccgcaggaccgccggggcctggccgccggtccggcgtgcgccaagttcagccgccaccggcacggccaggccagcatggtggaccacttacttccagtggacgagaacttctcgtcgccaaaatgcccagttgggtatctgggtgataggctggttggccggcgggcatatcacatgctgccctcacccgtctctgaagatgacagcgatgcctccagcccctgctcctgttccagtcccgactctcaagccctctgctcctgctatggtggaggcctgggcaccgagagccaggacagcatcttggacttcctattgtcccaggccacgctgggcagtggcgggggcagcggcagtagcattggggccagcagtggccccgtggcctgggggccctggcgaagggcagcggcccctgtgaagggggagcatttctgcttgcccgagtttcctttgggtgatcctgatgacgtcccacggcccttccagcctaccctggaggagattgaagagtttctggaggagaacatggagcctggagtcaaggaggtccctgagggcaacagcaaggacttggatgcctgcagccagctctcagctgggccacacaagagccacctccatcctgggtccagcgggagagagcgctgttcccctccaccaggtggtgccagtgcaggaggtgcccagggcccaggtgggggccccacgcctgatggccccatcccagtgttgctgcagatccagcccgtgcctgtgaagcaggaatcgggcacagggcctgcctcccctgggcaagccccagagaatgtcaaggttgcccagctcctggtcaacatccaggggcagaccttcgcactcgtgccccaggtggtaccctcctccaacttgaacctgccctccaagtttgtgcgcattgcccctgtgcccattgccgccaagcctgttggatcgggacccctggggcctggccctgccggtctcctcatgggccagaagttccccaagaacccagccgcagaactcatcaaaatgcacaaatgtactttccctggctgcagcaagatgtacaccaaaagcagccacctcaaggcccacctgcgccggcacacgggtgagaagcccttcgcctgcacctggccaggctgcggctggaggttctcgcgctctgacgagctgtcgcggcacaggcgctcgcactcaggtgtgaagccgtaccagtgtcctgtgtgcgagaagaagttcgcgcggagcgaccacctctccaagcacatcaaggtgcaccgcttcccgcggagcagccgctccgtgcgctccgtgaactgaaagcgccctgaaccccagcctgtccgtcaccccggatccccaccccatccccatttttttaagcaataatttatttgcctcctccagagggacatggcaatgttaccagcccaccttctgaagcctgggaggtgtgaacccagggcccgccaaccgctgcctttctcgggagtacttagagcctcgaacccgcgtccctgggggctgggccccaggcgcacggggctggaggcaggccttcgtgccttcgtgccttcgtgccttcccgcggtggccaggcctctgctgcagccgctggttgcaggcagagttttggggacctggcccttctcccactgggctcccccatcctgggccaaggccagaactttagtgctaggggaagatgaaatgtgcagttttgaaatgttgggtttccagagagagtcatgctggaggagaaggaagtaggccagaagtccagggctgcactgtggtgtgagggtggctttgtctaagatgcctgctcagcatgatcaccagagggtgtgggcaggtccctggagccgggggggggggggggggggggggggggcaggaccgggccgctgggccctcatgtgggagagaggtgaaaagcgtcccccactagggggctggcagtgcatgtgcttgagttaaatgtgcagggcagacagagccagaagggcctgtacccaggggctcgtcccctcctccggtttcccagacaaatccagacaccagcctttagggtggccttgggaggagagggccaggctgtcctgggtgtgagagaactagatagagcctcccaaccctgatttagaaatgcattccttattttgtctagaaattaataaatgaactagcttgttttgacaggtttatttcacatcctatgaatgtatgtaaataaactgtacataggtccatccacataaaatatcttttaataacatatcaacatttgtgtaaatttgaaatttaaaaaaatctatgaagctggtgtacatatgttacaattacgtatattttctttggtccttcataaaaatatatttactttgccaataaaaagaaaaagaactcacaaaaaaaaaaaaaaa

SEQ ID NO: 498 - DNA, 2904 bp, Homo sapiens
cgccggccggacggacgccgctcccgccgcctccgctccgcccgccgcgccgcgcgcccttgctcggcatgtcggcggccgtggcgtgcgtggattacttcgccgccgacgtgctcatggccatctcttcgggcgccgtggtgcaccgcgggcggcccggccccgagggcgcgggccccgccgccggcctggatgtgcgcgcggcgcgccgcgaggccgcctcacccgggaccccggggccacccccgccgccccccgccgcttctggcccgggccccggcgccgccgcggcgccccacctgctggccgccagcatcctggccgacctgcgcggcggacccggagccgccccggggggcgcctcgcccgcctcctcctcctcagccgcctcgtccccgtcctcgggccgcgcccccggcgccgcgccctccgccgccgccaagagccaccgctgtcccttcccggactgcgccaaagcctactacaagtcctcgcacctaaagtcgcacctgcggacgcacacaggggaacgcccttttgcttgtgactggcagggctgcgacaagaagttcgcccgctccgacgagctggcccgccaccaccggacgcacacgggcgagaagcgcttctcctgccctctgtgctccaagcgcttcacccgcagtgaccacctggccaagcacgcccgccgccaccccggcttccacccggacctgctccggcgccctggtgcccgcagtacctcccccagcgactcgctgccctgcagcctggccgggagccctgcgcccagccccgcgcccagcccagcccccgcaggcctgtagggccctcgtgcagcccaccctgaccgccaggatgcttctgccatccaggggtgtagtgaggacccacggggagcctgggccccttccagccgtgggcaaaccctgaagacacccctgcccccctccagagagtgaggagggggcctgagactggacctgggtctgcctgacctcagaggtggctctcaggatgggtgacgggggcttgtgtctgtaaatagccatgatactaactttcttcccatctgtgcaacggggcccccccagggcagctaggaggtcctcccctctcctctccaccaccccctgctgcccccctcccggggtggggtttgggggggtggagtggacttctgggagccggcccggggaaagcaccccctgccccatccctgcagattgggatgaagtgttcagacagccatagaggagtcgggggttgacacggcccctgcctctccccaccccacccccaccccaccgaaagccatgggagtagttcagggaaatgggggtgcagcccagccaccccccattcgggtactcaatctcaggtgtccacaagttctgcccacggtaggggctgcctggccccccagacctcgggggtagagccaggagtggggcagcgttaggatgcccggaggggctccaggtgttgcttctgagacctgggatggggagggaggggacctctgggttcttccaaagaacatttgactcagtggggtcgggagggaatcctggcttatttattttcctctgtcctcgggtgtgggggccctagctcgccctctctgggtgggtgggtgagagaggctgcaggggaggctggcaccgggcttgggcctccagtccctgccttgctgactttggccgttgcggtatcacgtgacaatcaactctcccttaacgacgactgcggctgttgggctgcgctgccctccctggcctgcaggtggggccgtggagcccatgcccgccggggttgcaggctcttccgggcctgggctgcagcctggcccggccctgcttccctggcctcccctccttctcctgggtgcttggaagaggtgggtcctggcccgtggttgaggtcttgcctcgtggactggaagcagagggctggctgtgcagcctcctggggtagctcgttttttttgcaccgggtagaatattttttcaggcacggattcctttttttctgggcccccatgggtggtccggcatcctcagggggtgtgagtgtgtgtggggggtctctgagctgaacttgggtggggtggggacttgttcctcgggggccacctttgtgtccttgtcagcggtcgtcctgctgtggcctgggttgcatttcctcttggggggggtattgaggacccccagcctggaatgagaagggtccccggttccatgtcagacccagaaaggtggatccccccactgttggctgcaggaggtttttggtacccccttttgttccagaaccgtcctgcctctcgcttggggacaggggggctttggatggcactggtgtgcacctggacccagccccggcctggcaggatccagggatgggtgcctgggatcctggggggagggaggcaggggacgcccttctggagctgggctcggagggtcctgccccatccagccctcggctctctgtgttctctgtccctagcctcaaaccctcttctggcagcgctagtgagatgccttagtctgtgggggtgggtgggggactggggccccgttttcctttgtgagtcttggttggccccagccctggcaggggcctgtctggagcaggggtaggtagggctgtgggttccagaactctataactgggcccctctccagtgtccaggggcttggagagacctgcgcccacccctccactctcccaggagtcgctgatcactgggacctggttccagccgtttgcaggggaggcggctccgagaggcgtgtgctttccgtgggtggcgcccctcccccgccctgcctggcctcatccttgtatttaattaattaaacaagcccctttttaaaccctaaaaaaaaaaaaaaaaaa

SEQ ID NO: 499 - DNA, 1655 bp, Homo sapiens
gcccgcccgcgccccgaccagcccggcctcgggcagccactcaccggtgtccccgtccgcgtccttcctccccgggtcccggccatggcgctgagtgaacccatcctgccgtccttctccactttcgccagcccgtgccgcgagcgcggcctgcaggagcgctggccgcgcgccgaacccgagtccggcggcaccgacgacgacctcaacagcgtgctggacttcatcctgtccatggggctggatggcctgggcgccgaggccgccccggagccgccgccgccgcccccgccgcctgcgttctattaccccgaacccggcgcgcccccgccctacagcgcccccgcgggtggcctggtgtctgagctgctgcgacccgagctggatgcgccgctggggcccgcactgcacggccgctttctgctggcgccgcccggccgcctggtcaaggccgagccccctgaagcggacggcggcggcggctacggctgcgcccccgggctgacccgtggaccgcgcggcctcaagcgcgagggcgccccgggcccggcggcttcgtgcatgcgaggtcccgggggccgccccccgccgccgcccgacacaccgccgctcagccccgacggccccgcgcgcctgcccgcgcccggtccgcgcgcctccttcccgccgcctttcggtggccctggtttcggcgcgcccgggcccggcctgcattacgcgccgcctgcgcccccagccttcggtctcttcgacgacgcggccgccgccgcggcagccctgggcctggcgccccccgccgcccgcggtctcctcacgccgcctgcgtccccgctggagctgctggaggccaagccaaagcgcggccgccgctcttggccccgcaaacgcaccgccactcacacctgcagctacgcgggctgcggcaagacctacaccaagagttcgcatctgaaggcgcatctgcgcacgcacacaggtgagaagccctaccactgcaactgggacggctgcggctggaagtttgcgcgctcagacgagctcacgcgccactaccgaaagcacacgggccaccggccattccagtgccatctgtgcgatcgtgccttctcgcgctccgatcacctggcgctgcacatgaaacggcacatgtagccgggacgcccccgcccacctgcgcgcggccgtggcgggtcccacgcgccgggcgcggccccctcccaaactgtgactggtatttattggacccagagaaccgggccgggcacagcgtggctacagagggtctccctcgatgacgacgacgacgacgccaccaccccagcccccgtctgtgactgaaggcccggtgggaaaagaccacgatcctccttgacgagttttgtttttcaaaatggtgcaataatttaagtggcatcttctctcccaccgggtctacactagaggatcgaggcttgtgatgccttgtgagaaataagggccttaatttgtactgtctgcggcattttttataatattgtatatagtgactgacaaatattgtattactgtacatagagagacaggtgggcatttttgggctacctggttcgtttttataagattttgctgggttggttttttttttaattaaaaagttttgcatcttttaaaaaaaa

SEQ ID NO: 500 - DNA, 5632 bp, Homo sapiens
tacttaccccgccagccccgggaggctcgcagagcgagcggcgccggcgtcatgtgactgcccggagttggtgccaggagccagaggggagccaggagcggagccgcgcggagccggggcccgagccggagcgcagcgagagcgcccgccgcacgcgcgcccgtccccgtcccctgcggccgccaacgccgcccggactggagccctgacattgctgcgctcggggggctccaggcagcccgtatcggggcctttatttctcgtcggcggcgccctgcaccgcgcctcgcaaagccaaacaccagagcaccctagaaggtttaactaaaagaatgctcatgtttgacccagttcctgtcaagcaagaggccatggaccctgtctcagtgtcatacccatctaattacatggaatccatgaagcctaacaagtatggggtcatctactccacaccattgcctgagaagttctttcagaccccagaaggtctgtcgcacggaatacagatggagccagtggacctcacggtgaacaagcggagttcacccccttcggctgggaattcgccctcctctctgaagttcccgtcctcacaccggagagcctcgcctgggttgagcatgccttcttccagcccaccgataaaaaaatactcacccccttctccaggcgtgcagcccttcggcgtgccgctgtccatgccaccagtgatggcagctgccctctcgcggcatggaatacggagcccggggatcctgcccgtcatccagccggtggtggtgcagcccgtcccctttatgtacacaagtcacctccagcagcctctcatggtctccttatcggaggagatggaaaattccagtagtagcatgcaagtacctgtaattgaatcatatgagaagcctatatcacagaaaaaaattaaaatagaacctgggatcgaaccacagaggacagattattatcctgaagaaatgtcaccccccttaatgaactcagtgtcccccccgcaagcattgttgcaagagaatcacccttcggtcatcgtgcagcctgggaagagacctttacctgtggaatccccggatactcaaaggaagcggaggatacacagatgtgattatgatggatgcaacaaagtgtacactaaaagctcccacttgaaagcacacagaagaacacacacaggagaaaaaccctacaaatgtacatgggaagggtgcacatggaagtttgctcggtctgatgaactaacaagacatttccgaaaacatactggaatcaaacctttccagtgcccggactgtgaccgcagcttctcccgttctgaccatcttgccctccataggaaacgccacatgctagtctgattgcctctgtgtcctgcctcagcgtgactccccactcacctggctctctctctgtcctgcctcccattatctaacacattttttacatgtacattttaatttgattcagctggtctgaatctctgaatttatatcatccaaaacttccatatggtcagtagtagatgttctctaatcctccctctccttaccacgggtcagacctaaagaatgtgaacacttttttttttttttctggggatgctaagcaaacccttcttacagatacgtttaatgtaataagaacaagggaacatgtaaactaacataaccaattgtcagttctccatgtattcctcaaaagaatgtcagagtaaatgtattagaaatacagtatccagactgctagtccttgccagagacattcttacctctgccctgtgataatattttatgcttgacagtgaaaacaagtgtggccccttgcaccggttagctagaagtacagccagatttcaagctagtgcagtcacctcttccgtcattcttcacaaatcttgtcaacctggatcttagacttcatctgaatcgagttctttgccctcctttgtgcctgcagctcatatggaggtctttgccaccaatgggagatgagcccaaactttcgatctaggtgggtgatgtgtagcagttcaagggaagggtgctgtgttttcatagcatggagtcggaggagagggccatttagcagggggagcagaagaggcaattcctcctgggctaggggttgtcagtgaggtttcaacattttgttagctgtgtgcagcattcccagagcttcagtctctgtgcatactcagctttgtagaaccatgctgcaaagccatataccgatggggttatccatgcaactatctccattcctacaatgtccttaatatgagatcatcaaacattgatagtagggactccatggaatatttgcccagtaatggtaagaaatctttcgggtaagagtatggatggttcttcttttacccaatctgcttatagctttttttgtaaacagggaaatgttgagtggtacttgtattcccttatcaaattaatcacatagcttttatacagaaactcttcctgtgtgagctgttaaggtgccaaattggctgtcatttgtattcatgacacataccataaagcatctgctaatgctttaatggattgattcaattaagacctgagtgacactatttgtaaatataactagttgtgaagcacacatacctttattttgggaatttatgagaaaatatagaaaaccacagatcagggattcatatatgtagctcaaaaattcccaaaagtttactgttagagttggcaatttcctatcactatttcagtgtcagaacaaactgaaaataatggctcgtgtttatgttgaagataaatagcaccattattgggggaagttattcaaaagcaggcttttgagcaccatagtctaaatgccaataaaaataattcatacatagaaatgtcattggtcctgaatttgaagaaagtgagcaacagtagttaaatgtgggtgcatataaccaaattccccttcatcaagaatggaggagaagagagaagaatgaaatcctgaagattcatcccagccgcaactcaggatccaacacaactttaactgggaggaatacattgtttgatcatttttaaaacatctgtgaatgagtgattccggaggcctgtgaattgtgtggggagcttgctttgatggcactgtgttaataaaagttgtagggactgtgcacctaagaggctaagaggtcccactcatccgccctgtgaaccagctgtaaagaaatgtagttaagaaatgcaaagaaatgtgttatcttggcacttgggtttgattttcctttttttaaagcactgcaaaacttctttaggatactaaaacatcctaattgggctgtttttttgttttgttttgtttttcagctaaaggcaaagataatttttttttcagctgaagtttttcttttttgcaactatgacatgaattgagtgataaaatggctctttgaaaagtagatattgtctgtattgtaaatgcttagtcatattcatggcaaagtgttcatttcttgagatggttctttcacaacacacaagaatcaagatggaacgcaaggaaaatctttttgttttgaccgaggtaaccagtttatgtgtgttccaatccatagagaagtgggggaaagggcgagaaaggatcagattgatctgggatcagctttgagcctgagttcagtgaatagcctcatgggcatctcatggaattgatgcatttgctgtggcatatttaaattttgttcaaaagatttgaagcaagaccttgcaaagactcttaacattactgttcagcttgcttagattgtgttaacagttcatttaacaaagatccgttttaactctgaacaaaagcaacccagagcggccattctctattcccatgctggtcaatacgctttcattaccaattggcccttaccaaacttttcttatatatatatttgtattttactatgatagttgagaaatttagcctcttagtcatttttagctgttattgtggaagacctcaaatacaagattagatgcccttgaacatgttttaatgatgtgtgtcatgttactatcaatggtgatttcaatcgcaatattttaaattgatgagaatgatttgtaaacatgaagttactattacgtaaattctgtttgttatagagtttcttcagttgttacccaagtgtcatcctagagaagtcagaagaatcagaatccatcgtattttagagttatgtgaatctacatcataaatgggcattaacattctaaattgcttggtttggagaatgtgttagcagcatagctatattcaactagggagatgctaaatacacagaagtttcaagagccttggaacagaattacaggggaactatatatgtatatgtatattttattaaacacccatctgcactatcagtattgcactaatgtggaatttgaaagactattttgctgatactgtatatatgcgcatcattcctgattagattgttgtaaagacaatctgaaagatctaaggttttaaaataatttggtttgaaaatatacagttgtcttgaaggaattgctgtcatacatgaagttgctccgagctgtctttattctcttcttggtcaaggttaacaattgctaaatgatcgcaaattcacctaaacaatacatttacaaagccatctttacatgcattaaacgagggctacaacaatattgttttacaaatactagcacttttttttctgttatgtacttagtgttagagggtcaaaataatctttctgcttagcatctcttaaaccatacctgcaaatatagcaggattattacatttacagtactttaatacttgtataaactatgcagaaatttttaataaagtgtaatatattttataagctaataagactgaatgggtaaaggtttttagcatgcattagtatacttgcagatactgaaacattttggtaatctttcttactaaagatgtgaatgtttaatgtaccttctctgtttctactctgtagtccaatgggaattcagtaatgacattttgtcatgtcaaactgtgaacataaatttgtactgtacagtcctcatatactatatacagtatgcaatatatattatatacttgttaataaaaccatcagaatattaaatgtgatcatgtgattacttcatatgcagtgatcactagagcaaaacttacagagcaatgtaagaacccttgcttagaacattacttactctgatgggcagttattgttgatggagggacagaaaaatagatctaactggaagatgaactaccggaattaactcagccctcaagctatgtccctggttttctgaaaacagccaacaggaagtctcctaggctgaaatcataaaactgcagacaatccagcaaaaatctacaaactcacctagttcattcttgaaatacttcttgtatttgttatttatgaacccctgcctgcttccaaaaagaacttgcagcattttgtattaaaagacgcatgtgtataatactttaaacttttagagtaaaatatcaagactctcatgttggggagtggggaacgaggaacagaacaataacgcattaaagtaaataactctggaaaaaaaaaaaaaaaaaa

SEQ ID NO: 501 - DNA, 2949 bp, Homo sapiens
agtttcccgaccagagagaacgaacgtgtctgcgggcgcgcggggagcagaggcggtggcgggcggcggcggcaccgggagccgccgagtgaccctcccccgcccctctggccccccaccctcccacccgcccgtggcccgcgcccatggccgcgcgcgctccacacaactcaccggagtccgcgccttgcgccgccgaccagttcgcagctccgcgccacggcagccagtctcacctggcggcaccgcccgcccaccgccccggccacagcccctgcgcccacggcagcactcgaggcgaccgcgacagtggtgggggacgctgctgagtggaagagagcgcagcccggccaccggacctacttactcgccttgctgattgtctatttttgcgtttacaacttttctaagaacttttgtatacaaaggaactttttaaaaaagacgcttccaagttatatttaatccaaagaagaaggatctcggccaatttggggttttgggttttggcttcgtttcttctcttcgttgactttggggttcaggtgccccagctgcttcgggctgccgaggaccttctgggcccccacattaatgaggcagccacctggcgagtctgacatggctgtcagcgacgcgctgctcccatctttctccacgttcgcgtctggcccggcgggaagggagaagacactgcgtcaagcaggtgccccgaataaccgctggcgggaggagctctcccacatgaagcgacttcccccagtgcttcccggccgcccctatgacctggcggcggcgaccgtggccacagacctggagagcggcggagccggtgcggcttgcggcggtagcaacctggcgcccctacctcggagagagaccgaggagttcaacgatctcctggacctggactttattctctccaattcgctgacccatcctccggagtcagtggccgccaccgtgtcctcgtcagcgtcagcctcctcttcgtcgtcgccgtcgagcagcggccctgccagcgcgccctccacctgcagcttcacctatccgatccgggccgggaacgacccgggcgtggcgccgggcggcacgggcggaggcctcctctatggcagggagtccgctccccctccgacggctcccttcaacctggcggacatcaacgacgtgagcccctcgggcggcttcgtggccgagctcctgcggccagaattggacccggtgtacattccgccgcagcagccgcagccgccaggtggcgggctgatgggcaagttcgtgctgaaggcgtcgctgagcgcccctggcagcgagtacggcagcccgtcggtcatcagcgtcagcaaaggcagccctgacggcagccacccggtggtggtggcgccctacaacggcgggccgccgcgcacgtgccccaagatcaagcaggaggcggtctcttcgtgcacccacttgggcgctggaccccctctcagcaatggccaccggccggctgcacacgacttccccctggggcggcagctccccagcaggactaccccgaccctgggtcttgaggaagtgctgagcagcagggactgtcaccctgccctgccgcttcctcccggcttccatccccacccggggcccaattacccatccttcctgcccgatcagatgcagccgcaagtcccgccgctccattaccaagagctcatgccacccggttcctgcatgccagaggagcccaagccaaagaggggaagacgatcgtggccccggaaaaggaccgccacccacacttgtgattacgcgggctgcggcaaaacctacacaaagagttcccatctcaaggcacacctgcgaacccacacaggtgagaaaccttaccactgtgactgggacggctgtggatggaaattcgcccgctcagatgaactgaccaggcactaccgtaaacacacggggcaccgcccgttccagtgccaaaaatgcgaccgagcattttccaggtcggaccacctcgccttacacatgaagaggcatttttaaatcccagacagtggatatgacccacactgccagaagagaattcagtattttttacttttcacactgtcttcccgatgagggaaggagcccagccagaaagcactacaatcatggtcaagttcccaactgagtcatcttgtgagtggataatcaggaaaaatgaggaatccaaaagacaaaaatcaaagaacagatggggtctgtgactggatcttctatcattccaattctaaatccgacttgaatattcctggacttacaaaatgccaagggggtgactggaagttgtggatatcagggtataaattatatccgtgagttgggggagggaagaccagaattcccttgaattgtgtattgatgcaatataagcataaaagatcaccttgtattctctttaccttctaaaagccattattatgatgttagaagaagaggaagaaattcaggtacagaaaacatgtttaaatagcctaaatgatggtgcttggtgagtcttggttctaaaggtaccaaacaaggaagccaaagttttcaaactgctgcatactttgacaaggaaaatctatatttgtcttccgatcaacatttatgacctaagtcaggtaatatacctggtttacttctttagcatttttatgcagacagtctgttatgcactgtggtttcagatgtgcaataatttgtacaatggtttattcccaagtatgccttaagcagaacaaatgtgtttttctatatagttccttgccttaataaatatgtaatataaatttaagcaaacgtctattttgtatatttgtaaactacaaagtaaaatgaacattttgtggagtttgtattttgcatactcaaggtgagaattaagttttaaataaacctataatattttatctgaaaaaaaaaaaaaaaaaa

SEQ ID NO: 502 - DNA, 3350 bp, Homo sapiens
tagtcgcggggcaggtacgtgcgctcgcggttctctcgcggaggtcggcggtggcgggagcgggctccggagagcctgagagcacggtggggcggggcgggagaaagtggccgcccggaggacgttggcgtttacgtgtggaagagcggaagagttttgcttttcgtgcgcgccttcgaaaactgcctgccgctgtctgaggagtccacccgaaacctcccctcctccgccggcagccccgcgctgagctcgccgacccaagccagcgtgggcgaggtgggaagtgcgcccgacccgcgcctggagctgcgcccccgagtgcccatggctacaagggtgctgagcatgagcgcccgcctgggacccgtgccccagccgccggcgccgcaggacgagccggtgttcgcgcagctcaagccggtgctgggcgccgcgaatccggcccgcgacgcggcgctcttccccggcgaggagctgaagcacgcgcaccaccgcccgcaggcgcagcccgcgcccgcgcaggccccgcagccggcccagccgcccgccaccggcccgcggctgcctccagaggacctggtccagacaagatgtgaaatggagaagtatctgacacctcagcttcctccagttcctataattccagagcataaaaagtatagacgagacagtgcctcagtcgtagaccagttcttcactgacactgaagggttaccttacagtatcaacatgaacgtcttcctccctgacatcactcacctgagaactggcctctacaaatcccagagaccgtgcgtaacacacatcaagacagaacctgttgccattttcagccaccagagtgaaacgactgcccctcctccggccccgacccaggccctccctgagttcaccagtatattcagctcacaccagaccgcagctccagaggtgaacaatattttcatcaaacaagaacttcctacaccagatcttcatctttctgtccctacccagcagggccacctgtaccagctactgaatacaccggatctagatatgcccagttctacaaatcagacagcagcaatggacactcttaatgtttctatgtcagctgccatggcaggccttaacacacacacctctgctgttccgcagactgcagtgaaacaattccagggcatgcccccttgcacatacacaatgccaagtcagtttcttccacaacaggccacttactttcccccgtcaccaccaagctcagagcctggaagtccagatagacaagcagagatgctccagaatttaaccccacctccatcctatgctgctacaattgcttctaaactggcaattcacaatccaaatttacccaccaccctgccagttaactcacaaaacatccaacctgtcagatacaatagaaggagtaaccccgatttggagaaacgacgcatccactactgcgattaccctggttgcacaaaagtttataccaagtcttctcatttaaaagctcacctgaggactcacactggtgaaaagccatacaagtgtacctgggaaggctgcgactggaggttcgcgcgatcggatgagctgacccgccactaccggaagcacacaggcgccaagcccttccagtgcggggtgtgcaaccgcagcttctcgcgctctgaccacctggccctgcatatgaagaggcaccagaactgagcactgcccgtgtgacccgttccaggtcccctgggctccctcaaatgacagacctaactattcctgtgtaaaaacaacaaaaacaaacaaaagcaagaaaaccacaactaaaactggaaatgtatattttgtatatttgagaaaacagggaatacattgtattaataccaaagtgtttggtcattttaagaatctggaatgcttgctgtaatgtatatggctttactcaagcagatctcatctcatgacaggcagccacgtctcaacatgggtaaggggtgggggtggaggggagtgtgtgcagcgtttttacctaggcaccatcatttaatgtgacagtgttcagtaaacaaatcagttggcaggcaccagaagaagaatggattgtatgtcaagattttacttggcattgagtagtttttttcaatagtaggtaattccttagagatacagtatacctggcaattcacaaatagccattgaacaaatgtgtgggtttttaaaaattatatacatatatgagttgcctatatttgctattcaaaattttgtaaatatgcaaatcagctttataggtttattacaagttttttaggattcttttggggaagagtcataattcttttgaaaataaccatgaatacacttacagttaggatttgtggtaaggtacctctcaacattaccaaaatcatttctttagagggaaggaataatcattcaaatgaactttaaaaaagcaaatttcatgcactgattaaaataggattattttaaatacaaaaggcattttatatgaattataaactgaagagcttaaagatagttacaaaatacaaaagttcaacctcttacaataagctaaacgcaatgtcatttttaaaaagaaggacttagggtgtcgttttcacatatgacaatgttgcatttatgatgcagtttcaagtaccaaaacgttgaattgatgatgcagttttcatatatcgagatgttcgctcgtgcagtactgttggttaaatgacaatttatgtggattttgcatgtaatacacagtgagacacagtaattttatctaaattacagtgcagtttagttaatctattaatactgactcagtgtctgcctttaaatataaatgatatgttgaaaacttaaggaagcaaatgctacatatatgcaatataaaatagtaatgtgatgctgatgctgttaaccaaagggcagaataaataagcaaaatgccaaaaggggtcttaattgaaatgaaaatttaattttgtttttaaaatattgtttatctttatttattttgtggtaatatagtaagtttttttagaagacaattttcataacttgataaattatagttttgtttgttagaaaagttgctcttaaaagatgtaaatagatgacaaacgatgtaaataattttgtaagaggcttcaaaatgtttatacgtggaaacacacctacatgaaaagcagaaatcggttgctgttttgcttctttttccctcttatttttgtattgtggtcatttcctatgcaaataatggagcaaacagctgtatagttgtagaattttttgagagaatgagatgtttatatattaacgacaattttttttttggaaaataaaaagtgcctaaaaga

SEQ ID NO: 503 - DNA, 1639 bp, Homo sapiens
gatccacgagctggagtgattagagccctggaagggaattgttactcccgtggagaagtccccttttcctggcagtcgtctgcactgtacacgctggatgcctctctccatccaccccactcactcgctcctctctcacctcctctctccctctcctgcattgatttttttttttcctttttagttgactgaaacaaaacaaaacaaaagggccactggatgtctgccttcttggggggtgagccagacagactgacaaacaaacagccccaactgtgttcgggggagggtttcgcctcccgttttgcccggcagcagcagcatggacgtgttggctagttatagtatattccaggagctacaacttgtccacgacaccggctacttctcagctttaccatccctggaggagacctggcagcagacatgccttgaattggaacgctacctacagacggagccccggaggatctcagagacctttggtgaggacttggactgtttcctccacgcttcccctcccccgtgcattgaggaaagcttccgtcgcttagaccccctgctgctccccgtggaagcggccatctgtgagaagagctcggcagtggacatcttgctctctcgggacaagttgctatctgagacctgcctcagcctccagccggccagctcttctctagacagctacacagccgtcaaccaggcccagctcaacgcagtgacctcattaacgcccccatcgtcccctgagctcagccgccatctggtcaaaacctcacaaactctctctgccgtggatggcacggtgacgttgaaactggtggccaagaaggctgctctcagctccgtaaaggtgggaggggtcgcaacagctgcagcagccgtgacggctgcgggggccgttaagagtggacagagcgacagtgaccaaggagggctaggggctgaagcatgtcccgaaaacaagaagagggttcaccgctgtcagtttaacgggtgccggaaagtttatacaaaaagctcccacttaaaggcccaccagaggactcacacaggtgagaagccttataagtgctcatgggagggatgtgagtggcgttttgcacgaagcgatgagctcacgaggcactacaggaaacacacaggtgcaaagcccttcaaatgcaaccactgcgacaggtgtttttccaggtctgaccatcttgccctccacatgaagagacatatctaaaaaaccgaaaggccagagttgccatggcatcggctagtgtctaaaggaaacgccatgaggcagggggctggacttcaggcggggacccattgcctcgcagaagaaagctctcacttataaacctctgtacacacacacacacacacacacatatacacacactcacagacccacacacatacacactgtcatgcactcaactatatttaaaatatatacgtctattctttatgccttgccctagccagatggaagaagatgaagaaggaaaccaggtgaactcagcaaggcagactggctgcttacttcagcactattggaattatttcccgctgttgccaatggaaatcaaagaaaatggatgtgacgtctgtgcaggtggacggcagtccgaggggcttatttcac

SEQ ID NO: 504 - DNA, 5434 bp, Homo sapiens
ttttaaggaactccaccctaggtggagtcctcacgatagtcacacctctcctttgggcctagcagggccagagaaagacggaatcactctacccactcaggttgcccagagagcactttaggttctgactcgcgtggggcgcgaggtaccccgtggggcagctaggtgcctccaagaaaccccgccccagaggacccgcacgagttgctgccatttttcgctgaagcccctgccctggggctggtgttcttctctatgattctaccaatcgtcggcatttttttcctcccttctttctttttaggaaggcgctggggtgtgcggcggcaacggcggcggtgaagggatcctcttgtggtatctcctcgtgggttcctgtcttgaaggatttcttctccgcctcaactttatgttcaagtagcgctttgggggttgggttggttttcatagcccccacccccggccctctccttttaaagggtgtgtggagttcagaggatgggtggagagcgggcttggccggaactgaattggtagaggtaaaaggggaacggaggaccttaagctctggccacttcggcccagcgaacccactttatttttgtccaaggaaaagctgcaggggggaggattctttttaggaagtctactctgccggcccctgatttttgggttggatgcttgagagctttgtttcccttgttccgagagtggcccagctgggtctgaatcgactccctcccctttcgaccccctcctcattttccagcccggagaaataggggagtgggggcccaagaacgagaagacgagaacgcgtcgccctgcgctatgtcagaatggggcgggtgtgaggggaacagctctcttgcgatcagctcaggagtatgagcctcccggaggacggcatgagttctggacacttcaggagtcctcagctagtgacatggtcgatatggataaactcataaacaacttggaggtccaacttaattcagaaggtggctcaatgcaggtattcaagcaggtcactgcttctgttcggaacagagatccccctgagatagaatacagaagtaatatgacttctccaacactcctggatgccaaccccatggagaacccagcactgtttaatgacatcaagattgagcccccagaagaacttttggctagtgatttcagcctgccccaagtggaaccagttgacctctcctttcacaagcccaaggctcctctccagcctgctagcatgctacaagctccaatacgtccccccaagccacagtcttctccccagacccttgtggtgtccacgtcaacatctgacatgagcacttcagcaaacattcctactgttctgaccccaggctctgtcctgacctcctctcagagcactggtagccagcagatcttacatgtcattcacactatcccctcagtcagtctgccaaataagatgggtggcctgaagaccatcccagtggtagtgcagtctctgcccatggtgtatactactttgcctgcagatgggggccctgcagccattacagtcccactcattggaggagatggtaaaaatgctggatcagtgaaagttgaccccacctccatgtctccactggaaattccaagtgacagtgaggagagtacaattgagagtggatcctcagccttgcagagtctgcagggactacagcaagaaccagcagcaatggcccaaatgcagggagaagagtcgcttgacttgaagagaagacggattcaccaatgtgactttgcaggatgcagcaaagtgtacaccaaaagctctcacctgaaagctcaccgcagaatccatacaggagagaagccttataaatgcacctgggatggctgctcctggaaatttgctcgctcagatgagctcactcgccatttccgcaagcacacaggcatcaagccttttcggtgcacagactgcaaccgcagcttttctcgttctgaccacctgtccctgcatcgccgtcgccatgacaccatgtgagccgcacaggtcacactagagaagctgcgctggtatctttcctggtcgtgtgctgaggttgggacaattttttcctctttgacttcagcttgcatatggggttgaagcagcccactgagccaagttgaggagactggaggaaaagagagctggtctcccgtggggctcttcatattctaccttcacttctccactgtccagacccgtttttttcaacctccacatgggttgaattccagtgtggcacccatggctgccttcccatccccccctgctctgaaataggacatttttcctacagtaacaaaacaggaatcaaactcaaggctgtgaacaaacatacgctgctttattctttccaatttttctcttgttttctagaactcttatccatatgtttttaaaataagtacctaaaagtggtttgatagtgtcctaaacgacttttttaacttcctaaatggaaagagcataacaatgtagttgattggtaagatttacagggatttggtttctgagtttgaggcacattcccagtgaataagctgagtcccataccacactcaaaaggttttaataaatctaatcctatttcttcttaaagtttggttttcagacagtgctggtgcttctgcttcttaagttcatcaagggaatgaggagttcttgtccttctcctcctcttttttttcttttccactttctccttcaggattaaagattttgctgcacaattgttatttgttaggttaaatttggacaaatattcaaagcacacatagacatataagtaaggagaaaaatgttccaggagagtaggttgggcagtgacaggaacaaacagacctaggatgatcctgagaacaaatagaggggttcctttacttgtataggatatcaaaagtgctgttaatcacaaacctcattcaaatggcaggctgtcgagacagtgtcttgaggggctggctgtactgtttattttttcgtttacacaaagaagcaattgagtatattgcatgatgagaaatcacacactagggtcatgttatacagaagtaaggggttggaaaaatggaatgttgttcactccatggaattattggcattcattcctgtgtttcaaatgaaacatagatgcttttcatgaaaactgacctacaaaaagcaatttgatgttctgcaactgctatgaaaacctaagccatttattttagctgatagcagattgcataatatactcatttagctgcccaatcagattgttttataatattacctggggtacaaaatcctctgttcctggccctggaccacagatctacctccacatggcatatttcctttctggggtcaggggtaggggagggggctttgcatcacttgaatttagactcagcctctctttaaaagattgtctttatattgaacacctttttcttttcaaccctgcttgaatactttaggttactatttcctgaggctgtccattctcactatattgtagaattctagcaccaagaagggatcccgttaaccatctagtcctatccatccctcatattttacagatgagacaaatacgggtcagatttttttctccagatgtttctttgagcccttatacacctgcacgcttattctcctggggatcacataattttatttatttattttttgagagacggtttcactccatcacccaggctggagtgcagtggcgtaatcttggctcactgcaacctccgcctcctgggttcaagtgattctcctgcctcagcctcccaaatagcttggattacaggtgcgtgccaccacacctagctaagttttgtattattagtagagatggggtttcgccatgttggccaggctggtctcaaactcctgacctcaagtgatccccccacctcggcctcccaaagtgctgggatcacaggtgtgagtcaccacacctggccaggatcacattattaaaccaaattaaagtttatgtgattggttgcaatatttgtctaattttatatgttttcttcaggaaaactttagaactcaaaaatcatttacagctgattaaatagcaagtaaaatgtacttgtggtcattgccgtataacattaggcacacgcttctaacacttctataatatctagattttatttacctcattttaacttgcaatgtctgtctatctcatgaactctccataaatccaagaactgcctgtagttttcaaaatgacatgtgggtttttactgttatcattgttatttcgatagggctttttcctgattttgggtatacaagttccaaacttgcataataattgctaacgcactaggcgatatctagggccagtctgttaaaggggacctctaatgtagctataagacaggttggtaaagatgaactaacataagtttaagctaataattcagtagttgatgcagtatttcacagtagagcccgagcttactcatttttttcaaaatttggatcctgatactcctttttcagagttcagaactgaactgctcccctaagacctcagaatcttttgcattgagacatatgatctatttataaataaaggttatcaaatatcttgttgaactaattaggttgatcaaattaggatcccaaatattggggtccctgacatctgagcctttatctaaaaatgtttctgtaacataatgacagcctttatgtttgttaattgcctatagtaaagaagcaattttaagcctattctcatttccctctcccctacaaaaaatgataaaagctttccaattacttacatatgctctaacaagtgtctcaggattcattaacagaattttatagagtacagtaattcaaatatagcacagtacagagtttaccaaaaacacataaaactttgctagatagacagtgaggtggaaaggaactaaaatgtatctctcttgaatagcatttggggttcaattgaatttgttgtgtttacaacagcaaagcaccgttagcctggacagttgcttatggcatcgatagggttggataatattctgggatttgttgcagcagaattcctctatctgatgatcagcagttgaacataaacttcataattatagtaaaatttaggaaaaactatgagtgtgaagagtatgaactgattgggtagattaggcagagtgcattatgggcaagacaaaggttttcgatattaacttcttttaaaataaactttttattttcaaacagtttcagttttacagaaaaaatgtgaagctagtacagagaggtctcatttaccccacacccagtttctcctgttattagcatctcacattaatatgtggtatatttgttacaattaataaaacacattgatatgttaatattattaaaaaaaaaaaaaaa

SEQ ID NO: 505 - DNA, 4159 bp, Homo sapiens
acttacaggggaggaggaggcgctgaggcagagagaaaattgtactgtgaggaccttgacagcttcacaggcgggctttttcttttgcctccctatatgcgctagaatatctatttttctcttttacaaactgactatataaaaccacctcttctggcattgcagaaagcaattgactttctcagagccacccggcaggctatcggggcatcctcgaaaaggccagggacaggggcgcaggtgcaccaagagatctggcgaggggtacgcttcctcgagacttggggctctttctctctgcgctctccagacactgaactctgagctgcaaggacaagaacgccaccaccttccctactaaggctctgccacaagcgcatcccagtgaggtgtatccagctgcagccgcctccggagcttcggagcgctcagacctccctccctcgcgcatctccagcctaagggttgtcccacctcgccataacacggggctctcgcgcgggcatcgaggattctcagcttttggcgtcccagtcctgcctctgctcctgcctggtggtgtccccacgcccaggtcctgcggacccgaccacggctgaaacgcgcggctttgccgtctgcgctccagccttcgcctggcagagcgcgcagcccacctagcgtcttctggctctaggggtgcagagggcgcatcccgcctcttcctccgcccccgggccccgctgtcctcccccacctgctgaccagcctactcctgcgtgagctgccagccttttgccttctgtgcgtaaagcatgtcaggctctgggcgaaaagacttcgatgtgaagcacattctgcgactccgctggaaactcttcagccacccgtctccttccaccggcggcccggcggggggaggctgcctgcaacaggacggcagtggcagctttgagcactggggacccagccagagtcgcctgctcaaaagccaagagagaagcggtgtgagcactttctggaagaagccttcctcctcttcctcttcatcgtcctccccgtcctcttcctcctcttccttcaatccgctgaatggcaccctgcttccagttgccacgaggctgcagcaaggggctcctgggcagggcactcagcagccagccaggactctcttctacgtggagtcactagaggaggaggtggtgccaggcatggactttcctggaccacacgaaaaagggctggttctgcaagagctcaaagtggagccagacaactctagccaggcaacaggtgaaggatgtggacacaggctgtcatcaaccggccattcaatgacacctcaaagtgatttggactccagtagctctgaagaattctatcaagctgttcatcatgctgagcaaaccttcagaaagatggaaagttatttgaagcagcagcaactttgtgatgttatcctgattgttgggaaccgaaagatacctgcacataggcttgttctgagttcagtctccgactattttgcggccatgtttacaagtgatgtttgtgaagccaagcaagaggagatcaaaatggaaggcatagaccccaatgctctctgggaccttgtccaatttgcatatacaggctgcttggaattaaaagaggacaccattgagaaccttcttgctgcagcgtgccttcttcagcttccacaggtggtggaagtgtgctgccacttcctcatgaagcttttgcatccatctaactgtttaggaattcgagccttcgcagatgctcaaggatgcattgagttaatgaaggtggcccacagctacacaatggaaaacataatggaagttatcagaaatcaagagtttttactccttccagctgaggagctccataaactactggccagtgatgatgtcaatgttcctgatgaagaaaccatcttccatgcattgatgatgtgggtcaagtatgacatgcagagtagatgcaatgacctgagcatgcttcttgcctttataagactgccactgcttccaccacagatattggctgacctagaaaatcatgcattatttaagaatgatctggaatgtcaaaagctgattctagaagcaatgaaataccatctattgccagaaagaagaactttaatgcaaagtccgagaactaaacccagaaaatctacagtcggaactttgtatgctgtaggaggaatggataacaacaaaggagctacaactatagagaaatatgatctgagaacaaatctgtggatccaggcagggatgatgaatggcagaaggctgcagtttggtgtggctgttattgatgacaaactctttgtaattggaggtcgagatggcttaaagacattgaacactgttgaatgttacaatcccaaaaccaagacatggactgtcttaccaccaatgtcaacacacagacatggtctaggtgtaacagtacttgaaggccctatttatgctgtgggaggccatgatggctggagctatctgaatacagtggaaaggtgggatccacagagtcaacaatggacatttgtagccagtatgtcaattgctcggagcacagttggtgtagcagcattgaatggcaagttgtattcagttggaggtcgtgatggaagttcctgtttgagttcaatggaatattatgatcctcatacaaataagtggaacatgtgtgctcccatgtgtaagaggagagggggtgtcggagtggccacatgtgacggttttctttatgcagtaggaggtcatgatgctcctgcttcaaatcactgttcccggctactggattatgtagaaagatatgatcccaaaacagacacttggaccatggtggctcctttgagtatgcccagagatgctgttggggtctgtctccttggtgacagattatatgctgttggtggctatgatggacagacatacctcaacactatggaatcctatgacccacaaactaatgagtggacacagatggcttccttgaatattgggagagcaggtgcctgtgtggtagtcatcaagcaaccttgacttattgatattttacttggaaagattttacttgctggagtggttatttttatattgaatggcaagaatgagaacttccagagatgaaaactcttcaagaacaaggatctctgtagcgttacctactgatgttgaaagagttagtagatcaaacagaatagtaggaaacaagaaaacattaaacttatacaggaaaaatgtctggccatatgttagttagttcgggaatggttattggtaatttgttttgtattatagcatacaataactagagttaccaaaggcttgttttttcttgagcagttgaaaggagagaccaatatttgtgacatggatagtttcatgaccacaactcattcaatcattttatagtctatggcaatatccaagagattgccaagagtagaagacagaatatttcatctgacagtatctgattggtttactgtttttctaatcatatgtggtcataacgggaagcagaattatgctttattcaaacaaacctgcttctgcctcattttcctaagctatgagaacaattagagaaacagattcatgcttgtatcttgcattcagaaaacaaactgtcctactaatcaaagctgcatatctcatcagagataatggttgaattttattgcaaccatattggcaatctgaaactggcaaacacaaaggattgttttcactaggcttaccattttgctttgcttttttaacacactgagccaaagatgcagtgtaattattgggcttttgccttatgttgagttcagtgtaagcatggaagctagtgattctgaatgatatatatatccattgcatgttgaactcctttagaattttgttcttaaacaaacttagaatttcaaaagaaaaacatatgatccattaagttggagtgtttatgattattgctagaaagaaggcagacttcatattctcatcgcccatttttcaaacttgttacattgatctgtacattattttaagccacatgtttgtaattgtttaaaacaaagtggaaacattacacaatgtccttaataaataggcccatgtaaattttaattacaattaataaatgatcaaaaaatttgcatttaaaaaaaaaa

SEQ ID NO: 506 - DNA, 6806 bp, Homo sapiens
gattctttgcagcctagacagaggaggcaggagccccaggggcgggctaatcgcctgggctggggatgcctgggcagatgcagaggaagctggaaaggtggcagtgcacctgggtcgctggagctgccgccgttcctaggagaccaaggagcagcaagcctgcgggggagggggagcaagtgggttgctgcttttagcagctgaaagggctgcagggagctctgggtaagacattttctgttgctgctgcttttgcggtagaagctgctgcgagtaagtcagaggaaggaggattgagaagggaggaggcttcacttgcagccatgctgaatcactgttgctgatcagatttcccactggtctgctgggagaatcaagaacagaactaggatccccgagtgcatacacagttcagcagctaccaccctggctgggcctcacacaatggagggtgaaagtgtcaagctgagctcccagactctgatacaggctggggatgatgagaagaaccagaggacgatcactgtcaaccctgcccacatggggaaagcattcaaggttatgaatgaactgcggagtaaacagctgttgtgtgacgtgatgattgtggcagaagatgtcgagatagaagcccaccgtgtggtcctggcagcctgcagcccctacttctgtgcgatgttcacaggtgacatgtctgagagtaaagccaaaaagatagaaatcaaggacgtggatgggcagacgctgagtaagctgattgactacatctatactgctgaaatcgaggtgactgaagagaatgtccaggtgctgctcccggcagccagcttgctgcagctcatggatgttcggcagaactgctgtgacttcctgcagtctcagttgcatcccaccaattgcctgggcatccgtgcatttgcagatgtacacacctgcactgaccttctgcagcaggccaatgcctacgcagagcagcactttccagaggtgatgctaggagaagaatttcttagcctgagtctggaccaggtgtgcagcttgatatccagcgacaagctgaccgtttcttcagaagagaaggtgtttgaagctgtgatctcatggatcaattatgagaaagaaacccgtttagagcacatggcaaagctgatggaacatgtccgacttcctctcttacctagggactacctagtccaaacggttgaagaagaagctttgataaagaataacaacacctgtaaagacttcctcattgaggccatgaaataccatctcctccctctggatcagagactattgattaagaacccaaggaccaagcccaggactccagtcagccttcccaaggtcatgattgtggttggcggccaggcacccaaggcaatccgcagtgtggagtgctatgatttcgaggaggaccggtgggatcagattgctgagcttccttccagaagatgcagagcaggtgtggtgttcatggctggccacgtgtatgccgtgggagggtttaatggctcactgcgggtgcggacagtggatgtgtatgacggcgtgaaggaccagtggacgtccattgccagcatgcaggagcgccggagcacactgggcgcagcggtgctcaatgacttgctctacgcagtgggaggctttgatggcagtactggcctagcatcggtggaagcctacagctacaagaccaacgagtggttctttgtggccccgatgaacacgcggcggagcagtgtgggtgtgggcgttgtggaggggaagctatatgctgttgggggttatgatggagcttcccgccagtgtctgagcactgtggagcagtacaacccagcgaccaatgaatggatatacgtggcggacatgagcacccgccgcagtggcgcaggggttggagtgcttagcggacagctgtacgccacaggtgggcatgatgggcctttggtgaggaagagcgttgaggtttacgatcctggaacaaatacctggaagcaagtggcagacatgaacatgtgccggcgcaacgcaggggtctgtgcagtaaatgggctcctgtatgtggttggaggggatgatggatcctgcaacttggcttcggtggagtactacaatcctgtcactgacaaatggacgctgcttccaacgaacatgagcacggggcggagctatgcaggtgttgccgtgattcacaagtccttgtgacccaaactcctactgccaggaggtggaggaaggagcaggtgctgcctgtgactctgaacagcaggaccttggtgactggattcaacttgcttgggagggtctgtgctgctgtgagaaccgctctcctctgacttggcagactggtgttgttcatcgcagtgtggacaccattacccacccccgttcccctgaggtgctctggcctatgccctgagcaaggggggtcttgacatccccaggcagcacctttgggctttgttttggtgtttctacagggacaatacagaccctggagtgtgtgtgtgtgtgtgtgtgtgtgtagaccatggtgtttctctatgtttctctaagttggggggtgagcgtgtgtgacagtctactggatttctttactactgatcctttcgctgtgttaaaaatcaagtcacagagacctctcttctggatttgtcccatggggaccctgagactactaaagctgctttcttctgaaggtccagttggacagtctgggaatgtccagaaataaccagtgagaggggcagttctctggccacacccacttatgtactttaactactgtgactttgtctgcagaagagctggaaaattctcgaagctgcaccgtgtcctctgtgtgctagaataagggacaaatgggttccctgtgcttctcagctcactgtttttccttgagttctcctacaggaagcagatgagaactgcccagtcttcaggtttaggccattggtctttgatgtcatagattccaggcctgggaggtgttatgtctcttcagctgggaaaactagctcttcagagaagcctcgggtaacactgaaaaacaaaacaaaacaaaacaaaaacaggaaaaaaacaaaaaaccaaagtggtaaggattcagttcctgcctataatggtctcagagagggtcctacttttaggttttcccaggacaggacagtccccatttatacttattatcccagtttaattattcacagcaccccattttactcagaagtgttctggtctggaggataaataagaggtcaccctcctccagacccaaagatagatttgtgcctgtgttggatggggtcgtgtgtgattcagatggacattggatggcttcaaaggaatataccactagagctggcccttggcactttgtgacagtggtcaagtctgtctaatgtccttgtcttctttttcttgtgctttccccctattccagggtgtgcaccctctccccaacccccaagaaccccactactgctttccctgtgaggtaggagatatcagtgggccttggatttgaggcttcctaagatgtgcttgcattttaaaaagggagcttggtgagagctttgctaattcacaggtaaaaattattaacaatagaacttcaagcatcttgaggagcgggcatttgagggggcatggagtaatttgtatttaaaaaaccttaaagttgtgctgttcctaaactagcaaattgctcatgctgaaatttctggcataagcaggggaagtcttgtgtctggagaatagtctcataccttgcagtctgggacaccctccctactttgagaatccacctacaggaagccaaggaactttataaatcctgatgttggacttctgatacgactgggctacttccaagcaggtgctgcaggagattggcatcccccagcccctgcagttagaaaccccgaagtcttcccagccagtgagccactttgtgtatttactgtatatttattgtgccctaaatgtgcaactctcctaaagacaaaacttctctttctgatgttaagcacatgttacttcaacaagatgcttggagaacaacaaggtacccagaatttttagaagccttcagaagaggctaaaatatccagctttgggggacctggaagaaatgtctccaaaggaagcaaggcatgttttagttgagtgctctggtctcactatgaagtggggatgactgtggcttcataactctacctggctgtgggttggaagctgatggaatgagaaatgtcctttctccttctctgaggaaattttgagacttgtttcggtgtgtctgtgtgatggggatgaggctggggttgggatctgatgtatgccattcacagaagctctcaatttcagatgataggtgaattccctgcccctcccccaccactgagaagctagactttcatgcgggagaggctacttttatgtgtcgtcttccggggaagggtccctccactgaaagctagccagtcatgttttctgtttttggatttttgcaattggtttcacctcatgtctccctccctacaaagcactgcctctactgggcgtgctgccaaggccatgtgcactccatcctcatgtatcctttttcacggggaccagaacactggtacgtcatcaccaaagccaatctgctctagctgcccacagatgccaccaaaacctgctatctcttcatcaccaggtacgattctctttccacagtggacacagcaggctattttctagtttgtgctggtcacgtggtagatgaagcctcttactgccccacttagggtggccacggctgcttgtgaatgcagctttgccagtggcatatctgtcatctgattgcggtggtgaaatggaattgaggcccaaggttagaagcagccgagacgccacttggatactgatttgaacaatgtagaagtcagattctgaattccaaagttatttctcataagtacccaatggcatctctccatctacaaagttgcagtattatgcaaataaaactgacctcattttctgctatgcaataagaatacttaattctagttcccgacaagccagttgcaatatcccctaagatgctttttgagctgtcttactttgatatctgttgtgtaatgtttgtatatttctgagccagatcctttcaaagattgcctttttataaaattgaagctatagcttttaggctaaaattttaacgtagatatttttataagatatttttttcaagagtttgaatcgctttttattgtccatgataatgaaatgttgtgttctttgcatcattcactctcaaacgtagttcatgcctgtagctctcttccttttgtttctcacccttcagaaacatatttttcagtagctccaggtagatgagccttttttttttttttaaaaataccatattcaagggagtctgctgaattttaaaacgcagtcactggtgtttcttgaattgctagggactgatgttatgttcgactcagcacttgcccgtctgtattgattgtgtctttttttttttttttggagtctgctttctgtgggggtgaggccgggctgtctcgtggtggctcccactgacgggcactgagcctggtaccctgtggcatggagaagcctcagggaaaggcctgcccccccagcacatactcccatagtgtcctaggtccagccgaccattccttattctcttctatctccttgttgatctgaagcttccaatagcttgaggcctttgctgctggatgatgccctttttgggagcatcttgtctctaacctttaaaagaggggtcaatcctcatgatccctgtgtgttaagcatatgctttgcaggtgctcacactacacttacaacttgcttcttgagctatgtctctactccaggctctgttttgtgtatttatctgccatttgcatcatggtttttaaaatttattattattattattattgttgggacaggtgccatttaaattgcctccatgctccccatttgcacctagctggatcaagttgggaggctgagcaaactcatattccagttagttggagtttttaaaggctctgtttgcctggagaagcaaggaggttagaatgtaatttttttaagcgtttgcactatttagagtcctaagcccctcatgttcagctgtgctgtgtttctactgaccaagcaggagagccagcagcacttccagcatttgggaatggaagagatttcttctgtagtggataattacagcctcatagcccctgtgcagccttcgtcatgggactcagtgactcatggatatagcatcagccatggcaggaatgcacaggactgtggcatttgcagcatcaaatcaccctagtgccatgtttggttatgagattgtaaattattcgctcccccatcctcccctcccctcattttcagtggcaatagaggacccttgttgtacttcttgtttaatttgcatattatgtgtaaaatgctttcgttgaaagaaaactgaagacactgaatgtgtatgtctgtgtgggtgctctgtccctgtggttgtcatagccagtcagacttgatcactgacaccccgtacaacatattgcataggtaagatcctcgatctggtgttctctgcgtggctgttagggactgtatatcttgtaaaagaacacttgtcacatgcttgatcagttacagcaatagctgaagaaacatttcctcaaatgtattattttaacaggaatcatgttctaatttcccatcctttaattttaataaaagctgaactgtgtgaa

SEQ ID NO: 507 - DNA, 5880 bp, Homo sapiens
gctagaaggctacaagtattcacagtgtatcataggcagtgggggaggggagagaaagcaagaaagactgctctcggcacttgtgcttttgttagttctacagaagaggcagaaaaacaagagataacaaaggctccgtttcctttctgtgagagaaggcttttgtctttcctcctgctacgatgtcagtgtctggcaagaaagagtttgatgtgaaacagatcctaaggctacgctggaggtggtttagtcatccttttcaaggttccaccaacactggaagctgtcttcagcaggaaggatatgagcatagagggaccccggttcagggcaggttgaagagccactctcgggacagaaacggactgaagaaaagcaacagtcctgtccaccacaatatactggcaccagtgccaggaccggcccctgcccatcagagagccgttcagaatttgcagcaacataatctgatagtacattttcaagcaaatgaagatactcctaaatcagttccagagaagaatttattcaaagaagcttgtgagaaacgcgcacaagatttggagatgatggctgatgacaatatagaagattctacagcaagattagatacacaacactctgaagacatgaatgccaccagatctgaagagcagttccatgttataaaccacgcagagcaaactcttcgtaaaatggagaactacttgaaagagaaacaactatgtgatgtgctactgattgcaggacacctccgcatcccagcccataggttggttctcagcgcagtgtctgattattttgctgcaatgtttactaatgatgtgcttgaagccaaacaagaagaggtcaggatggaaggagtagatccaaatgcactaaattccttggtgcagtatgcttacacaggagtcctgcaattgaaagaagataccattgaaagtttgctggctgcagcttgtcttctgcagctgactcaggtcattgatgtttgctccaattttctcataaagcagctccatccttcaaactgcttagggattcgatcatttggagatgcccaaggctgtacagaacttctgaacgtggcacacaaatacactatggaacacttcattgaggtaataaaaaaccaagaattcctcctgcttccagctaatgaaatttcaaaacttctgtgcagtgatgacattaatgtgcctgatgaagagaccatttttcatgctctaatgcagtgggtggggcatgatgtgcagaataggcaaggagaactggggatgctgctttcttacatcagactgccattactcccaccacagttactggcagatcttgaaaccagttccatgtttactggtgatcttgagtgtcagaagctcctgatggaagctatgaagtatcatcttttgcctgagagaagatccatgatgcaaagccctcggacaaagcctagaaaatcaactgtgggggcactttatgctgtaggaggcatggatgctatgaaaggtactactactattgaaaaatatgacctcaggaccaacagttggctacatattggcaccatgaatggccgtaggcttcaatttggagtcgcagttattgataataagctctatgtcgtgggaggaagagacggtttaaaaactttgaatacagtggaatgttttaatccagttggcaaaatctggactgtgatgcctcccatgtcaacacatcggcacggcttaggtgtagccactcttgaaggaccaatgtatgctgtaggtggtcatgatggatggagctatctaaatactgtagaaagatgggaccctgagggacgacagtggaattacgtagccagtatgtcaactcctagaagcacagttggtgttgttgcattaaacaacaaattatatgctattggtggacgtgatggaagttcctgcctcaaatcaatggaatactttgacccacacactaacaagtggagtttgtgtgctccaatgtccaaaagacgtggaggtgtgggagttgccacatacaatggattcttatatgttgtaggggggcatgatgcccctgcttccaaccattgctccaggctttctgactgtgtggaacggtatgatccaaaaggtgattcatggtcaactgtggcacctctgagtgttcctcgagatgctgttgctgtgtgccctcttggagacaaactctacgtggttggaggatatgacggacatacttatttgaacacagttgagtcatatgatgcacagagaaatgaatggaaagaggaagttcctgttaacattggaagagctggtgcatgtgttgtagtggtgaagctaccctaaagctatctatctttatcaaatggaatgaaactagataatttcaagaaactgagtaggacaaagggagaaagaaatacatgttctttttcctgcaattaataatcagactggaaaattgttgtatcattttaatttgtagttacaattgctttcattcgtgaagccgaaacgtttttaaacatgaattacatatgaattattaagcatatgtgctttcgcagctgataatataaaaggaaatcccacagtctagatatagccccattactacaaaatgctaaaatatttaatgaaaattgatggtggccacagtgtgcaggttataaaagcattaatacatttcaaggtaagagccttaaaagttaaaaacattttcagtttttttttaaaaaacgtactcttattatctggaacatagaaatataaaaggtaacatctaaagcttagaatagtgtgatttttagtaagccattattctcctattcaaataatatcccaaagagctaaacaattccttacatttaccaagaggaaagcttttactgtgttgaagctaaaaaaataatggctctttgacaaaacttgttatgttgatcgcggtatgtcaaaatttttacaggtttgctcatctgccagagcacacatataaatttggtatttcttaacatattatcttgttagatttgttaccagtaaaatattactgtaatttcatatacacagtctatacaatgaaataatgaatatttatcatattgatacaaactgtgacctcagcttcagagtgtcagggcctcacttgtatagaatgtaatgttctcctcaaacatttatgttaactctataaacaaatatcgttaagttaaacaagttttcaaaaacaaaacaatttttaaagtaccttaaaattgaggatgttactcagtgttaacacatgggaacaccaaaatattcaataagcctggtcaattctatagttatcttttttgtaccaacacatgcttttctgttactgttatattatccagtagaaaatgttaggatatgtgtgctatataaaaaaaaaaaaagacttgttaagttttaaaataacaaaaatggctagttgaatagtattttatgtgtaattcttccatttattctgtttaattatacaactaagatgaaatattgaaaaaccctttgtgaaagtaacttttcaagtaaatgcacaactttagaatttctacaaataagttcttttaaacagtctttttattgtggattgtgaaatcaaaatctggagaaatgcttataaaatatactactagcttttaagttttaagaaagaagaacgtaagttgtacaaagatatttgtactttgacaaactgaatttaaataaactttatttcctctcactatagtgtggctttagaatatatcaagtacaacctgaatggactttttgattttacatttcctatatcactaaaatacttaaacacaaaaataaaattccactcctttatttcttcttacacctgccattgtctctaattctaaagagagagctatagatttctgcagttctagaggtgaagatagagacatagagaggctgtgaaacacacatacagccctgttaggtcttttgaattcacaccttattgaaatcagtgtagaagtagagttacctaaacctttatcgccaatgcacagcttggcctgttaagttaaatgtgggtgtcaaccagtggaaaagatcaaaggaccttttgcagcctagcttgccaatcttccagtaacaacgaggtgctaccaataggcagactgtgtctagagtcatgcatggacaagaggaaagtgaaagttgaatactctcttctcaatggcatagctggacttgattaagtattgactcatagaagagacatgtatgtttcccggggctaccccttcatagctgcatttaaaaatggtgttcaggccactatggctgctgtggtttgaatatttttttccctcgaaaactcatgttgaaacttaactcctaatgtagcagtactgagaggcagggcccttaagaggtgattgggccatgaggtctgtgccctcctgaatggattaatccattcatggattaatggattattatgagtgggggactggtgactttatatgaaaaggaaggaagagtgacctaagctagcatgctcagggtgcaccgtatgtcccctggtcatgtgatgctatgtgttaccttgggacttacctgacagctcttaccaacaagaaggccatcccagatatggcctctcaacctcagacttctcagcctgcctaactgtaagaaattaattctttttctttataaattacccaggttctgttttaagcctcagaaaatgaactaagacaatgccctagatgagctgccaaaatctgagcagatatgagccatcagaatagagacctgcagaggcccagggcactcaaacataactgtgcttgtctcagtcaaacttaattgggaaaaggaggagtaagagcaggccctttctgacatgctttagcagagataacttatcagggctagtttaaacaaatgtgtataggaaaggatgttatttatatattcttacaagagtgtaagggctcacacatttactgtactcagatctgaaagacaatgttgcttcttgatttttttctataatcactatgaccgtgttcacgattccctactctgcaactctcagcatgcatcatgatgattctctaacactgtctgtcaccttcctgtatttccacagagcatgcaagaacttctacaaaacttctataccacacagaagctgaaagagactctggggcactaaattcagatcctttctccacacagcaatgacatttatcaatctgactcaggtgtggctgttgcccctttttgatatggagggaacactgaaagacagtttccttctggagttccaaatgcaatatagaaaaaaaaaccctgtgactctggattttattttaagttctctaacaagactcctaccttgagatcttagtctaggtaaagaaaaaaaaaaaaaggtcatgaaacacaaatgtcctcaactgtcatcattctatgtttactttctcccaatcacatcacctgaggtagaagagatttttcagttgctatttctcttcgtaatgaattttctttacatcctgtccacactgctggagatactaagtcccaacctaaatgatggaaggagcatctcccctcttgtctgtggaagatatcacatgaactacctaattttcaagcatggatctccatatttcaaaggaaagttttaaaaatgtttttaaaacttcaaatatctcaccacagtgaattatgggtaaggtgataatatgtttaattagcttgatttaatcatcccacactgtatacatatgccaaaatatcattttgtatgccataatatatatgatttatgaattatagtaatattaataaaagtgttaaagctttaaaaaaaaaaaaaaaaaaaaaaaaa

SEQ ID NO: 508 - DNA, 7728 bp, Homo sapiens
actgcaacggggatagtgttttctgtctctgtcatttgtggtttaagaaaaagggggtggtgttctgcatttgaaaggactttaatgaatgctgtcagtgtttgtgagacctaatggtcagtatgggaaaggagagccgggaaagtggtctagctgcttcaggataggtggatgagagtttgctctgattgaacggaatgttccaccgtgtttcatctttattcattatcctttgttctttaaaatctgatatattggcataaaagtaattgtagatatatatatgaatgtgatttattttcctttacatatttttgttgtgtacagcagggcatatacttctcttgtcttggttggatgcacaaatctgtgtgcagtgctttttgcccgttgcctagacgatcacttggtttctctgaggatgtctggttctcgtaaagagtttgatgtgaaacagattttgaaaatcagatggaggtggtttggtcatcaagcatcatctcctaattctacagttgacagccagcagggagaattttggaaccgaggacagactggagcaaacggtgggagaaagtttttagatccatgtagcctacaattgcctttggcttcaattggttaccgaaggtccagccaactggattttcagaattcaccttcttggccaatggcatccacctctgaagtccctgcatttgagtttacagcagaagattgtggcggtgcacattggctggatagaccagaagtggatgatggcactagtgaagaagaaaatgaatctgattccagttcatgcaggacttccaatagtagtcagacattatcatcctgtcatactatggagccatgtacatcagatgaatttttccaagcccttaatcatgccgagcaaacatttaaaaaaatggaaaactatttgagacataaacagttgtgtgatgtaattttagtcgctggtgatcgcagaattccagctcacagattggtgctctcctctgtctcagactattttgctgccatgtttactaatgatgtcagagaggcaagacaagaagaaataaaaatggaaggtgtagaaccaaattcgttgtggtccttgatccagtatgcttatacaggccgccttgaattaaaagaagataatattgagtgcctgttatctacagcttgccttcttcagctttcacaggttgtagaagcatgctgtaagtttttaatgaaacagcttcatccatccaactgtcttggaattcgttcttttgctgatgcccaaggttgtacagatttgcataaagtggctcacaattatactatggagcatttcatggaagtaatcagaaaccaggaatttgtattattaccagccagcgaaattgcaaagctcttggctagtgatgacatgaacattcctaatgaggagacaatattgaatgcacttcttacttgggtccgtcatgatttggaacagagacggaaagatctaagtaaacttttggcttatattaggctacctcttcttgcaccacagttcctggcagacatggaaaataatgtactttttcgggatgatatagaatgtcagaaactcattatggaagcaatgaagtaccatttattaccagagagacgacccatgttacaaagtcctcggacaaaacctaggaagtcaactgttggtacattatttgcagttgggggaatggattcaacaaaaggagcaacaagcattgaaaagtatgatctccgtacaaatatgtggactccagtagcaaatatgaatgggaggaggctacagttcggtgttgcagtgctagatgacaaactgtatgtggttggaggaagagatggactgaagactttgaatactgtagagtgctacaaccccaaaacaaaaacttggagtgtgatgccacctatgtccacacatagacatggccttggtgtggctgtactggaaggtcccatgtatgccgtaggaggacatgatggctggagctatctgaacacagtggaaagatgggaccctcaggctcgccagtggaattttgttgccactatgtctacccctaggagtacagtaggtgtggcagtactaagtggaaaactttatgcagttggtggtcgtgatggaagttcttgtctcaaatcagtagaatgttttgatcctcatactaataagtggacactgtgtgcacagatgtcaaaaaggagaggtggcgtaggagtgacgacctggaatggactgctgtatgctataggggggcacgatgctcccgcatccaacttgacttccagactctcagactgtgtggaaagatatgatcccaaaacagacatgtggactgcagtagcatccatgagcatcagcagagatgcagtgggggtctgtttacttggtgataagttatatgctgttggggggtatgatggacaggcataccttaatactgtggaggcttatgatccccagacaaatgagtggacccaggttgctccactgtgcctaggaagagctggagcttgtgttgtgactgtaaaattataatttagtgccccgttttctacatgaagacaccgtcttcctttattaatttagtataattattctatcaatggatacatttttagtaaatgtgcattgtcacaatcctgggcacaaagtgcctgatgtcaaaatgaagatagtaaaacaagggaggaagcagtggatggaccaggattaattcctttcatttcttagtaaattaaaacctgcagctggtggattgtgatcacacattcccgaagtaataagtgaggacgaatgcactgctctggaacataacccagtgctaactgggggtttcatttattcagtcaagcacatcttactcacatccagatttattttcctacagtgcaaacacaccagatgaaactttaaaatgttactttttgtaagcttatcataaatgagttgcagtaatttgtttgcttgtttgtttaaccacaaccactattttaatgatatactaaagataacactatttagttttttcagaaacatctgcattatatgtgtgttggttgtggattttgtttctaaaattggcttagtccaataaataaagaaaagcattaaggacttaaagcaacaataaccaaataaaaacttgataggatctttgaagtctatttaaatattcattccattacatctagactcaccaagaactacatgttatgatgttaagttgaagttgaaacatgatgttttgcattaaatttaagatatgcaaatttatgtagagaaaataaatgttatataccctataatctttcacctaattagtatttaattatatggatttgttttatattataaaagatgttttgattttgtcttttgatattgacaaaattgtttggatatccttatgttctcaagtctgtatctgcctcccctgccttatttcttatgttttgccacagttaacccattgtgcttctttgtaatcaaacagtttgtgggagaatgggcttattgaatgtctaaaaaataagtttaaagtgtttgttaccctaagttttttacatttttaaactctaattacatatgtgaatgttattactctcagtgaattgttattgtttgcaaaaatgcactgggcagtaacattttgtgataaatcctataagatataagtcattgagatgtctaagatgctttttattttaaccccagttaataaccaccttacggaaaataatatttgctaatattgtttattgtgaactaggaatcaaagtttttgtatgcatcaatgcacttaatccttataacaaccttatgaggtagttctattccctttttatagctaaggaaattggggtacagagaagttagccccaaggttatatattgcaagtaagtggcagagcagggattcatacaaagaccttctcactcagcagtcttcactcttactattcctgccactaggtagaaaaagaaagatttcggccgggcacagtggctcacgcctataattcccagcactttgggaggctgaggtgggcggatcacgaggtcaggagatggagaccatcctggctaacacagtgaaaccccgtctctactaaaaataaaaaataaaaaaaaattagccaggcgtggtggcgggtgcctgtacgcccagctactcgggaggctgaggcgggagaatggcgtgaacccaggaggaggagcttgcagtgtgccaagatcgcaccactgcactccagcctgggtgacagagcgagactccatcaaaaaaaaataaataaaaaaaaaataaaagatttcattttatgtgaggaattattttaataaaaaaaagagggtttatgctctatagtaataaaatttaccagtaacacccaatcagaaaattttggttccttagtatttagggaagacttttgtttaaatctcttatggaattttacatgttttgatttagaaaagtagatgcaatataatatatttcaagttttatacatattagatgaattgcatggtattttaggcaacttaactataaacaaatttattcatagaagcattgttgccaacaatttagatgacctcgatgaaaaaacacaccaattgacaaaactggctcaaaaggaaataaaaaatccaaacagacctgtaacaagtaaagagattgaaccagtaatcaaaaatctcccaacaaagaaagtccaggactaaatgagtttactggcaaactatgccaaacatataaagaagaattaacactaatccttctcgaactctcccaaaaaatggaagagaaaggagcaccctgtgacattctataaggcggacattaccttaacaccaaagccagacaaagacctcacagggaagctacagaccaatatcccttatgaatatagatgcaaaaaaacttcaaaatactagcaggccaaatccagcagcttattaaaatgatcacacagcatgaccaagtgagatttatcaaagaaatgcagggatggttctacatacaaatgtcaatcgatgtaataatataccatattaatagaatgaaggggaaaaaacagcatgatcacctcaattgataagaaaaagcatttgacaaaaatccaacaccctttcatggtaaaaacactctgcaaactaggaagaaaagggaactttcttaacctgataaagacatccataaaaacccacagctaacaacataatagcaaaacattgaaaatttttcccctaatatcatgaaaattcctgatttccccactgctattcaacattatactagaaggtctagccagagcaattaggcaagaaaaagaaataaaatgaatcccaaataggaagaagtaaaactacatttgcagaaaacatggtcctatatattaaaaatcctaaagaatccacaaaatgattccggctgattttaaaaattcagcaatgttgcaggttgcaagatcaacacacaaaagtctaagaaaaacctgaggggaaattaaaacaatttcatttacaataacatgaaaaagaataaaatacttagaaataaatttgaccaagaaagtgcaagacttggacactgaaaagtacaaaacgttgctgaaagaaattaaagaagacctaaataaatggaagacatcctgtgctggcaggttggaagacttaacattgttaagatggcattactcccaaaattagtctatagatttaatacaatccccattaaaattccagtgacccttttacagaaactgaaaagctgaccctagaatttatatgggattgcaagttactgaaggtactcaagtctgttcaaaacaatcttgaacaagaataaagttgaaggactcacattttccaatttcaaaatttactgcaaagctacttcaatcaaaacagtgttgtgctggtataaaaatatataaagcaatagagtagaatggaaagtccagaaacaaattacgccaatacactatggtcaattgatttttgacaagggttccaggaccattcaatgaagaaagaacagtgtcttcaactaatagtgctaagacaagtgaatattcacatgcaaaagaatgaatttgtacctgtacttcataccatatataaaaattaattcaaaatagatcaaagacctaaatgtaagagctaaaaccataaaactttgagaagaaaatacaggaataaatcttcatgaccttggatttggcaatggtttcttagatatggcaccaaaagcacaagcaacaacagcaaaaaaaaaaaaaaaaaaaaaaaatcaaaattaaaagcttctacatatcaagggacactatgaagaaagtgaaaagacaacccacagaatgggagaaaatatttgtaaatcttacatatctggtaaggaactaatacctagaatatataaggaactccgatgctcgacaacaaaaagacaaaccaattttaaaatgggcaaaggacttaaatagacatttctctaatgaagatatacaaatggccgacaagcacatggaaagcactcaacctcatcagtcattatgcaaatcagcgccacaagaagataccacttcacacctattagaatgacgaaatagacctaggatctaaacctacaggaaaaaaaatgaataatagagaaaataaatgttagagaggatgtggagaaattgaaaaccttcattcgttgttggtgggaatgttaaatggtgtagccactgtggaaaacagtttggcagttcctcaataagttaaaaaaaagaattaccatatgacccagcaagtccactcctgggcatatactgaaaagaactgaaaacaggtgttcaagcaaaaactttcacgcaaatattcattgcagcactagtcacagtagccaaaaaagaggaaacaacccaaatggccatcagctgatgaatgaataaacaaattgtggtatctccacacggcacaatagaatattcagccataaagagaaatgagggactgatacatgctaaagcatggatgagccttgagcgcatttttgccaagtgaaagaaggcagacacaaaaggcaacgtattgcatgagtgcatttatatgaaatatccaaaataggcaaatccatggagacagaaagcagataaatggttgtaagaagctgagagaaaggagtggggagagattgctaaaaaggagtttccttctagggtgatgaaaatgttctggaactacttattggggatgattgcacaacatggtgaaggtactcaatgtcactaatggtaaatttcacatacactttaccataatttttaaaaagctttattagctacattatgttatgatacttaaatgtcataacaatagcattctgtacgcttcactaggataaaaacttcggatttatatgcatctggaagagaaatttttcactgtaatttgcaaataaatgaatttctaaaaatctaacagaaaggctcttaaatcttaatttcaacctaagaagggagtgagaaacaacgagaaccatgaggggagagttaacggggaacttccccaccgtccggtacatggcaggcattccacaaatgttttctgaaagttgaaatagacatcttttcatgaactctgtaatatttgaaattattgataactcttacacaaaaacaaatattcaataaaatgatatttaatttcactgtgaaaaaaaaaaa

SEQ ID NO: 509 - DNA, 6320 bp, Homo sapiens
aatccgctcagctcctgcaatggggcctgcctgacacttgggcgctccttcagtctcgatgttgatggcaggacaaaggggcgcctggaccatgggtgatgtggtcgagaagagtttggaagggcccctggcaccttctacagatgagccctcccagaaaacaggagacttggtcgagatcttaaatggggaaaaggtcaaatttgacgacgcgggactctccttaattcttcagaatggcctggaaaccctgcgaatggaaaacgctctgacagatgtcatcttgtgtgtggacattcaggaattctcctgccaccgcgtggtgcttgccgcagccagcaactatttcagggccatgttctgcaacgatttaaaggaaaagtatgagaaaaggatcattattaaaggggttgatgctgagaccatgcacactctgttggactacacgtacaccagcaaggcgctgatcaccaagcagaatgtccagcgggtcctggaggctgctaacctcttccagttcctgcggatggtggatgcctgtgccagcttcctcactgaagccttgaacccagaaaactgcgttggaatactgaggctggctgacacacactcgctggacagtctaaagaagcaggttcagagttacatcattcaaaactttgtgcagattctgaactctgaggagtttcttgacctgcccgtggacactctgcaccacatcttgaagagtgatgacctttacgtgaccgaggaggctcaggtgtttgagaccgtgatgagctgggtccggcacaagccatcagaacgactctgcttactcccctatgtcctcgagaacgtgcgcttaccgcttctggacccgtggtactttgtggagacggtggaagcagatcctctcatcaggcagtgcccagaggtcttcccgctgctccaggaagccaggatgtaccacctttctggcaatgagatcatttcggaacgcaccaagcccaggatgcatgagttccagtctgaggtgttcatgatcattggcggctgcacgaaggatgaacggtttgtggcagaggtgacctgcctggaccccctgaggcgcagccgcctggaggtggccaagctcccgctaacagagcatgagctggagagtgagaataagaagtgggtggagtttgcatgcgtgacattgaaaaatgaggtctacatctcaggtggcaaagaaacacagcatgatgtttggaaatataattcttcgatcaacaagtggattcagattgagtatttaaacataggccgctggaggcataagatggtggtgttgggtggcaaggtctatgtgatcggaggctttgacggcttacagagaatcaacaatgtggagacctacgacccctttcacaactgctggtcagaggccgcacccctccttgtccatgtcagttcctttgcagccaccagccataagaagaagctgtatgtgatcgggggagggcccaatgggaaactggccacagacaagactcagtgttatgacccttccaccaacaagtggagtttgaaggcggccatgcccgtggaggctaaatgcatcaatgcagtgagtttccgggaccgcatctatgtcgttggtggggccatgagagcgctgtacgcctacagcccgctggaagacagctggtgcctggtgacccagctcagccacgagcgggccagctgcggtatcgcgccctgcaacaaccggctctacatcaccggcgggcgggacgagaagaacgaggttatcgccacggtgctgtgctgggaccccgaggcccagaaactgacagaggagtgcgtcctgccccggggcgtgtcgcaccacggcagcgtcaccatcaggaagtcgtacacccacatccgcaggatcgtgcccggagcagtgtctgtctgacggcaggatggggagctggagagcccccccgaccctcagcgtacccgcctcacctctcaccctcctccagtcccacttcaggcagcaggctcgagtttgaggccatacatcaggggatccccttgactcactttgggggaaccttggaagtcacagtttggggtcacttgagaccggccaggaatgtttgcatgacctacctcaggaggggaggcgaggaagagtaatatttagcattcaggacccacccaccctatgccggcttctgtgccaggcacttccttttatcggttcatttaacctggtgactggctcttatcacttctagtttacaggtgagggaaccaagtttcacagaggctaagtggcgtgcccctgatcactcagatagcaagtagctaccccaggagtctaaaatccaggtctttcatctccgaagtcaatgctctttccaccatgctgcctatctcagagcaggaaaaacaaacaaaaaacaacaacaaaacctggctcttgctgggcgtggcggctcacgcctgtaatcccagccctatgggaggctgaggcgggcggatgacctgaggtcaggagttcaagaccagcctggccaacatggtgagaccgccccgtctctactaaaaatacaaaaattagccgcgtgcagtggcaggcgcctgtaattccagctactcaggaggctgaggcaggaggatcacttgaacttgggaggtggaggttgcagtgagccgagatcgccacactgcactgcagcccgggaaacaaaagtgaagctctgtcttcaaaacaaaaacaaaaacaaaaacaaaaacaaagaaacctggctcatttcttgtttcggcaagtctgctaaaagattcactcagcacagcagggaaataaaggtgtttcctgctttctttccttttctttcttattctgcatcctccctcgtccccgccctttaccaatatttaaaccaaggagtcatttgggctccttgccaagaacatctcataggttcttccacttgaaaggtctgggggatgggcttgggaaggcctgtttgctttgaaagagatgaaatacttgtgttctgtcctcctcccattgaaaccctcttttttttttttttgagatgaagtcgcccaggctggagtgcagtggcatgatctcggctcactgcaacctctgtcaccctggttcaagtgattttcctgcctcagcctcctgagtagctgggattacaggcacctgccaccgcgcctggctaatttttgtagttttagtagagacggggtttcaccatcttggccaggctggtcttgaacgcctgaccttgtgatctgcccgcctcggcctcccgaagtgctgggattacaggtgtgagccactgggcccggtctttttttttttaaatgatcataagatggcccattttggaccggaactgtcattgccagacagaattgtacctttagcacattctggtgccctggcctcttagtgttcaccagttgtactgcaatatagacaagatgtctctagagactcaaactactgttttattaaaaaagtaaacacctgagcacagctggcctacacaggagcgacagattctccttgatggtacactttctagtttttacacagtgatttaggtccacgttcctgataccccatcctcctgaagccttcgttttcaagacttttaaaaagcacttctacttggttttttgatcagtgtagctcaattgtgacttaaagaacagaatctgtccttcactgtaagagctacagctttcaaatgagctcactggaaattcattctaatccccaagctggagaaacaggttaagagatcctgtttcatatgctgtatttaaaaagcaacaatgataacaacatagtaactgcgttacccaatggactttattttcatcatatgatttcaattctctttatagagttttatttcatatccggtgtggcttgttcttttcagcagtttgggaagttagttattagagttgatagtgaattgaattttcattaaacagtcacggttagaagaagctaatatttgaaacagattttaaaaacttgaaaaattacaggtgagatttctgtttatgccagattattgaagataaatataaatgtatgttggtgtgtgaaatgctctgtgccttagaagcgtgacagttcagctctctgctgtggaaagtaacacagggcaatagaaacatatttgtggaattttagaacaaactattgctgactcatgagcactataataaccatcaggaagctcccaactgaagcaatgtaacagtgtaatctagttcaattcagcaaacattcatggagttcttcatgtctgtcaagccttgaggacacccacgaatggcaaatctccacgctagacactcaatacaggtaaataggccaccagttaatattcttgtttttattttcttcaagttagctaaaaatgagatgcgtatgaagtgaggaggctggatccaagtcttgattgcctttcagggggtcaaggtggtaagctgtgcagtgaagtcaaccagtggccatggcttacatgtttgtctctttgagatcgccaccagaaccatttgtgaactgatttgtgaaggaaaagtcagtcttactccaaagactattgcagggaggaacttccagagaggaaatccaatgacaatggtactggcatacacagggagcctcccttcaaaaagacagcgcccctagtcagggaggggatggcggtcctttgataagacccataggcaaacttcgagcccatcagcaggtcaaccctatgctgggaaagtgaggatttgggatttctgtgctataaacctgattctaaatgtaggacccaagtttctggactacttcagaatacctaaatgaatcatggaaacactctttatgattttttacaacaccagatatgcaggtgaattgtggaaaatgtcatgtagctgacactcaagaaatagggattcctaataatggcatgggtagggaacagatacacctggttagaaggtctagggttctgtatatgaagctgccagtctgtagctcttcgagaaagaaagttcaagtcatttgggggaaacttaagaatagtcatcagggttttagcttctaggcaccagccaaggatgagaacttctaaaatctaaaatccatttcaagaaataaagacgaacacatttgcaggaaggtaactgttataacccacaccatcagcagggggaaagccaagctgagaataaacccagagacaaagaaccctcggactcaggcaggacatggcaggatgttctggcacagcagactggagactgaggcagggcctgtgagtggacagagcacccctggctgggaagaagaagatggggtaggaggaggtcaggttccaaggatgcaggtctggaaaatgatatcggaggccctggagtttgtgagcttggctctagtcccaagaagggtgagggagaataagggtaagggagtattctaggcaaggaactaaggaaggaatccccttcttagagcagaggcacaagttagagcaggcccagcatttgggccaacttactgtggggcctctgagctgctcagctgggtctcctgtcctagagggaaggtggcccagagtctttggtggagcggaatctgtagatgaggttaagggactccagttgccaaggttgatctgaaacaggcagggagctaagctcatcagaacaccaacagattcatgttctcgtcttagctttcatctattctggtctcaatggcttcgggaaacacacatatacacatacaccatgcccttgaactcaaagcaaactacgctctcagggaaatacaaatatcacgttcttatagctgtaaagtatagcttagctatttatagaagactatgaggtactgttgtgagttatttgcttatcctgttttattctgaaaaatgaaagtgctcaatagaatttttaacgttggcaacaccataaggatttcttatgttaagtcccaacttggggttgcaaaatcattttttcccttaatacctgggtgttgtattagatctcataatttgacaagttaaccttttagaaatccacatatatctcaaatctggctactgcaaaaccagttttgacaggtcagattttcatatgtataggtataaatagccaacactcagtgaacaaaatcctttaagcattttggttacataaagttgtatgttttaagtgatcaaactaagaatattgtttataggttttaaaaaccaaaccaataaaatttttatttattcaataaaatatgcacagaacagatgcaaatgtgttatatacaa

SEQ ID NO: 510 - DNA, 4576 bp, Homo sapiens
cgcgcggggttggtgaggttccgctgagggcggccggggctctgggagcgtggtaacgtggctgcaaccttagcgacatcaggaagaacagggtcgaggatcgagtcacagcaaactgtacaatggcagttgagtgggttttgaaaaacgtctgaattgtagtgtctacatctaccttctgccttctctctaccctttgaaaaaaaataaatggcatgtttgagaagagagctctattaaaagaggaatattgcaaatggcttcagattctatgagtagtaaacaagctaggaatcacattacaaaggggaaaaggcaacaacagcaccagcaaataaagaacagatcctcaattagtgatggtgatggagaagattcctttatttttgaagcaaatgaagcttggaaagattttcatggttctcttcttcgattttatgaaaatggagaactctgtgatgtcacactcaaggttggctcaaagctaatctcttgtcacaagctggtattggcttgtgttattccctactttagagccatgtttctttctgaaatggctgaagccaagcaaacgctgattgagattagagattttgatggtgatgcaatagaagacttggtaaagtttgtctattcttcacggctcactttgactgttgacaatgtccagcctctcttatatgcagcctgtattctgcaggttgaactggtggctagagcttgttgtgaatacatgaagttacattttcatccctccaattgcctggcagtaagagcctttgcagaaagtcacaatcgaatagacttaatggacatggcggatcagtatgcctgtgaccattttactgaagtagtggagtgtgaagactttgtaagtgtatcaccgcagcacctccataagcttttgtcctccagtgatctaaatattgaaaatgaaaagcaggtctataatgctgccatcaagtggcttcttgccaatcctcagcatcattccaaatggttggatgaaacacttgcacaggttcgcctgccattgttgccggttgattttcttatgggtgttgtggcaaaagaacagattgtcaagcaaaatctaaaatgtagagatttactggatgaagcaagaaattaccaccttcacttgagtagcagagcagtacctgactttgaatactccattcggactaccccaaggaagcatactgctggtgtgctgttttgtgtaggtggtcgaggtggatctggtgacccctttcgcagtattgaatgctattctatcaacaaaaacagttggttctttggaccagaaatgaatagtcgaaggcgacatgtgggtgtaatctctgtggaaggtaaagtgtatgcagtaggtggacatgatggaaatgaacatttagggagtatggagatgtttgatcctctcactaataaatggatgatgaaggcatcaatgaacacaaagaggcgaggaattgccttggcttccttaggaggcccaatttatgcaattggagggttagatgacaatacttgcttcaatgatgtggagagatatgacatagaatctgatcagtggagtacagtggcaccaatgaatactccccgtggaggagttggctctgttgctctagtaaaccatgtttatgcagtaggtggcaatgatggaatggcttctttatctagcgtggagagatatgatccacatctggataagtggatagaagttaaagaaatgggtcagcgaagagcaggcaatggagttagcaagcttcatggttgcttatacgtagttggtggttttgatgataattctcctctgagttcagttgagcggtatgacccccgaagcaacaagtgggattatgtggcagcacttactactcccagaggtggagtgggaatcgcaacagtgatgggcaaaatctttgcagttggtggtcataatggcaatgcatacttaaatacagtagaagcgtttgatccagtgctgaataggtgggagcttgttggatctgtgtctcactgcagagctggagcaggagtagctgtgtgttcctgtttaactagccaaattcgagatgtaggtcatggatccaataatgtggttgactgtatgtgatttgagttctggccaccaacaatttagtcatatctgataggtacaaaagaaaaccaagattttgatatgaccacctttcaacactttttactgcaactagagtcttatttaaatgttaactgttgtattgtgactaagtacaacttttggaatgatacctgaagaattattagtaatagagttaaatttgatacttcctgcttttgcaaataatggagtagggaagaagatagtcgaacttaaaatcatacctaccctgaaaaatgcttaaagtagtgccaaaaatcttgaaatctctctctctctctctatttggatgaatcaaaatgtaatttgttgagttttgccttttcttttgcctaaagatgttaacgtcaggcagtgggtttttcctagaggagagattagtacctattcattaacacaaggatacataagagacttgccccttttgaagatcatttctacttggtgctgatgaatttatgcctagctttttttttctaggtggtgatttttcaatttcttttatatttacggaagtagaaaaaatgttctgtctttttgaatgccacttagctgcattttcagaagcttataggctataagaagcctttaatttcagtttgaattgctaggacaccaaaagacctagctgggctaactccatccaaatgattttacagttttattttttcatcttttgcaaaaagtatttgttacataatcaaaaggtgaaccagaggaaatattgaacaaggttttagatctgatgttattctggtgcccaattgagagaccttgagaaagaatgatgcagattacatgactctaatgtgggcagtctgaaaatatctttaactgtcttctttgatcatttgattttggatccaagatttatcatctctctattttgctatttgccaccatcctggtttttctgactgtacagaatcaatctgcatttatttattatcagaaatgaatgcatttttacaaaaacctttttgtagactgtagtttattgattagttcaagcccatcacgaactaattaaacatattgttggtaaaaacagagattgaaattactgtttttatcatatttaaatccctctggtgtatttattgaaatttaattaaaaatatttctacatattgatttgaagccaggatattgatggacctacagatttaacagctcttcaaagttttaactagcattataaaatggcctattcattatatgtatatttttttataaatatttatcaagaacatgaaaatattttattttgtatttgcagtgcagtttggcacctctcttccaggccttcctaagtttttgttagttgtgtcttcgaatttattgtagttcaccgctggtcagtaatctggttcataaggaagctggggcagtgaaaaacacttcgttgatccatccagccctaaagttcattgactaatagctcatgcatcttattaaatgggattctggacttctacaatagtgtggaaagccacatcacaaaaaaagccacatcacaaaaaaaagccagtgcctattgagtatatcaaaccaaaaaagaaaaaaaaaagttttaagaggggtcaggctggcagataaaagtctcttatgaagcagatataaatccagtaagctatttttttctacctatgggcaagttcataagtcattgctggatctgaaccagtgttcttttgtgtaagtacaaccatatttcagtcagtccagaggcagttaaccctgtagcacttactagactggtgacaactggctggatgtggagaataagtgtcaaaacctggcttcaatgtctatttcttatgtctaatggagttcttatattacagtgtttgtttagctatggttactaatatgtttgttatatttattttcggggagaggatcttgttattgtttcctgagattatttaaaatgttttttctttgatgtatttctgtctttcttatatgtaaggagttataagggttattatattttcatttctggtttttactatacaatggttatctaacatactaagttggtaccctacctacccgtaaaatatgaaatactcagaagtaaagtgtgtgggcaatcagaagcatagccttgaaggacctgacagcagtatgaaaagataaataggccaggcatggtggctcacgcctgtgatcccagcactttgggaggccgaggtgggtggaccacctgagatcaggtgttcaagaccagcctgaccaacatggtgaaaccctgtctctactaaaagtacaaaaattagccaggcgtggtggcgcatacctgtaattccagctactcaggaggctgaggcaggagaattgcttgaacccaggaggtggaggttgcaatgagccgaggttgagccatcgcactccagcggtgaaacaagagtgaaactccatctc

SEQ ID NO: 511 - DNA, 2305 bp, Homo sapiens
gagggaggcagggagagaaagggagaaaggcaggcagccggcgggcgctgcgtgtgtgtttgagtgtgcgagtgtgagtgagtgtgagtgccgggtcctgcctctcctggtgcccccagcagaggggcccggtggcctggggagggcgggcgggctgctcggaggcagaggcagcaagaggcggcggcggggagagccgagaaggaggaggaggagagaggaaagagcggagcagccattgttgagggaaaccttgcaaacaaagaaggctccggactccccgcggccccccgccccccaggccggccccctggcccccggcccccggcccagtggccattgtaactttcccccgggacagcggccgccgcggggcgggccgaggcagtgcgtgcgagtctttgtgcggccggcggactggagctcccagtcgggcctgcccgtcccactcgggacatgagctgctgaagttgtccccccgtcagccctcacccctgccaggactcctctgggcttgcagtcgctcccccgtacctctcctggccccctcagttctcccaggttgttcctcaaagtcattcaagctgtactcgccgaaggagcccccgaacggcaacgcctttccccccttccatcccggcaccatgctggatagggatgtgggcccaactcccatgtatccgcctacatacctggagccagggattgggaggcacacaccatatggcaaccaaactgactacagaatatttgagcttaacaaacggcttcagaactggacagaggagtgtgacaatctctggtgggatgcattcacgactgagttctttgaggatgatgccatgttgaccatcactttctgcctggaggatggaccaaagagatataccattggccggaccctgatcccacgctacttccgcagcatctttgaggggggtgctacggagctgtactatgttcttaagcaccccaaggaggcattccacagcaactttgtgtccctcgactgtgaccagggcagcatggtgacccagcatggcaagcccatgttcacccaggtgtgtgtggagggccggttgtacctggagttcatgtttgacgacatgatgcggataaagacgtggcacttcagcatccggcagcaccgagagctcatcccccgcagcatccttgccatgcatgcccaagacccccagatgttggatcagctctccaaaaacatcactcggtgtgggctgtccaattccactctcaactacctccgactctgtgtgatactcgagcccatgcaagagctcatgtcacgccacaagacctacagcctcagcccccgcgactgcctcaagacctgccttttccagaagtggcagcgcatggtagcaccccctgcggagcccacacgtcagcagcccagcaaacggcggaaacggaagatgtcagggggcagcaccatgagctctggtggtggcaacaccaacaacagcaacagcaagaagaagagcccagctagcaccttcgccctctccagccaggtacctgatgtgatggtggtgggggagcccaccctgatgggcggggagttcggggacgaggacgagaggctcatcacccggctggagaacacccagtttgacgcagccaacggcattgacgacgaggacagctttaacaactcccctgcactgggcgccaacagcccctggaacagcaagcctccgtccagccaagaaagcaaatcggagaaccccacgtcacaggcctcccagtaaaaggccctgctgtggccacccagtgctctgcctacctgccccacccctcacagccccagggagcagaagacagaatgaagagactgagcatctaaaatgggcagcctccatccacccgcttcagggaggaactggactctctgggggcaggtgccaagatttgcccccccagtggccctgggctgggcctggcctctacagagccttttagggggagggggtactcatgtggatgcctacttggaacctgggcctctgagacatgtcctgaccaccccccagggcatttgcctccatcttcaccccagattgtgggtttcccatccccctgactttacccctttcaagcctggggttgtctatacccacagcccttagggacttaaagttacggggcttcgttgaatgctccttcccctaggcagctggtaatagaggggtaaagctctgggcccctcctccctgctgccacttatcccagctccaagtttttttaaaaataatattattaaaaatgtaagttaaaaaaaaaa

SEQ ID NO: 512 - DNA, 2560 bp, Homo sapiens
cccttcttccctcccttcctccataccaacctccctccctctctggagctcctgctctctccctctccctcctctcccgtgctccctccctccctccctctttccctccctcctctcctctccctctcctctcctgctatagagggctccgacagcagttcccagccagcgtgttcagcctgcctgcctgcctgcctctgtgtgtgtgtgagcgtgtgtgcgtgcgtctactttgtactgggaagaacacagcccatgtgctctgcatggacgttactgatactctgtttagcttgattttcgaaaagcaggcaagatgtccagcacaccacatgaccccttctattcttctcctttcggcccattttataggaggcatacaccatacatggtacagccagagtaccgaatctatgagatgaacaagagactgcagtctcgcacagaggatagtgacaacctctggtgggacgcctttgccactgaattttttgaagatgacgccacattaaccctttcattttgtttggaagatggaccaaagcgatacactatcggcaggaccctcatcccccgttactttagcactgtgtttgaaggaggggtgaccgacctgtattacattctcaaacactcgaaagagtcataccacaactcatccatcacggtggactgcgaccagtgtaccatggtcacccagcacgggaagcccatgtttaccaaggtatgtacagaaggcagactgatcttggagttcacctttgatgatctcatgagaatcaaaacatggcactttaccattagacaataccgagagttagtcccgagaagcatcctagccatgcatgcacaagatcctcaggtcctggatcagctgtccaaaaacatcaccaggatggggctaacaaacttcaccctcaactacctcaggttgtgtgtaatattggagccaatgcaggaactgatgtcgagacataaaacttacaacctcagtccccgagactgcctgaagacctgcttgtttcagaagtggcagaggatggtggctccgccagcagaacccacaaggcaaccaacaaccaaacggagaaaaaggaaaaattccaccagcagcacttccaacagcagcgctgggaacaatgcaaacagcactggcagcaagaagaagaccacagctgcaaacctgagtctgtccagtcaggtacctgatgtgatggtggtaggagagccaactctgatgggaggtgagtttggggacgaggacgaaaggctaatcactagattagaaaacacgcaatatgatgcggccaacggcatggacgacgaggaggacttcaacaattcacccgcgctggggaacaacagcccgtggaacagtaaacctcccgccactcaagagaccaaatcagaaaaccccccaccccaggcttcccaataagatgatcggcaccagaatccactgtcaataggcccgtgggtgatcattacaattgcaaatctttacttacaggagaggaaacagaagagataaaaacttttccatgcaaatatctatttctaaaccacaatgatctgattttctttcttctttctttttttctaattgagaggattattcccagtaagcttccatgaccctttcttggaggccttcacaggtaatacagatactggcactgattgtaattaaaatgagagaaaactctagcgcatcttctggcacggttttaacaacgtgtttgtgttgaatttcctttttatgcatcaaacgaaggccatattgtccataaatgctcagtgctcaggatctcattaatatgccgaacctaactacagatgactttttaatattgtaaaatattttctgctttttgacttgcatctgagagtttcttgtttcagtaaaaaaagaaaagacaaaaaaatcagctttggaaagtaatttaaatgtaccttattttttttttctttatgttttctttcattgggcaacagctaagagggcccagcaaggtaatttatggttgagctgatgtcaattggttcttgtcttgagtcgactcaatttagcccaagtgctgaaacaagaaatgtcatttttttcatcaaagacaccagggcagatttttaagtaaagaaagacaattggacccttaagaatttatgcatttgtaaagttgctgttgatccaaatattttcaagccatgtaatccattggttttgtgggcagtttaataaacctgaacctttgtgtgttttctaattgtacctgagttgaccatcctttctttttatagtatatttcttgtatgatattttgtaaagctctcacctggttcttttatggggacttttcgtttttgggcaactccagtgtatttatgtgaaactttataagagaattaatttttccatttgcatattaatatgttcctccacacatgtaaaggcacagtggctccgtgtgttaaaaaacagctgtattttatgtatgctttactgataagtgtgccaataataaactgtgttaatgaccaaaaaaaaaaaaaaaaaaaaaaa

SEQ ID NO: 513 - DNA, 1388 bp, Homo sapiens
ctggccaccaagcgcctccgtggacacgcacttcctgcgaggcctccgtgcgcaccttggccgagccgaaccgagccgagtcctgtccttccaggccgttcgcaatggtggatgagttggtgctgctgctgcacgcgctcctgatgcggcaccgcgccctgagcatcgagaacagccagctcatggaacagctgcggctgctggtgtgcgagagggccagcctgctgcgccaggtacgtccgccgagctgcccggtgcccttccccgaaacgtttaatggcgagagctcccggctccccgagtttatcgtgcagacggcgtcttacatgctcgtgaacgagaaccgattctgcaacgacgccatgaaggtggcattcctaatcagcctcctcaccggggaagccgaggagtgggtggtgccctacatcgagatggatagccccatcctaggtgattaccgggccttcctcgatgagatgaaacagtgctttggctgggatgacgacgaagacgacgacgacgaagaagaggaggatgattattaggccctcgaccctcgggcctcgggggggagggccctgcacgccgccaccccctccccgcagccctcaccccgccaggagccactgctctcccccttgccctccggtccccttacctacccgcgcccgtctgctctctctcttcatttctccgtagtgcttgtctttgttccaggaatagcgctccagttacctgctgctggggtcggggctggagcctcactcactcggaagtgcttggaagtgtcatctaccctggccatccccgggatccctcccctgctaatctgaactgtgtcctgaaccccagctattggccaggcccctgttacaaactgcgcagaccacccatagccctgctgctgccacctgccctgctgccaggcttacatcttcccagagaactatgctgccacttcacatccactcaccacatcccacctacagactaccacctttcgagatcaggaccaacctggaaaatgccagagttggctatgccttttcagacattgatttggacagctcaccaacccctgaaggggccgttcagcctggttagttttctacctactccgagtgtcctcccctgccccaccagattgctgcaggggcgcggtgtgcctggcagccaaattgttgacacttcttttttcctatgcactggttttacacagctgtcatttttctttcaaaattgcagcagtcccacagatgtgtgcatttggacaaatagtacttaaaaacaaaacaaacaagcactcagcccagctcctcaatactacctggaaaaagcattggcattattttcaataaatatcaagcactaaaaaaagaaaaaaaaaa

SEQ ID NO: 514 - DNA, 3620 bp, Homo sapiens
agcgccggcgaggcgcgggaggaggagaagcagtggggaggcgcagccgctcacctgcggggcagggcgcggaggagggacccgggctgcgcgctctcgggccgaggaaccaggacgcgcccggagcctcgcacgcggccaagctcggggcgtcccctcccctcggccgggcgaactcaaggggcgcagctctttgctttgacagagctggccggcggaggcgtgcagagcggcgagccggcgagccaggctgagaaactcgagccgggaacaaagaggggtcggactgagtgtgtgtgtcggctcgagctccgggcagaggcatttgggcccgaggcccccgctgtgactccccgagactccgcagtgccctccactgcggagtccccgcgcttgccggcaaaaactttattcttggcaaacttctctttctcttcccctcctcctcggcccccatcttctgctcctcctccttctctagcagattaaatgagcctcgagaagaaaaaccgaagcgaaagggaagaaaataagaagatctaaaacggacatctccagcgtgggtggctcctttttctttttctttttttcccacccttcaggaagtggacgtttcgttatcttctgatccttgcaccttcttttggggcaaacggggcccttctgcccagatcccctctcttttctcggaaaacaaactactaagtcggcatccggggtaactacagtggagagggtttccgcggagacgcgccgccggaccctcctctgcactttggggaggcgtgctccctccagaaccggcgttctccgcgcgcaaatcccggcgacgcggggtcgcggggtggccgccggggcagcctcgtctagcgcgcgccgcgcagacgcccccggagtcgccagctaccgcagccctcgccgcccagtgcccttcggcctcgggggcgggcgcctgcgtcggtctccgcgaagcgggaaagcgcggcggccgccgggattcgggcgccgcggcagctgctccggctgccggccggcggccccgcgctcgcccgccccgcttccgcccgctgtcctgctgcacgaacccttccaactctcctttcctcccccacccttgagttacccctctgtctttcctgctgttgcgcgggtgctcccacagcggagcggagattacagagccgccgggatgccccaactctccggaggaggtggcggcggcgggggggacccggaactctgcgccacggacgagatgatccccttcaaggacgagggcgatcctcagaaggaaaagatcttcgccgagatcagtcatcccgaagaggaaggcgatttagctgacatcaagtcttccttggtgaacgagtctgaaatcatcccggccagcaacggacacgaggtggccagacaagcacaaacctctcaggagccctaccacgacaaggccagagaacaccccgatgacggaaagcatccagatggaggcctctacaacaagggaccctcctactcgagttattccgggtacataatgatgccaaatatgaataacgacccatacatgtcaaatggatctctttctccacccatcccgagaacatcaaataaagtgcccgtggtgcagccatcccatgcggtccatcctctcacccccctcatcacttacagtgacgagcacttttctccaggatcacacccgtcacacatcccatcagatgtcaactccaaacaaggcatgtccagacatcctccagctcctgatatccctactttttatcccttgtctccgggtggtgttggacagatcaccccacctcttggctggcaaggtcagcctgtatatcccatcacgggtggattcaggcaaccctacccatcctcactgtcagtcgacacttccatgtccaggttttcccatcatatgattcccggtcctcctggtccccacacaactggcatccctcatccagctattgtaacacctcaggtcaaacaggaacatccccacactgacagtgacctaatgcacgtgaagcctcagcatgaacagagaaaggagcaggagccaaaaagacctcacattaagaagcctctgaatgcttttatgttatacatgaaagaaatgagagcgaatgtcgttgctgagtgtactctaaaagaaagtgcagctatcaaccagattcttggcagaaggtggcatgccctctcccgtgaagagcaggctaaatattatgaattagcacggaaagaaagacagctacatatgcagctttatccaggctggtctgcaagagacaattatggtaagaaaaagaagaggaagagagagaaactacaggaatctgcatcaggtacaggtccaagaatgacagctgcctacatctgaaacatggtggaaaacgaagctcattcccaacgtgcaaagccaaggcagcgaccccaggacctcttctggagatggaagcttgttgaaaacccagactgtctccacggcctgcccagtcgaccccaaaggaacactgacatcaattttaccctgaggtcactgctagagacgctgatccataaagacaatcactgccaacccctctttcgtctactgcaagagccaagttccaaaataaagcataaaaaggttttttaaaaggaaatgtaaaagcacatgagaatgctagcaggctgtggggcagctgagcagcttttctcccctcatatctgcgtgcacttcccagagcatcttgcatccaaacctgtaacctttcggcaaggacggtaacttggctgcatttgcctgtcatgcgcaactggagccagcaaccagcacatccatcagcaccccagtggaggagttcatggaagagttccctctttgtttctgcttcatttttctttcttttcttttctcctaaagcttttatttaacagtgcaaaaggatcgtttttttttgcttttttaaacttgaatttttttaatttacactttttagttttaattttcttgtatattttgctagctatgagcttttaaataaaattgaaagttctggaaaagtttgaaataatgacataaaaagaagccttctttttctgagacagcttgtctggtaagtggcttctctgtgaattgcctgtaacacatagtggcttctccgcccttgtaaggtgttcagtagagctaaataaatgtaatagccaaacccactctgttggtagcaattggcagccctatttcagtttattttttcttctgttttcttcttttctttttttaaacagtaaaccttaacagatgcgttcagcagactggtttgcagtgaattttcatttctttccttatcacccccttgttgtaaaaagcccagcacttgaattgttattactttaaatgttctgtatttgtatctgtttttattagccaattagtgggattttatgccagttgttaaaatgagcattgatgtacccattttttaaaaaagcaaggcacagcctttgcccaaaactgtcatcctaacgtttgtcattccagtttgagttaatgtgctgagcatttttttaaaagaagctttgtaataaaacatttttaaaaattgtcatttaaaaaaaaaaaaaaaaaa

SEQ ID NO: 515 - DNA, 2283 bp, Homo sapiens
cggccgcgagttgtgactggagccacgatgcacggccaggcgcggtgagaagccagcccgtagtgcctcccgaaggagcccgggcgcagggagggtcgccctgaggacacggaggccgccaggcaggccaagggccgaggtgactgggctggggcggtagggaaggagcgagtgcgcctggctgcctccgcacggagttgtccctctctgttttcgattgacacaaacacttctccaaaagcggggaaacctaagcaacaacagcaatcaacaccaagatcttcctcctaccctcccctctttcccttctcccgcggtcggccctcgccccctcccccaggcccagcgcgggcgctcggcgcgtccagacccgcggcgcgatgccggcagtttaggatccaaagcttctctgctccttttgttctttccttcccttttttaaaaaaagaggggggaaatcccagtggtgggcagcctggcacgcacacagtcgccctcataccccgacaaaagcagatgcactttgacttctgacagctctacctcaagccccggagaactcagcggcgctttcctcgcaacccgagctcggcgagtcgtcgtcttcttcttctccgtttttatttatttatttccgttcccgccgccgttctcgctgaccttcactcctccgcgggctctgagcagaagggtcgcattctctcccgcctgagacttcttttcctcgccccgggagctcaggcggcgccgctccagcccggggccccgggactccccggctgcacacttcactgagacgcccccccaggccccgatcagcctcgtttcctccaccctactttgatttcctggtgcgagttttggcttgcacggccgagtgtgtgtcctctttttggagagactggggagctcgtgccgattgtcttcaggagtcatcccctgggctctactttgcccctctctctctctgggcctcatcagaccaaaccaaagaccatggttcactgtgccggctgcaaaaggcccatcctggaccgctttctcttgaacgtgctggacagggcctggcacgtcaagtgcgtccagtgctgtgaatgtaaatgcaacctgaccgagaagtgcttctccagggaaggcaaactctactgcaagaacgacttcttccggtgtttcggtaccaaatgcgcaggctgcgctcagggcatctcccctagcgacctggtgcggagagcgcggagcaaagtgtttcacctgaactgcttcacctgcatgatgtgtaacaagcagctctccactggcgaggaactctacatcatcgacgagaataagttcgtctgcaaagaggattacctaagtaacagcagtgttgccaaagagaacagccttcactcggccaccacgggcagtgaccccagtttgtctccggattcccaagacccgtcgcaggacgacgccaaggactcggagagcgccaacgtgtcggacaaggaagcgggtagcaacgagaatgacgaccagaacctgggcgccaagcggcggggaccgcgcaccaccatcaaagccaagcagctggagacgctgaaggccgccttcgctgctacacccaagcccacccgccacatccgcgagcagctggcgcaggagaccggcctcaacatgcgcgtcattcaggtctggttccagaaccggcgctccaaggagcggaggatgaagcagctgagcgccctgggcgcccggcgccacgccttcttccgcagtccgcgccggatgcggccgctggtggaccgcctggagccgggcgagctcatccccaatggtcccttctccttctacggagattaccagagcgagtactacgggcccgggggcaactacgacttcttcccgcaaggccccccgtcctcgcaggcccagacaccagtggacctacccttcgtgccgtcatctgggccgtccgggacgcccctgggtggcctggagcacccgctgccgggccaccacccgtcgagcgaggcgcagcggtttaccgacatcctggcgcacccacccggggactcgcccagccccgagcccagcctgcccgggcctctgcactccatgtcggccgaggtcttcggacccagcccgcccttctcgtcgctgtcggtcaacggtggggcgagctacggaaaccacctgtcccacccccccgaaatgaacgaggcggccgtgtggtagcggggtctcgcacggtctgcggagttcgtggttgtacagaaatgaacctttatttaagaaaaatag

SEQ ID NO: 516 - DNA, 2416 bp, Homo sapiens
gactgcagagccggggctgggctaggcgcgcgcttggagagcattgcgcgcggctgggcccgcggccggcggctcctcctcccactctgctcctcctcttttttctcctcctccacctcctcctccgcctcctcctcctcctcttcctcctcctcttcaattctcccggtggctcgactcggctcgcaggcttcggagaaacccctactccagtcgccgactcagcgcccaagagggtcgccttgggctgggggcgcaccccagggaggggaggggtccaggcagctgggccgccgcggacacctagcggcttcagggtgaaccccgaccgcagccgtcgccgcctcgggcagagtttgcgcccttgctttgcgccccgggcgctgaagccgggcgggcgatgcccgcggcgtgaaagcgcccgcggcgggcgccgacctctgtcctagtctcctgctccccccgccccgcttgtcccgtgcccttgtgaccctggctttggcgccgtcgcccaggcgccccgcaatgtagctgcccctgcgcctcggcgggaggcgtcctgccccgcgagcgcccggggcccggagcccggcctgggggctcagccgagctcgggcggggccggggccgcggtggcgatgcaccgggcccgttagcgccaggagcgccaggcagctgaggcggggggcaagccctccctcggaggagccgcgcccccggccccgccggtcccgccgcgatgctgttccacagtctgtcgggccccgaggtgcacggggtcatcgacgagatggaccgcagggccaagagcgaggctcccgccatcagctccgccatcgaccgcggcgacaccgagacgaccatgccgtccatcagcagtgaccgcgccgcgctgtgcgccggctgcgggggcaagatctcggaccgctactacctgctggcggtggacaagcagtggcacatgcgctgcctcaagtgctgcgagtgcaagctcaacctggagtcggagctcacctgtttcagcaaggacggtagcatctactgcaaggaagactactacaggcgcttctctgtgcagcgctgcgcccgctgccacctgggcatctcggcctcggagatggtgatgcgcgctcgggacttggtttatcacctcaactgcttcacgtgcaccacgtgtaacaagatgctgaccacgggcgaccacttcggcatgaaggacagcctggtctactgccgcttgcacttcgaggcgctgctgcagggcgagtaccccgcacacttcaaccatgccgacgtggcagcggcggccgctgcagccgcggcggccaagagcgcggggctgggcgcagcaggggccaaccctctgggtcttccctactacaatggcgtgggcactgtgcagaaggggcggccgaggaaacgtaagagcccgggccccggtgcggatctggcggcctacaacgctgcgctaagctgcaacgaaaacgacgcagagcacctggaccgtgaccagccatacccgagcagccagaagaccaagcgcatgcgcacgtccttcaagcaccaccagcttcggaccatgaagtcttactttgccattaaccacaaccccgacgccaaggacttgaagcagctcgcgcaaaagacgggcctcaccaagcgggtcctccaggtctggttccagaacgcccgagccaagttcaggcgcaacctcttacggcaggaaaacacgggcgtggacaagtcgacagacgcggcgctgcagacagggacgccatcgggcccggcctcggagctctccaacgcctcgctcagcccctccagcacgcccaccaccctgacagacttgactagccccaccctgccaactgtgacgtccgtcttaacttctgtgcctggcaacctggagggccatgagcctcacagcccctcacaaacgactcttaccaaccttttctaatgactcgcaacccctcaccccacaatttctttaaaaaagaaattatctttagttgaattccaagtgtattttaaaatagaggctttgagcaactaactaaccacattttaggatctcgcctggaaacagaggtaaaaaaaagaagtgtgcgcccggctaatgcagcggtgtggaccgaggaacaacttggaagatctacctgcaacacaacatttgtgtcactgtacagttttgtggactgagcgaggaaaaacaacaaataatttaagttggctagagcttctgtattttcaaagactgccacgtgccttaggaatactgttttatctccatactttggatgacttgttcatttttctctccctctttttctctgtatatttatgaccagagcaaaaatgtaaaaaacaaaaaaaacaacaaaaaaagtttgttactttgaatagtcctaaaaag

SEQ ID NO: 517 - DNA, 2413 bp, Homo sapiens
cgcagcgcccagcagcacccggagtcgcttggacgccggttcggggctattgcggggtggcgtcgctgggcccgggaaagttcgggactggagagtggcgacgccgggcggcgggacccatggaggcgcgcggggagctgggcccggcccgggagtcggcgggaggcgacctgctgctagcactgctggcgcggagggcggacctgcgccgagagatcccgctgtgcgctggctgtgaccagcacatcctggaccgcttcatcctcaaggctctggaccgccactggcacagcaagtgtctcaagtgcagcgactgccacacgccactggccgagcgctgcttcagccgaggggagagcgtttactgcaaggacgactttttcaagcgcttcgggaccaagtgcgccgcgtgccagctgggcatcccgcccacgcaggtggtgcgccgcgcccaggacttcgtgtaccacctgcactgctttgcctgcgtcgtgtgcaagcggcagctggccacgggcgacgagttctacctcatggaggacagccggctcgtgtgcaaggcggactacgaaaccgccaagcagcgagaggccgaggccacggccaagcggccgcgcacgaccatcaccgccaagcagctggagacgctgaagagcgcttacaacacctcgcccaagccggcgcgccacgtgcgcgagcagctctcgtccgagacgggcctggacatgcgcgtggtgcaggtttggttccagaaccgccgggccaaggagaagaggctgaagaaggacgccggccggcagcgctgggggcagtatttccgcaacatgaagcgctcccgcggcggctccaagtcggacaaggacagcgttcaggaggggcaggacagcgacgctgaggtctccttccccgatgagccttccttggcggaaatgggcccggccaatggcctctacgggagcttgggggaacccacccaggccttgggccggccctcgggagccctgggcaacttctccctggagcatggaggcctggcaggcccagagcagtaccgagagctgcgtcccggcagcccctacggtgtccccccatcccccgccgccccgcagagcctccctggcccccagcccctcctctccagcctggtgtacccagacaccagcttgggccttgtgccctcgggagcccccggcgggcccccacccatgagggtgctggcagggaacggacccagttctgacctatccacggggagcagcgggggttaccccgacttccctgccagccccgcctcctggctggatgaggtagaccacgctcagttctgacccaggcccggctccaccctgcacctcacacgagggagctgcccctgggtgggcggctcggggctgctggggtttccgaggaagtggggccagggcgtcaagggagggctggtgccttcggagcctcccactgccgaccgcacagctccctctctgggggctgagggacccacctggcccctcctctgacacagggctggcccgccaggtggcctcccagcaagccagccttttttgtaagcaaatttctcccctttattgaccaattaactgagcacttgctgctatttctagacatgaaatgtcaccttgctgaggcccagcccagcccagcatagcccgagggctggaaaaacgctttcatctctaaaactgagaaatcatcataattgtgctttcacttcccaggctccatgtgtcttggagccgtcaccccgaggctccctctttaggtcggagattggccttgcctgtcgaggcaagaggctgcagaggcggggacacacctgtgtcctccgggagaggccccctcctctccccagaccacagggggcctctctgcctccagccccaccttccccgggagaagctttccccaatccccaggtctctagatcattctgttctcgagtatcctgtggaggaggcaaaaatgcctggcgccccttctctccaagctcaattctctaagcccctcagggtctcctcctcaccccaccccaggcccttggtgtccaggctgcacccacagatgtctgttgccaaacagcctgccctccctgccggagccggctctgccagccccagattgggaagtctccccgctggagaagggtggggctcctctgagcctgccctgcctcctccatcagatcctttgggaagaagtttctgggagatgcccgcagctgtgcgtgccccagacacaaaggctggcctgtgtgtaagtcaaagtcactcccgcaaacctgaatctcgagctacctattggttctgtgaatgttctgtgtcttttatttattctcgggtgatcagctctttccaagacttcaataaatttgtcagttacagtcaaaaaaaaaaaa

SEQ ID NO: 518 - DNA, 1913 bp, Homo sapiens
ccggagagcgagatcaaagggactggaaacagactggggactggcggggggagggggccggccagcctgtggagtcctccctgagaagcggagggcccggcttccaccgtgactccagcggcctgcttggggttttaattattattttgaaatttctgaatcgagctagagcgagagagcgagagatctccgtagactgcgactcgctggctttcgctccgagatgatgcagagtgcgactgtccccgcggaaggggctgtcaaggggctcccggagatgctaggtgtgccgatgcaacagattccccagtgcgctggctgcaaccagcacatcctggacaagttcatcctgaaggtcctggacagacactggcacagctcctgcctcaagtgtgcagactgccagatgcagctggcggacaggtgcttctccagggctgggagcgtctactgcaaggaggacttcttcaagcgcttcggcacaaaatgcacggcctgccagcagggtatccccccaacccaggtggtccgcaaggcccaggactttgtctaccacctgcactgctttgcttgcatcatctgcaaccggcagctggccacgggggacgaattctacctcatggaggacgggcggctggtgtgcaaggaagactacgagacagccaagcagaacgatgactcagaggctggagctaagcggccccggaccaccatcacagccaagcagctggagacattaaagaatgcatacaagaactcccccaagcctgcccggcacgtgagggagcagctgtcctcagagacaggcctggacatgagggtcgtacaggtttggtttcagaacagaagggccaaagagaaacgcctgaagaaggatgcagggcggcaccgctgggggcagttctataagagcgtcaagaggagccggggcagcagcaagcaggagaaggagagctctgcagaggactgtggggttagtgacagtgagctgagcttccgagaggatcaaattctctcagaacttggccacaccaataggatttatggcaacgtgggggacgttacaggcggacagttaatgaatgggagcttctccatggacgggacaggacaatcctatcaggacttgagggatgggagcccctatggaatcccccagtctccatcctccatatcgtccctgccatcccacgctcctttgctcaatgggctggattacacggtggacagtaatttgggcatcattgcgcatgcagggcagggagtaagccagacgctgagagccatggctgggggacccacctctgacatctccacaggaagcagtgtaggctatcccgactttccaactagcccaggctcttggctcgatgaaatggatcatcctcctttttaaacttctctcctccccaccctacctgcccccctggcttgagagaatatcttcaaggatcaaaagagacttgccttttaaggatcgaaagtacgccaatgtgaatttccattattttcaatggaagtcctccgctgattcctagaaggctgtgagaccacactagggcattgtttccctggggaagcagtgggagagcagactcatctcagaacacagcacagggggtaatggcctagagctctagggacactggcttgttgggtctctcccctgctgttctgcttaggggcttggctgctcagtgctttggtagcacaaggtgactgtgataggcccccttggcctttgggaactttgctccaactggtgtgtctcacacaatgcctcccaaaacactgctctcaccagaactgagactcctaaggtagaggcctcacagcccttgagtaaaataaaagtgatttctggaccatcaaaaaaaaaaaaaaaaaaaaaaaaaaaaaaaaaaaaaaaaaaa

SEQ ID NO: 519 - DNA, 2084 bp, Homo sapiens
aaccaggtacaagctaatactcaacaatactgatgccttgttttttttgctctgtccggacagcaacgctgtagccaatttagatatgctataaatttaagaggttgccatggccacggtgcgcccattggccgctgggccccctacgtgcagcgccacgtcaccaaatctgaataaggatgcgcgaattacgcggcgaccagacaaagatgaggatccggaccgcttgaaagtgggggaaagtgccggcgcctccgccaccggggaaagccgctccgcagcgccgaggccagcagccacccgagatacctggggaagcccggaacaggcgccggggcgtgcggcccgtggcatgaggttgtgaacgccacccgccccccaccaccccactccgggcagcccagcgccaggccagagattgcccaaggactggaccggctgagtcttggtccggaccagactcgccctgcagctgctgagacaagaggcgaagggcagcggagggcccggcaggcccgagggccaggggcccaaagggagggcaaggcggccgaagccgccggggcgcggggctatgatggtgcactgcgccggttgcgagcggcccatcctcgaccgctttctgctgaacgtgctggaccgcgcgtggcacatcaaatgtgttcagtgctgcgagtgcaaaaccaacctctcggagaagtgcttctcgcgcgagggcaagctctactgcaaaaatgactttttcaggcgctttggcacgaaatgcgccggctgcgcgcaaggcatctcgcccagcgacctggtgcgcaaggcccggagcaaagtctttcacctcaactgtttcacctgcatggtgtgtaacaagcagctgtccaccggcgaggagctctacgtcatcgacgagaacaagttcgtgtgcaaagacgactacctgagctcatccagcctcaaggagggcagcctcaactcagtgtcatcctgtacggaccgcagtttgtccccggacctccaggacgcactgcaggacgaccccaaagagacggacaactcgacctcgtcggacaaggagacggccaacaacgagaacgaggagcagaactcgggcaccaagcggcgcggcccccgcaccaccatcaaggccaagcagctggagacgctcaaggctgccttcgccgccacgcccaagcccacgcgccacatccgcgagcagctggcgcaggagaccggcctcaacatgcgcgtcatccaggtgtggtttcagaaccgacggtccaaagaacgccggatgaaacagctgagcgccctaggcgcccggaggcacgccttcttccggagtccgcggcgcatgcgtccgctgggcggccgcttggacgagtctgagatgttggggtccaccccgtacacctactacggagactaccaaggcgactactacgcgccgggaagcaactacgacttcttcgcgcacggcccgccttcgcaggcgcagtccccggccgactccagcttcctggcggcctctggccccggctcgacgccgctgggagcgctggaaccgccgctcgccggcccgcacgccgcggacaaccccaggttcaccgacatgatctcgcacccggacacaccgagccccgagccaggcctgccgggcacgctgcaccccatgcccggcgaggtattcagcggcgggcccagcccgcccttcccaatgagcggcaccagcggctacagcggacccctgtcgcatcccaaccccgagctcaacgaagccgccgtgtggtaaggccgccgggccgccccccgcgctcggcccccgggggccccgccccgaagcagcctcctgaaaccaaaacgcccgacgcagacgcggtgggagacgtgggtgtccctcgggggttctctctcgggtccgcactcaactggcagctgctcctcggctgggcgccgagggggggccgacccccatctccaccccgcgggctctccaggagcctcagcccaccgccagtactctcccagcaaccgcgagcaatttcttgggaccaaagtcaatactccggagggtcaagagatttcgagcacgc

SEQ ID NO: 520 - DNA, 3377 bp, Homo sapiens
atgtactggaagcatgagaacgccgccccggcgttgcccgagggctgccggctgccggccgagggcggccccgccaccgaccaggtgatggcccagccagggtccggctgcaaagcgaccacccgctgtcttgaagggaccgcgccgcccgccatggctcagtctgacgccgaggccctggcaggagctctggacaaggacgagggtcaggcctccccatgtacgcccagcacgccatctgtctgctcaccgccctctgccgcctcctccgtgccgtctgcaggcaagaacatctgctccagctgcggcctcgagatcctggaccgatatctgctcaaggtcaacaacctcatctggcacgtgcggtgcctcgagtgctccgtgtgtcgcacgtcgctgaggcagcagaacagctgctacatcaagaacaaggagatcttctgcaagatggactacttcagccgattcgggaccaagtgtgcccggtgcggccgacagatctacgccagcgactgggtgcggagagctcgcggcaacgcctaccacctggcctgcttcgcctgcttctcgtgcaagcgccagctgtccactggtgaggagttcggcctggtcgaggagaaggtgctctgccgcatccactacgacaccatgattgagaacctcaagagggccgccgagaacgggaacggcctcacgttggagggggcagtgccctcggaacaggacagtcaacccaagccggccaagcgcgcgcggacgtccttcaccgcggaacagctgcaggttatgcaggcgcagttcgcgcaggacaacaaccccgacgctcagacgctgcagaagctggcggacatgacgggcctcagccggagagtcatccaggtgtggtttcaaaactgccgggcgcgtcataaaaagcacacgccgcaacacccagtgccgccctcgggggcgcccccgtcccgccttccctccgccctgtccgacgacatccactacaccccgttcagcagccccgagcgggcgcgcatggtcaccctgcacggctacattgagagtcaggtacagtgcgggcaggtgcactgccggctgccttacaccgcaccccccgtccacctcaaagccgatatggatgggccgctctccaaccggggtgagaaggtcatcctttttcagtactaacgctgccggcacttccgcatctgcccgtgggcgccccacagctgcccctcagccgctgagatccagtgtccaagctgcggccaggagtccacccacctccgcatccacccccgtccgccatcctgcccaccaccaggtcggttcccgaggcctggcctttccctctcctgctgagaaccagaacccaccaggagcaccacagagtcctcctcttggaaggcagaactccctgaaatctggaatcagggtggaaacagcctgtttttcccatttaaacaggagtcctcttcaacttcagctgattacaataacaaaaggcggaattgaattgtgcgatgccaacggccttctcatttacaggtttttttcccccacattggcctttatttactacttccttggaaccatctctgaattctgaatagctgacaacccccaatgttatccactctgttgcttttgtctggaaaactctacagtgtttgtgggatgtccccaaaggaaagctatgttctaattttatcatttccatctgtctggttatgtcaagttaattcagaaagagaagagacagtgaccaaccctgagaggcctaatagggcagagatggaggcctgcccagactaggaggcagcggggatagacagggaatggggagaagaaagacccccattggtttggaaatcaaggagagggcggtgacatattggaccagaagaggcactagccattttaaggagaggaaagagaaaactctggggtcagggagagaccctacccccacctaattatccagcatatatgtaagaaacatagcagcgatggtattcgatctgtgccatgactcttctgaatgtttggacaggttagagttggggacccctgttggccacttgttgacctctcatagtggtgcttgggccaggtcttctcaatggaaggggaatcccttataggggagagggaacagagcccagtgaaatggcagtcagaatgttaaccctggatccatctctaagtagagagagggtgcccattgcctaggtgagtgtgccaagctcaggattccaactggtgcctctgagcttcccaatcaatacttcctggagccagccccacccacccctgagaacagaggtcagacacagctgcgtaacatccatcctgctacaactcttccaccccaaacaaaagggctcaggctacacacgaccatgatttatgttttcaggggatgcccatttgtcccaagcttatcctgtaattctagaattacctggtgtcctgatgcattttccactagaggttgctaatcagcatgttttagcccaagtccgccttcctgctgtggttaacctgttatgttgcttttggaaggagactctaagacagggaaagcaagttcatggtacatacgcagccattgtctctgtttttacccatggcagacattgctaatcaatggcagctctatttcactgagtctggataaggtttcagagttcaaatgcttgacgttggcacttaacatgaaagcctataggtcattcttgctctgggatctacaggcagggtaggcacaggtgcagcctaagaagggaacctgcttcctctcccttccaaagacagtgacagctgactgagggcaaagagcaggcaccactcagaacgtggtgagtacagctcagctcagcactcagtcagtggtaacttgtgcccagccctgtgctaggcgctgacattaacaggagcaaccagggcccaattcctggccttggagctcaaatctttcctttgatttttgctcctgatcatcaaggccccagtggcaaccatgtggtaagtggccaaccaagccctacccagggtcacccaacacactctgccttgagcctctcctcagggtctattccttgcgtggattatgtggccgtagcatgttacagttcaaacatgtctccactaccctgttaagagcagcctgggaacgtacaggccatcaagactatttatttaaatacaaaaaaaggggaaaacacacacacggaaaaaaaattgtaagcactttttttgtaaaaccaatgtctgttttgttacatacctttcatgtcgtgctttgtaaatgtcttatttgtgtaataaagttaatgcaagtagaagtgctggcactgaaatccagaaaaaaaaaaaaaaaaaaa

SEQ ID NO: 521 - DNA, 11878 bp, Homo sapiens
gatccgcccgcctcagccttccaaagtgacgggattacaggggtgagccaccgtgcctagccggaaaataattttaaataacaccggaagttcaaaaaatttaaggagtgaaagcaagtaaccataaaaggcaagaggaaactcagggaggggaaaggcaaatgtcttcattgcacatattttattttgtttcttaatttgggtggttgatacatgggtacttattcttctgtaagcctaaaggtttcataattaacaaatcacctgtacgaagaagcagatggaaaagacctgatgatactgcagcttctctaaagacctagggttcacagtgttttaattgactgcaaggtaatgaggctgtcttaggagacaagttctaccacttcagcactttcagatatccagattattgtgcttatttcagagtgccaaattttaagaagggactaataagcaatctgaaaaacatactacctcaaaggctaccagggttgtgaaagatttagatcatgccataatattaaaggcagcagggatatttatctggagataaggccaggagatggtaagagaaagagtaatatccagagtaggtgtctttaaatatttgtgaaaggcttccctgcaacggaatgtagaaaaaggcactggtgttcactcataatgaattttctcattattgaaaggctacacaaatggcacggactaccaaggaaggtagtgagtttcctctgcctgggagaacagttttctttggcaggtagttccgactccacgggctaaaagttccttctaatttaagactctgtatattcataacaatgatagcttcaggtaagtcagatgcatgacttatatcattttgaagttggaagcaaagaagaaggagagttttcttagagcttttcatatttgaaggactaaggaacacaggcagacatctgtcatgtaatttccaggcatttaggttactagtactatgagcaagttaactttgtcctaagccctaccatttggagaatatattttgaatgttggctttcaatatgttaaggttgaacattaaatatttttgatatgattccaaaggaaagagtactagcatgcttatgtgtttattatttgtatctatacataggctcactatatgttgtagcccttcagagtattttataagaattactgtgatctcaaatagtaatcatactttccctcagcctccttcctagcattgggcataatattttagaaaggtaagaaaaaagagtttttattactagacttcttctaatatgcaaactaggtcacccaaagattaggaggaaactggtgtgatacgtggagagtttcacgtttcctagttacaaatatgcttagtaagacatttgtaataaagcagactgtccttatactgaagtcaaagaataaagatgagtgatttttttccccacacactgcatccagatacaatcactgttcacatactctttcagataagtgaattatgatttttatgttgtgcagagacagagtaaactattgctatttcttccaatcagtgtactaggaatacccttccatattaacatcatatttattgccacatatattgagcatagcacaatttatttagcttccaatttttcactattataaaatgctgccatgagcaacattgtatatctaccttgcgtgcttgttcaatagtttcctcaggataaatttctggaagggagattgttgagtccaaagataaaacatgcatagggcctttatacaaacatgaaatctctttgcctttgagaaagttcatacaactttattctgccaggagctacgtacaagagttccttttccccaactcagaagaatcctgaatactgttactcttttacatcctttacaatttaatagttagaaaagaaaatctcattgattttatttctgtttcttatattatcaatgagcttgaacaaattagtttattttttcatttttaagaccgtatgtttttagctcactcttctgttgggttattttctctatatcttactgatatttattaatcctatctgtcatgttaacctttcacggttcatcaatttcctttttattttttccacacagaacatttatatttctatgtgtttaaatctcccagtcttttgatagttttggcctttttttttgttttgtttttctttttttgagatggagtctcactctgtcacccaggctggagtgcagtggcacgatctcagctcacttcaacctccgccttccggactcaagcgattctcctgcatcagccttctgagtagctgggactacaggtgcgtgataccacacgcagctaatttttgtattttttggtagagacggggtttcaccatattggccaggctggtctcgactcctgacctcgtgatccacccacctcggcctcccaaagtgctgggattacaggagtgagccatcacgcctggcctttttgttttgttttgttttgttttttgagatggagtcttgctctgttgcccaggctagagtgcaatggtgcagtctcagctcactgcaacctctgcctcctgggctcgagtgattctcctcctcagcctctcgagcagctgggactacaggcacctgccatcatgactggctaatttttgtatttttagtagagatggggtttcaccatgttggccaggctggtcttgaactcctgaacttgtgatctgccacctcggcctcccaaagtgctgggactacaggtgtgagccaccacgccgggtctagttttggcctttcttatgcttccctatctagagagtatttcaatgttgccttttgttttcttaaacttttattgtttcaattatttacgcctaaactttaatttatctggcttggttcatgggagatagggttttatctatttttttctctctttcaaatgataaactatcagttttccctaaatcagtgaaacatgctttcccaataaaataaaatcccatctttgtcatatacaaaattattatatttggctttttgtctgggctttctaaaggtttcattctctgcattagtattttgcttttccattatatctacatggcctgattttagcttagtttatgatttagaagtcaaaaaatttaaagtagttactcagaaaatgttaactcttgttggaggtttgcaaacaagaaggaggaaattttgtcagtgaggagagtcaaaaggacttatacttgattctgaagctgggtagcattcatgccagaaggaatttcctgatgtctggaatcttaaactatattttgctctaccagttagttacatgatactttgtttttgcaaacctccttctgcttgattacctgtggatgatctttccaagaagctgcttaacaagatagttattctgctgtttatattataccttcttcatgtttatttacaaagtttgagtgtttttttttttcaatcaaaagatggtgtttcttttgttttacaactgcataggttccattcaatatataacttattggagacaaaaagatactttgaagaaactctgggaatcatagtgcaacatgttttaggttatatgtagtcctctggcgtatgtgtcttctgggtcccataagggaaaaaggccggtggcagtggttcccccttacacattggagaatgtttgagtaatgtcatcctatttgggtgagactagtgttagtagtgacatctattgttccagagcctgtgggcagaactgtggagtttggggtgtggtctataggtatctctgagtctcactaacactccagagaacagggatgtggaggaggctgtgacttcccacttgtcttactggtggatacctaagtcttgtcccagaaacattccttagctgctacttttcagcctcctgctcaaggctatataccccactagattattaattttttattcttttagttttaatcactcttgagagtatactttgccaaccttctatttttgaatgccaggggcagggtgtagttctgaagtaaggccagctttttcttataaattctttgcagcttccttttatttcacattaatcagccctgattgccttgtgccatcaaggccctaccaccagccttgaacagacttatgcccctgatgttttcctggcctcatatccctgatcccaaaatgttctcatgctaagtttttatcccttcgcctctctttcctctcatgacagaattgtttggagtgatggaaaaaaagtgatacagtattttaatgaagaaacactctcttttttttttttttttttttttgagacggagtctcgctctgtcgcccagcctggagtgcagtggcatgatcttggctcactgcaagctccacctcccaggttcactccattctcctgcctcagcctcccaagtagctgggactacaggcacccgccaccatgcctggctaattttttgtatttttagtagagatggagtttcactgttttagccaggatggtctcgatctcctgaccttgtgattcgcccgccttggcctcccaaagtgctgggattacaggagtgagccactgcgcccggcccatgaagaaacactctctatggtcaagttttatcacctgtcagggaattcaaacacaggcatattagctactggaagcattctgggcagcctagacttacttgccctgacctggatgtaaagctccacttgccctgaatttgcttcttttatttctgcagtagagtggacagcagggtggttagcactttacattttgtgaactctcatcagtggatgtgtttgtatttaattctacttaaatattatgagtttttttcttattaaagacctgaccttaacatgcttcttagggaatagcctatgtattcaccaagagaaattgaactcagcaggttaaaatctgactggaataactgaatcaagaggtttgtagaaagctttaagttctcagtagggattttagtcatttgaacaaggatttgaaataagtccagcaggtgcctaagaatacatttagtagtctttttttttttttttttaagttctgattaaaagagctttttctgcttttccttttgtcctaaataccagtagtaaaaccaaggagatttctctggaattcttgagggcccttccccaccttttctggggaagatgctgttttagtatagaattggcttttatttttatttttaaaaaatctaatggagtttttggggtacttttgtttgggctttgttgttgttgttgttgttgttgttttgttttgttttgttttgtttttgagacagagtcttgctatgtcgcccaggctggagtgcagtggtgcaatctgagctcactgcaacctctgcctcctgggctcaagtgattctcctgcctcagccatccgagtagctaggattataggtaccaaccaccacggccagctagtttttgtatttttagtagagacggggttttaccatgttggccaggctggtattgaacccctcacctcaggtgatctgcctgcctcagcctcccaaagtgctggaattacagacatgagccacagcacccagtcaaatccaatagagtttaataattgcattcaaggggtaaccttaacgtttgaccaactcaaattcaacaaaccaaaatcccttaagcaattggtcccctttcctacttaaatagaattggcttttaggtaaatcaccagagagctatcaactgagcaagaaaaatgaccactgttatttggactaaaatgtttcttttctgtctatagaacttttataaaagctgagttacatttatgcggtgcttgtgtggtagtgtgattgaggttgcattcattttttaactgagttgataatgtgctcagaagctggtgtgtaacctacctacttctgttgcttttctccctgctcaggtgtggtttcagaattgtagagcacgccacaagaaacacgtcagtcctaatcactcatcctccaccccagtcacagcagtcccaccctccaggctgtctccacccatgttagaagaaatggcttattctgcctacgtgccccaagatggaacgatgttaactgcgctgcatagttatatggatggtaggtatcccaacatttaacagctgtctcccaggcaatcagcaactggtaacttctaatattagattattgatacaattcacattttgaaatattacctcagtagtagctgaaaaatattgtggggggtgcagtagagagcaaaattatccaaacatttttatttctgtgattacattttaaggaagaagtttaatactcactttgcagctaagatgcaaatattaataatgactcaatgcttgatctttacttagaaattttttgtttgtttttaccggtaaatatttaaatactttatttcctgtgatcagagcaagtgttcactcagatctttagatgggagtttaataagttttgttaaagagttgttttttatagaagaaaatcatacatttagaagagtgcatacgtaataactattcagcttgatgaattaataaaatgaatgtatccatatagatattgcccaaagtagcagatataattagcatttcagaagcctctcttatgtctccttccaattattatccttttctcccaaagtaacatggcactgatttctaaaaccaccctttagttttgccctttttgaaccacacagaatgtattttgtgtctcacttctttcaattacattgtgagattcacctatattattgtgagaatctgttatttgttttcattgttatatagaaatccactgtaggaatataccacaatttatccatttcctggttaatagatatttgtgttttttccagtttgtgcttttatgaatatgctgctatggactttattgtacatgctttttgtgcacattaattcacatttctactagatatgtacctgggagtgggacataaggtcatgggctacacatatgctcaacttcagtcattctgacagatagtttttcacagtggttgaaccagttacaccttgaccagcagcaaggttcaaggtgcttcacatcctcaccaacacttggtatggtgtacttcctgatattagcaaatgtgatgattgtgcagtgcaatcttattttaatttgcctgtccctgatgactgagcatattatcatcaggtatttgtatattctcttttgtgaagagctgtacaagtctttttgtctttcggcctactggcttgtctttattatttatttaaatggattcgcttaatttcttcatgtaatctgcatataaagctttttgataattgtatgtgcttagaatattttctcctacttagttgcttggctttttctactctcttaatggaatgtttcattgagcacaagttcctaattttaatgtagtttatttcatcatttttccttcatgagccatgctttttttggtgacatgtgcaagaaattgtttatactcaaagataatgaagatatatcttctatgatatcatctagaaactttgttttacctttgctgtgtagatttacaattcatttggaactgaattttgtgtgtggtgtgaggtagaaagtgaagcttttttgttatgttgatgaaaatagaaaatgtccagcttctctgtagagacatatttgccataaatcaaatgtccgtatgttgtgtcaatttctgtaccttctgttctattttattggtctatttatttttgtgttgctacttaatcattctaatcatggtaggtctataatttttaatatatgataatgtgtttctattttgttgttattcaagtttgtattgcccattcttggccctttatgttttcataaaatttacctacttgtctatttctaccccaaaagggaaaacaattaagattttgatacaatctattacagcaaatatattgatcagttttaggaaattgccatcttaacagtattttcttccataccatgaactttagcatgtctttccatttgtttagatcatctttaaatcatctcatgatttagacttttctgtttagtaatcttgcacatcttctgttaagtttatctctaagtatttctttgaatcagtggtagtggtatatctctataagtagaaatctggattggtagttattttctttcagcacttggaagatatgattaccttgtcttctgattttcattgtttgtttggcatatggatagctaattaacctggccccatttattggtaaagtcagctattgaccttcttgctccttcgaaaataaacgtcttttttcctcaacttttttctttgtgtttgtcttgaaaaagttttaccatactgtgcctgggtgtgcttcttgaatatgtagtttgatgtctttcattatggaaaattctcagcttttgcctcctcaaatattgtttttgctcctatgaaaaaattttcttgttttcttctgaactatttttctagttcactaatgctctctatatctaatatcctgtaaaaaaatcatccaccgacttcttaatttattatgtttttcagttttaagatttccatttatatgctgaaatcatccattttgtcactttatccttatttaaattgttatactaaagttcaggtgtgataactccaatatctggatctttggtgggtctattctgttttcttaattttcctctttattttctttcaagtcatgtcttgttatttgtcttcttatttgctattgcatttcagatgttgggtatgagtaactaaaaataatttgaggctgtggatgatatctttcactagagaagattagttttaccccccaggtagtcagaatagggtgaaatcaacttaatccaatcaggcacaaatccttaagagggctggtatatttttgttttactactccttggagttagccctttggaatcacaaatgaatccctgttttgttttgttttctgttgttgtttttaactagggcttctcctcttcagcgggccctgctctttaatttttgtttctcaccactctgccaaagtctaacttctgaatgctctgctaaacttcttggcctatcagacatttgttttgttttaaattgtcactatccttgcgggaggaaaagcatcctcattttctttccctccactctgggactttgtaagtcctcactacttaagtgtctttcagatgccttcaaacagattttaaaaattttgtccagatttcctagttggtctcagagaaaggtttggtttgaagcaacatagcccttgctgaaagcagaaacttcattttaagttttggttagataaaaaatcagagcctgtactgttgttgccatttacttatactagcattaaaattgtgtgtgttcacatgaaacacagtagtgttgcctgagtccagtgtgttttgatgtatgcttagggaggaggtaattaaacattaatgaaagaaacttggggaagatcatcctatacaaacaccttcatgagaaagctagcagcagcatctctgaagaggaacccatgtctttctagcttcagggtgaagtgcagtgaatggggtatggatggaggacattaaaatggcaaaatcttgtggccccaaataaagatttgggggtaaaactgttcctggactctcactatgctgaataggttaatgcttctgctgaggtcagtggaatgagtgtagcttggtgccctcagctataatgagtgatgaaaacattgccttggattgtttttgtttgtttataaatcagttttatgcaccctacaaaactgatccacaaatttctttctattttgtagctcattcaccaacaactcttggactccagcccttgttaccccattcaatgacacaactgccaataagtcatacctaattcttttttcagggatagacttgattaaggatataaatttgtcatttattatgtataaaataccattgaaaagatattactgttaattttttatttaacacctaaagcatttccaacatcactttgctgcccaggtatgtatctatagttggcctgcaagacacttttattaattcttcattttttgtaaaacttatgtttacaagaagaaaacaaatcaaaacattttttgtattgtctggaaatagttcactctagtgtgtatctgttaatttatttgtcatcaaaagagcactttgcctaaaagaaaggactgacaagtgtgcaaaatgtttacaatcttttgtgaaattgtagtttatcattagtttgtatctgtaagttattgtaataaatattacctgtattttttgttatatacaactttatactttgaagcttgtatctgtgaatttgcaactgaaatttattttgccaatgttttctgaatgaactgaataaagcttctgttgtagcatgccatgcaaacacattattgtgtttgtggttgatgaattatggctgtaaataacactatagtttaataagcccaccattctgagtttattaaacattttccattcttgtgaaaatttcaaccagtttgtcctttttgtgtgttttcagcagtaagttgactttagtctctttaaaatctaacaactaataagtttaaaaagtattgtgttttgagctgcattgtatgaatacatttgagtaggaaacatattattcaaaaaaaaaaaaaacacagtaaaacatttaatttggcaaaaattgtcttttaggccagctaataaaatcaatgtgaaagagaaggcagaacacttttcagaatggacttcggagggtattacaagccagaaatgaaatatgggccataatatatttcttcaggagtgaaaaaagagaactaaaagtttctagagcaagaactctttgcattttcttcttggtgaataccctttagggatggtgattctgagagctgaaatcttaaacctcaggactttatcttatgtggcagtggacttacaaatttttgaatttaaagaatttagtactcactttttgtctttttatatgccagttggggaagaaaaaaggtaatgagaaaaaacttttagaacttaggtttaagtctgtgtttaactgagcagatttgcatcaggctgaggactggaaataatagcagagtatttgtaattttattctagtaatcataaatacaaccagaaagtaatcatatggatataagtaacttatctgcctgaaaccagaagcaacaaacctgcttcattatgggagaaaggggagggattttttttttttttaaaccggctactctattttaaatccctttgtagccagaagtcaacccatctaatcttgagcctgatgctaatctctgtgggtttttgtctacctgtcccaggcatgaagtgatgaggtcagctttacctttacctgatgtctaggaaagcttttgtagtatagccaagctctgcactgttagcagtttacagcatttcccagctgactataattggcatcccttagcttgggaggtggctgattgtgagtattcatttttatttgctgtctttttcctgtgctcatcatcctctgactctgtacagagagtttttacaaaatatatcaccaccctttttagttccaaagatgaatgcccaaagttgaagtaaaacttcctaacaaagaggctcaaagctatcaaaatagatgagatttatatatcctgaatataaaactgttaatcatgaaaagagatagatgtgaaagtactaaaaatatgatatgtgatagaagcttctgactttgctatctctagccagagatc

SEQ ID NO: 522 - DNA, 1164 bp, Homo sapiens
atgctgaacggtaccactctagaggcagccatgctctttcacgggatctccggaggccacatccaaggcatcatggaggagatggagcgcagatccaagactgaggcccgtctggccaaaggcgcccagctcaacggccgcgacgcgggcatgcccccgctcagcccggagaagcccgccctgtgcgccggctgcgggggcaagatctcggacaggtactatctgctggctgtggacaaacagtggcatctgagatgcctgaagtgctgtgaatgtaagctggccctcgagtccgagctcacctgctttgccaaggacggtagcatttactgcaaggaggattactacagaaggttctctgtgcagagatgtgcccgctgccaccttggcatttccgcctcggagatggtcatgcgcgcccgagactctgtctaccacctgagctgcttcacctgctccacttgcaacaagactctgaccacgggcgaccatttcggcatgaaggacagcctggtgtactgccgcgcccacttcgagaccctcttgcaaggagagtatccaccgcagctgagctacacggagctggcggccaagagcggcggcctggccctgccttacttcaacggtacgggcaccgtgcagaaagggcggccccggaagcggaagagcccagcgctgggagtggacatcgtcaattacaactcaggttgtaatgagaatgaggcagaccacttggaccgggaccagcagccttatccaccctcgcagaagaccaagcgcatgcgaacctctttcaagcatcaccagctccggaccatgaaatcctactttgccatcaaccacaacccggatgccaaggacctcaagcagcttgcccagaaaacaggtctgaccaaaagagttttgcaggtttggttccaaaacgcacgagccaaattcagaaggaaccttttgcggcaggagaatgggggtgttgataaagctgacggcacgtcgcttccggccccgccctcagcagacagcggagctctcactccacccggcactgcgaccactttaacagacctgaccaatcccactatcactgtagtgacatccgtgacctctaacatggacagccacgaatccggaagcccctcacaaactaccttaacaaaccttttc

SEQ ID NO: 523 - DNA, 6101 bp, Homo sapiens
agccaggaggcggaagttcccgcgggcggtggggacggcgccctcaccgcgagtcacttgtcagcccttgtctgaggcggaggcagccccgcgccgcgccggacccgagcatatttcattttctgtcattggactttgagccattagaaccatgagcaactacagtgtgtcactggttggcccagctccttggggtttccggctgcagggcggtaaggatttcaacatgcctctgacaatctctagtctaaaagatggcggcaaggcagcccaggcaaatgtaagaataggcgatgtggttctcagcattgatggaataaatgcacaaggaatgactcatcttgaagcccagaataagattaagggttgtacaggctctttgaatatgactctgcaaagagcatctgctgcacccaagcctgagccggttcctgttcaaaagggagaacctaaagaagtagttaaacctgtgcccattacatctcctgctgtgtccaaagtcacttccacaaacaacatggcctacaataaggcaccacggccttttggttctgtgtcttcaccaaaagtcacatccatcccatcaccatcgtctgccttcaccccagcccatgcgaccacctcatcacatgcttccccttcacccgtggctgccgtcactcctcccctgttcgctgcatctggactgcatgctaatgccaatcttagtgctgaccagtctccatctgcactgagcgctggtaaaactgcagttaatgtcccacggcagcccacagtcaccagcgtgtgttccgagacttctcaggagctagcagagggacagagaagaggatcccagggtgacagtaaacagcaaaatggcccaccaagaaaacacattgtggagcgctatacagagttttatcatgtacccactcacagtgatgccagcaagaagagactgattgaggatactgaagactggcgtccaaggactggaacaactcagtctcgctctttccgaatccttgcccagatcactgggactgaacatttgaaagaatctgaagccgataatacaaagaaggcaaataactctcaggagccttctccgcagttggcttcctcggtagcttccacacggagcatgcccgagagcctggacagcccaacctctggcagaccaggggttaccagcctcacagctgcagctgccttcaagcctgtaggatccactggcgtcatcaagtcaccaagctggcaacggccaaaccaaggagtaccttccactggaagaatctcaaacagcgctacttactcaggatcagtggcaccagccaactcagctttgggacaaacccagccaagtgaccaggacactttagtgcaaagagctgagcacattccagcagggaaacgaactccgatgtgcgcccattgtaaccaggtcatcagaggaccattcttagtggcactggggaaatcttggcacccagaagaattcaactgcgctcactgcaaaaatacaatggcctacattggatttgtagaggagaaaggagccctgtattgtgagctgtgctatgagaaattctttgcccctgaatgtggtcgatgccaaaggaagatccttggagaagtcatcagtgcgttgaaacaaacttggcatgtttcctgttttgtgtgtgtagcctgtggaaagcccattcggaacaatgtttttcacttggaggatggtgaaccctactgtgagactgattattatgccctctttggtactatatgccatggatgtgaatttcccatagaagctggtgacatgttcctggaagctctgggctacacctggcatgacacttgctttgtatgctcagtgtgttgtgaaagtttggaaggtcagacctttttctccaagaaggacaagcccctgtgtaagaaacatgctcattctgtgaatttttgaaagtcaacagttcaggagaagagaaggaatttgaagagaaaaaggaaaattaaaattactaattaatttttagattcaatatttatatggagttttgaaaaataatagtggccctgaaggaataaattccagctttaaaaaccaagtctgaggaaatatttggcttcataaagtaaagagacggtttggcatttattattactttttcctgtattttatgcccataaaataagctttataaaaaccaatttcctgatggactattaaattcatcttagaataaattagtgaagaatttaattttagaataaataatccaatctgaaataattataccttctttccttgttaggtagttatgagtaaatctgcaaaaggcaatgaaaatgccttaaattttatcaataacagaattattgtatttaaaaaaaaactaatacttatctttaaaatagtaaataggattttaaacagagaattttatcagtaataggtgtcagtttttaaaaaattgcttgtaggctgagcgcggtggctcacgcctgtaatcccagcactttgggaggccaaggtgggtggaccacatgaggtcaggagtttgagatcagcctggccaacatggtgaaaccccatctctactaaaaatacaaaaattagccggacgcagtggcacgcgcctgtaatcccagctactcaagaggctgaggcacgagaatcacttgaacccgggagggagaggttgcagtgagccaagatcgtaccactgcactccagcctgggtgacagagtgagactctgtctccaaaaaaaaactttgcttgtatattatttttgccttacagtggatcattctagtaggaaaggacaataagattttttatcaaaatgtgtcatgccagtaagagatgttatattcttttctcatttcttccccacccaaaaataagctaccatatagcttataagtctcaaatttttgccttttactaaaatgtgattgtttctattcattgtgtatgcttcatcacctatattaggcaaattccatttttttcccttgtgctaaggtaaagatttaattaaataattttggcctctcatagttttctctctctttaaagagaataaatagagggccaggtgtggtggctcacgcctgtgatcccagcactttgggaggccaagacgggcggatcatgaggtcaagagatcaagatcatcctggccaacatggtgaaaccctgtctctactaaaaatacaaaaatgagctgggcatggtggggcgtgcctgtagtcccatgtacttgggaggctgaggcaggaaaattcttgaacccaggagacggaagttgcagtgagctgagatcacaccactgcactccagcctggtgacagagcaagactccggctcttaaaaaaaaaaaaaaaaaaaaaaaaagagagagagagaataaatagaaaagaatgtggctgggaattgtgaatcagaagattataccccccaattgtttttcaatccccttttctcaaataataaattagttaaatcagtttctgagttatgccactggctgatgaagagttgagaggtctctttgcagaatgatctttttgtttcgttttgtttcttcttctgcatttaaaaattaaaagattggtttgaggatgtgatgaaattgagactttttgtggttttctctcaataataagtgaaccaatttcaaatgtgatcacaaagtttggaaagcttttattcacagaggttgggtagtgttgggaggggagtttaattactcagattggcctgttatttgatttcctcctttgggaaaagaattatgtagataccacatggagacagggaaacaattgtggtaaaactgtggatcctgttgctatttgcccagtgagaaaacagattctggtatttgatttggtttttctctttgtttccagaatggatgaaagtccatgaacctcctaagttataatttaaatttgtttggggcaaggtgattttatagtcgagacagagccctaggtccttcctgccccatcactcacttacgacatcacttccattgtgtgcatgtttgttatagaggaggttttaggctacaatatttgtttaacctccctaagaactttcaaggcatctgtcctgaaagctgttaatttatggtctagcagatttatattatatgcagataataattaactggggataaaagaatggcaaggggtgacacaaagtagcaaactgaatacttctccaatagcaaccccaagctacctcctcaccctgcatcttggagggaggcaggaaatttcttttgaaataaagtgctggagctgaattctgcattatttatcgttgctgctgaaaccacctataaaagacttgctggctaatgtgcattgtcatataatgtacactgtcacatctttacagtcttgtatgttatagaatacaaaataagttgatggttttgtttggtgtgagctttttgtttgtttgtttagttttgccttcataggttatatgccaagatagtatttgataagtcaatgacatttggatgttttcttcaaagaattttatttgacccagatttcttataaagttatcttacattaaggatgtcattttcatcagaccttctttctacatattattcatgaagcataatgttgcatttctccaaattttatgcctgaaagggtagtgttgcttcctaaggtatcatgttgtctttgtgctttgtccatctcttccgtggcgaagctttatatctgttcctaaaacagttaatcctgtgaaataaatattgaacataatccagaagaatctctctgtttcccttggggaatgccatatttaattcaccagcagtaatcctttaataactggcagagcactttattcttctggtgagctccctgaatatttatttttctgattataaattttctatattagtagcattttttaattattacttcttcactatagagcatttacttttagtctctagatgtatattttggaatgctgtacttggcataacatagattaaaatcataatgcatgactaaaaactccttggatttatttcccattttaaaatttttagcggtaagttcagatttataatctttctctagacttccatggtctgaatgttgcctgctgaagtagcaacctaaaaagtatcccctgcttatgcttgtccagttggccctccatgtccataggcttcgcatctgtgattcagcccactgtgggtcaaaaatatttggggaaaaaaatggatggttgcgcctttgctgaacatgtacaaacttttttttgtcattaaacaatatagtataacaactatttacaaagcatttacattgtattagctattataggtaatctagagatgatttaaagtgtatggtaggatgtgcataggttatatgcaaatactacaccattttctataagggacttgaacatcatggactttagtatcctagggggttcttggaacccatcacccataggggcaccataggacaactatagtaccgtgtttatttcctattaattcaggttccgtttagagtctaaaactaaaacctaatcatttagtcacagtgtaaaaacaaatggaaataacagctcaaatcttcaaaatattactatagcattatgtttaaaataatctacaacaaaaatgtaccattttcaagcagtactacattaggagcccttttatagaaaataatttcttctttacccccgttccagtgtgaatctagtattctgttaacatttgtgtggcatttggagtttgtcatccccattgaagggagagccttctcagacatgaagcaagggaaacatactgaatagttttacacaaatttgatctggcttccatttgtccccctcatttcccaaatgtttaaatgtattggatttggattctcaatgtataagttgccttatctgttaatgtctatcttctgtctctttaattttgtatatctgctgttttgcttttggatacattttctaattagaagtcacatgataaatataatcagtatagtaataataccataatgtgcacatactcaataaataaatgactgcattgttgtaaatga

SEQ ID NO: 524 - DNA, 4014 bp, Homo sapiens
gtgcgggggaagatgtagcagcttcttctccgaaccaaccctttgccttcggacttctccggggccagcagccgcccgaccaggggcccggggccacgggctcagccgacgaccatgggctccgtgtccaaccagcagtttgcaggtggctgcgccaaggcggcagaagaggcgcccgaggaggcgccggaggacgcggcccgggcggcggacgagcctcagctgctgcacggtgcgggcatctgtaagtggttcaacgtgcgcatggggttcggcttcctgtccatgaccgcccgcgccggggtcgcgctcgaccccccagtggatgtctttgtgcaccagagtaagctgcacatggaagggttccggagcttgaaggagggtgaggcagtggagttcacctttaagaagtcagccaagggtctggaatccatccgtgtcaccggacctggtggagtattctgtattgggagtgagaggcggccaaaaggaaagagcatgcagaagcgcagatcaaaaggagacaggtgctacaactgtggaggtctagatcatcatgccaaggaatgcaagctgccaccccagcccaagaagtgccacttctgccagagcatcagccatatggtagcctcatgtccgctgaaggcccagcagggccctagtgcacagggaaagccaacctactttcgagaggaagaagaagaaatccacagccctaccctgctcccggaggcacagaattgagccacaatgggtgggggctattcttttgctatcaggaagttttgaggagcaggcagagtggagaaagtgggaatagggtgcattggggctagttggcactgccatgtatctcaggcttgggttcacaccatcaccctttcttccctctaggtggggggaaagggtgagtcaaaggaactccaaccatgctctgtccaaatgcaagtgagggttctgggggcaaccaggaggggggaatcaccctacaacctgcatactttgagtctccatccccagaatttccagcttttgaaagtggcctggatagggaagttgttttccttttaaagaaggatatataataattcccatgccagagtgaaatgattaagtataagaccagattcatggagccaagccactacattctgtggaaggagatctctcaggagtaagcattgtttttttttcacatcttgtatcctcatacccacttttgggatagggtgctggcagctgtcccaagcaatgggtaatgatgatggcaaaaagggtgtttgggggaacagctgcagacctgctgctctatgctcacccccgccccattctgggccaatgtgattttatttatttgctcccttggatactgcaccttgggtcccactttctccaggatgccaactgcactagctgtgtgcgaatgacgtatcttgtgcattttaactttttttccttaatataaatattctggttttgtatttttgtatattttaatctaaggccctcatttcctgcactgtgttctcaggtacatgagcaatctcagggatagccagcagcagctccaggtctgcgcagcaggaattactttttgttgtttttgccaccgtggagagcaactatttggagtgcacagcctattgaactacctcatttttgccaataagagctggcttttctgccatagtgtcctcttgaaaccccctctgccttgaaaatgttttatgggagactaggttttaactgggtggccccatgacttgattgccttctactggaagattgggaattagtctaaacaggaaatggtggtacacagaggctaggagaggctgggcccggtgaaaaggccagagagcaagccaagattaggtgagggttgtctaatcctatggcacaggacgtgctttacatctccagatctgttcttcaccagattaggttaggcctaccatgtgccacagggtgtgtgtgtgtttgtaaaactagagttgctaaggataagtttaaagaccaatacccctgtacttaatcctgtgctgtcgagggatggatatatgaagtaaggtgagatccttaacctttcaaaattttcgggttccagggagacacacaagcgagggttttgtggtgcctggagcctgtgtcctgccctgctacagtagtgattaatagtgtcatggtagctaaaggagaaaaagggggtttcgtttacacgctgtgagatcaccgcaaacctaccttactgtgttgaaacgggacaaatgcaatagaacgcattgggtggtgtgtgtctgatcctgggttcttgtctcccctaaatgctgccccccaagttactgtatttgtctgggctttgtaggacttcactacgttgattgctaggtggcctagtttgtgtaaatataatgtattggtctttctccgtgttctttgggggttttgtttacaaacttctttttgtattgagagaaaaatagccaaagcatctttgacagaaggttctgcaccaggcaaaaagatctgaaacattagtttggggggccctcttcttaaagtggggatcttgaaccatcctttcttttgtattccccttcccctattacctattagaccagatcttctgtcctaaaaacttgtcttctaccctgccctcttttctgttcacccccaaaagaaaacttacacacccacacacatacacatttcatgcttggagtgtctccacaactcttaaatgatgtatgcaaaaatactgaagctaggaaaaccctccatcccttgttcccaacctcctaagtcaagaccattaccatttctttctttcttttttttttttttttaaaatggagtctcactgtgtcacccaggctggagtgcagtggcatgatcggctcactgcagcctctgcctcttgggttcaagtgattctcctgcctcagcctcctgagtagctgggatttcaggcacccgccacactcagctaatttttgtatttttagtagagacggggtttcaccatgttgtccaggctggtctggaactcctgacctcaggtgatctgcccaccttggcttcccaaagtgctgggattacaggcatgagccaccatgctgggccaaccatttcttggtgtattcatgccaaacacttaagacactgctgtagcccaggcgcggtggctcacacctgtaatcccagcactttggaaggctgaggcgggcggatcacaaggtcacgagttcaaaactatcctggccaacacagtgaaaccccgtctctactaaaatacaaaaaaattagccgggtgtggtggtgcatgcctttagtcctagctattcaggaggctgaggcaggggaatcgcttgaacccgagaggcagaggttgcagtgagctgagatcgcaccactgcactccagcctggttacagagcaagactctgtctcaaacaaaacaaaacaaaacaaaaacacactactgtattttggatggatcaaacctccttaattttaatttctaatcctaaagtaaagagatgcaattgggggccttccatgtagaaagtggggtcaggaggccaagaaagggaatatgaatgtatatccaagtcactcaggaacttttatgcaggtgctagaaactttatgtcaaagtggccacaagattgtttaataggagacgaacgaatgtaactccatgtttactgctaaaaaccaaagctttgtgtaaaatcttgaatttatggggcgggagggtaggaaagcctgtacctgtctgtttttttcctgatccttttccctcattcctgaactgcaggagactgagcccctttgggctttggtgaccccatcactggggtgtgtttatttgatggttgattttgctgtactgggtacttcctttcccattttctaatcattttttaacacaagctgactcttcccttcccttctcctttccctgggaaaatacaatgaataaataaagacttattggtacgcaaactgtca

SEQ ID NO: 525 - DNA, 2228 bp, Homo sapiens
tcagcccacttccggggagggaggcagaggaacccctccccgccgctcacccctaagcccagccctcggctcccacccttgtgtacctgggccgaaccattcaccggagcgcgcagcgggtggagtgtggctcggaggaccgcggcgggtcaagcacctttctcccccatatctgaaagcatgccctttgtccacgtcgtttacgctcattaaaacttccagaatgcaacaggacggacttggagtagggacaaggaacggaagtgggaaggggaggagcgtgcacccctcctggccttggtgcgcgccgcgccccctaaggtactttggaagggacgcgcgggccagacgcgcccagacggccgcgatggcgctgttggccggcgggctctccagagggctgggctcccacccggccgccgcaggccgggacgcggtcgtcttcgtgtggcttctgcttagcacctggtgcacagctcctgccagggccatccaggtgaccgtgtccaacccctaccacgtggtgatcctcttccagcctgtgaccctgccctgtacctaccagatgacctcgacccccacgcaacccatcgtcatctggaagtacaagtctttctgccgggaccgcatcgccgatgccttctccccggccagcgtcgacaaccagctcaatgcccagctggcagccgggaacccaggctacaacccctacgttgagtgccaggacagcgtgcgcaccgtcagggtcgtggccaccaagcagggcaacgctgtgaccctgggagattactaccagggccggaggattaccatcaccggaaatgctgacctgacctttgaccagacggcgtggggggacagtggtgtgtattactgctccgtggtctcagcccaggacctccaggggaacaatgaggcctacgcagagctcatcgtccttgactggctcttcgtggttgtggtatgcctggctgccttcctcatcttcctcctcctgggcatctgctggtgccagtgctgcccgcacacttgctgctgctacgtcaggtgcccctgctgcccagacaagtgctgctgccccgaggccctgtatgccgccggcaaagcagccacctcaggtgttcccagcatttatgcccccagcacctatgcccacctgtctcccgccaagaccccacccccaccagctatgattcccatgggccctgcctacaacgggtaccctggaggataccctggagacgttgacaggagtagctcagctggtggccaaggctcctatgtacccctgcttcgggacacggacagcagtgtggcctctgaagtccgcagtggctacaggattcaggccagccagcaggacgactccatgcgggtcctgtactacatggagaaggagctggccaacttcgacccttctcgacctggcccccccagtggccgtgtggagcgggccatgagtgaagtcacctccctccacgaggacgactggcgatctcggccttcccggggccctgccctcaccccgatccgggatgaggagtggggtggccactccccccggagtcccaggggatgggaccaggagcccgccagggagcaggcaggcgggggctggcgggccaggcggccccgggcccgctccgtggacgccctggacgacctcaccccgccgagcaccgccgagtcagggagcaggtctcccacgagtaatggtgggagaagccgggcctacatgcccccgcggagccgcagccgggacgacctctatgaccaagacgactcgagggacttcccacgctcccgggacccccactacgacgacttcaggtctcgggagcgccctcctgccgaccccaggtcccaccaccaccgtacccgggaccctcgggacaacggctccaggtccggggacctcccctatgatgggcggctactggaggaggctgtgaggaagaaggggtcggaggagaggaggagaccccacaaggaggaggaggaagaggcctactacccgcccgcgccgcccccgtactcggagaccgactcgcaggcgtcccgagagcgcaggctcaagaagaacttggccctgagtcgggaaagtttagtcgtctgatctgacgttttctacgtagcttttgtatttttttttttaatttgaaggaacactgatgaagccctgccatacccctcccgagtctaataaaacgtataatcacaaaaaaaaa

SEQ ID NO: 526 - DNA, 1274 bp, Homo sapiens
cagcgggagacggccacgagattcccccatctctttgaatataattttagattgagattcagattaaatccgaggggaaaacactttatgaggctgaaagctgtgtcgttgccagagacagggttatgagctatcaaatgcaattacattaagacagattatactgggcaaattgagccatttagaaggtgagaatcaaagaaacggctctgatcctcttttcccccttctctctccctctccctctctctctaaattgcagttcgtagttccttccaattcggaggcacaaaagtaggtgagactgcttttgtatctgcgaagtgcttcactcctgaatgtaattctagctgagtgcaatctaggttaagagccggacaagcgggtaattagagcccgctagctgcccgaggaccggccgccccgccaaagcgcgccccgagtcggcgcccttctcccggccgagcctagctgcggctggacacggagcgcccgagatgatggtgctggacaaggaggacggcgtgccgatgctctccgtccagcccaaagggaagcagaagggctgtgcgggctgtaaccgcaagatcaaggaccgctatctgctgaaggcattggacaagtactggcacgaagactgcctcaagtgtgcgtgctgtgactgccgcctgggcgaggtgggctccaccctctacaccaaggccaacctcatcctgtgccgacgcgactacctgaggctctttggcaccacagggaactgtgctgcttgcagcaagctgatcccagccttcgagatggtgatgcgggcccgggacaacgtgtatcacctcgactgcttcgcctgccagctctgcaaccagagattttgtgtgggagacaaattcttcctgaagaacaacatgatcttgtgtcagatggactatgaggaagggcagctcaatggcacctttgaatcccaagttcagtaacgcccggcgcctggcctccaggcccgtctgtccatctgcccgcctgcccacctgcctggccggccagccagccactctaccagtgcaggctggccagccgctctcctgccacattagaacttctccgtcctcgatgggagggatggcccttcctcctccaccaccgcccgtctgtgtgtgacccctcctggggccaggccgggcctgtacagtctgtcttctgtatataaatgggaacatttattttatgagaaatgtaatgcgattttattactggcgtggattaaacttatgaatgtttccggg

SEQ ID NO: 527 - DNA, 2303 bp, Homo sapiens
gaattcgtccaaactgaggatcacaagtctccacattctgagtaggaggatgagggtctgagttaggatttgggtcctgcagggcttgctaaggaatcccctgatggcctaggattccacgcagagcacatctggtgtgagagagctcgctgcaagggtgaaggctccgccctatcagatagacaaccaggccaccaagaggcccagccctccaaaccctggatttgcaacatcctcaaagaacagcaacgggccttgagcagaattgagaaggaaatacccccacctgccctcagccgttaagtgggctttgctattcacaagggcctctgggtgtcctggcagagaggggagatggcacaggcaccaggtgctagggtgccagggcctcccgagaaggaacaggtgcaaagcaggcaattagcccagaaggtatccgtggggcaggcagcctagatctgatgggggaagccaccaggattacatcatctgctgtaacaactgctctgaaaagaagatatttttcaacctgaacttgcagtagctagtggagaggcaggaaaaaggaaatgaaaccagagacagagggaagctgagcgaaaatagaccttcccgagagaggaggaagcccggagagagacgcacggtcccctccccgcccctaggccgccgccccctctctgccctcggcggcgagcagcgcgccgcgacccgggccgaaggtgcgaggggctccgggcggccgggcgggcgcacaccatccccgcgggcggcgcggagccggcgacagcgcgcgagagggaccgggcggtggcggcggcgggaccgggatggaagggagcgcggtgactgtccttgagcgcggaggggcgagctcgccggcggagcgccggagcaagcggaggcgcaggagcggcggcgacggcggcggcggcggcggcgcccgagcacccgagggggtccgagccccggcagccggccagccccgcgccacaaagggagcgcccccgccgcccggcaccccgcctccctccccaatgtcctcggccatcgaaaggaagagcctggacccttcagaggaaccagtggatgaggtgctgcagatccccccatccctgctgacatgcggcggctgccagcagaacattggggaccgctacttcctgaaggccatcgaccagtactggcacgaggactgcctgagctgcgacctctgtggctgccggctgggtgaggtggggcggcgcctctactacaaactgggccggaagctctgccggagagactatctcaggctttttgggcaagacggtctctgcgcatcctgtgacaagcggattcgtgcctatgagatgacaatgcgggtgaaagacaaagtgtatcacctggaatgtttcaaatgcgccgcctgtcagaagcatttctgtgtaggtgacagatacctcctcatcaactctgacatagtgtgcgaacaggacatctacgagtggactaagatcaatgggatgatataggcccgagtccccgggcatctttggggaggtgttcactgaagacgccgtctccatggcatcttcgtcttcactcttaggcactttgggggtttgagggtggggtaagggatttcttaggggatggtagacctttattgggtatcaagacatagcatccaagtggcataattcaggggctgacacttcaaggtgacagaaggaccagcccttgagggagaacttatggccacagcccatccatagtaactgacatgattagcagaagaaaggaacatttaggggcaagcaggcgctgtgctatcatgatggaatttcatatctacagatagagagttgttgtgtacagacttgttgtgactttgacgcttgcgaactagagatgtgcaattgatttcttttcttcctggctttttaactcccctgtttcaatcactgtcctccacacaagggaaggacagaaaggagagtggccattctttttttcttggcccccttcccaaggccttaagctttggacccaaggaaaactgcatggagacgcatttcggttgagaatggaaaccacaacttttaaccaaacaattatttaaagcaatgctgatgaatcactgtttttagacaccttcattttgaggggaggagttccacagattgtttctatacaaatataaatcttaaaaagttgttcaactattttattatcctagattatatcaaagtatttgtcgtgtgtagaaaaaaaaacagctctgcaggcttaataaaaatgacagactgaaaaaaaaaaaa

SEQ ID NO: 528 - DNA, 5415 bp, Homo sapiens
gctctgtcagtaacacatgtgtaagagccgcggagggagcgagcgagccggctagaggccagcgccgccgccgccgccgcctccgagccgggcagcaacagccccggcagcggcgcaggctccagcgcgccgggcccggccggccgcagcccccgacgcctgggtgcgcctgcctgccggcctccgcaccgtccgccgccgctcccggggctgttgtgtctgcgactgctcccggccggaggtgcagggagctcagccgagccgccgctgccatcccggagcgagcaagcgagcgagcgcgcgggagggaggaaggcggcggcggaggaggaggaggagcgggaggagcgcgggcgggggcgggggcccccgggcgggggaatatacaaagtgaagccacattgccaaacttgcagcagcgattgcagcagttgctgccgctgcgccgcgcctgaagccgcgccgcgcgggccgagggctcctgcagctgctcgcgcgcagtcggaggcggagaaggacgaagactgagactgacacttctgctcccggccgcccggcacttacgcgggggccccccaacccgccccagagcaacgcgatttaaaaaaaaaaaaaaagccgcccttagccccctcctcccctttcctgcttctgcgagaactccctccctccctccagctccgccagcccaggcgccccttccctggaagccgagcggcttcgctcgcatttcaccgccgccgcctctcgcaatattgcaatataggggaaaagcagaccatggtgaatccgggcagcagctcgcagccgcccccggtgacggccggctccctctcctggaagcggtgcgcaggctgcgggggcaagattgcggaccgctttctgctctatgccatggacagctattggcacagccggtgcctcaagtgctcctgctgccaggcgcagctgggcgacatcggcacgtcctgttacaccaaaagtggcatgatcctttgcagaaatgactacattaggttatttggaaatagcggtgcttgcagcgcttgcggacagtcgattcctgcgagtgaactcgtcatgagggcgcaaggcaatgtgtatcatcttaagtgttttacatgctctacctgccggaatcgcctggtcccgggagatcggtttcactacatcaatggcagtttattttgtgaacatgatagacctacagctctcatcaatggccatttgaattcacttcagagcaatccactactgccagaccagaaggtctgctaaaaggtcagagtaatgcagaatgcgtgccttcatctcagatttgttcatcacaggtggatcccatgtgtcttcagtagacaagtcacctttgtagctagcaccagtgccagctccatgccattgcaccttctttagtcttgattgcccttcccgcatttattggtgtattaaaatgactgaatatgaacattaaggactccatgaacctgggctaatgggagactgtagagaaaatgaaaaaagatccaccagaggacatcttggggagggggagggagctgggggggagggaaatgactaatgaagctaattaaaagaagcattcaaatctgctttctaccctcattaacaattagcagggcactggccagagtttgtaccctgtgttttaccttaacaacattctatttgctctttgtatatttaagtgttgtaaggaaacgtgtttcaatcaaaactgaccatgagataaaggaaagagatgtggcttttgtgatattctatcacaaacacttattgtatctctgtaaaatacaatgtatgtatgcatgtaagtgtttttgtcctaatgttgctactcccatggcaaagaaaaaaaaaagaatgaaaaaaagaaaaaaatttggaaaaaaaaatcaggctcatagcagctactgtgtagaaaattccccctacttctaatttgctgaatgaagaaaaaaaaaaatcttttatttgtgatattttcagagacatttgctctagtatggtgtatttaaataataaaaacttaaaagaaaaaatatttaatggtgtttgggtttaaacactgctttttctcttctgtattttgaagaaatttagtttttattgttgttgaataacaagctcactttaaatttgaaggagttgagggaggtggagtgtatatttatttagctctgggccagtaaggtattcttcaaattacttaaccacgccattattggcaggggtacaaagtagtttctaacagggtcctttctataagtcaagaatattctgttaacagcatttcgttacacttctatatcacagtaagtcttttgtgtttataaatacttgagtgtccactattttgtttattctttttctcaatagcaaacaaagccttgggtattgatgaaaagtatgtataaaaaaaaatacggcacaaccatcctgttctcttattgagtttatagcttttgaaggaagtcacaatttctaagtcatacctgtacatattttgaagctcacttagttgtagggacccagagctctttttttatggtgatctttgattggtgaagtagccatttcctggtgacccttaggctcgtgtggttggctgtaaggtgtttattttgttttgctcctacacttctttactgactgcgtttccgtatgtattttgggggaagattctgacttcatttagtcttagtcttgagatactgagttgctggttgcaggcagcagagtgtccaccacagtgcctgcactgcccgcagagctgccctccggaaagcatgcagtataacagctagtgctggaaggaggaaaaccaaataggcctggaggctgaggttgtactgccagcttccttagatgtgagcaaatttcaactacaacttccatcacaggctaataaaaccaggtgtgtgaacgctactattttaaattttcttttttaagatggcattttattttgttccagaaaagcgcctgatgtagaccctccctctgagaatagccgtggagccatgtagagaggtgtagctcagcacatctcaactaccagtcagcttccctttgagaacttctgtgctcacttcctgttttcagagattccagggcaggggaaaaaaaaaatcagttgaacttcaaacctcctagaggagattgtaaaggcatagagttgaggtgaatagttttgttagaaccttataaaaataaaatgcaagaaaataatatgaagaaatcacatatatatgtttgaattagatgtctgtttgaattagatccttggggaatttcttcaaactagttctggttcttatatttgttttttttcctttaaggaactttctgaaggaagttagactgcgatggtaaagggggaaatgggttaatgagattgcaggcattttctatattctttttggcataagcacttatgtccctgatatgtacaaattcaaaggaggtggttaataactttagtaaataatatattgtcgcatttaatgatgtggagggctaaggtcattacggactttaaataaactattatatggctggttcctcaagcactgctgcgtatttaataatgagcttctaaaagcatttcttaagttgcagacctataagattacaaatgtcactcatgttagtataatccacatgcaagtgatgaagccttctctttgatgtgctaaattggagaaggactaatggagctatgaatatacaatagaacatatttaagtagtagtcttgctttaggtaaaacactttcttgaaaccagaggcatttcaaacaataaaacccggctctaatggggatgctctgtgtggatagaaagctactaaaaacactcaggtttattctgatgtgagcagcgattgtgtgcagttcctcccccaatctcaacattgcttaggaaaaaaaaaaatctatgagtttattccacctttcatccattgcatttgtgatgttattagttagcaagatggacactgttctttagaaaggacttatttaatattaaccacgtcatagagcaagatggcccccagtccctacaagcaagtgcaattaaaaataaaagcaaatgttactgagccctgctgaactcctgataaaaaaaattatgtttatggtacatataaatgtctcaatcatgcaaattgtcactcttgttaatgaaacaattttgtaaaaagatagtcctctaaaagggtttaatgttttttacctatctaactgtctaattagatttacacatcccgcaaggcaggggagcctgaagcttttccaaaccaaatcgtttgccactagaaactattttcagctcttcatgatttattaggaaatagtttaacccggactgtagtgtcttataaaatacaaaacgagaaaactgacacaccaaaatgaagtctgtgaaattgtcatcctcttaatattacctgtatttaaattctttcttttgcccttattaacactgatatttgaaacaactaatcatctaaaaggaagctcttaaagggctttaaatgtcaatatagtaagattctaatgtgcactactatttatataaaatatttcttagggcccataaatcatataataaacagtgaacccaagagctacatatggagtctagtgaagagttcccatgtagcctaactaattgtatttaaattgaggagatccaaaaaccccatcacccttcaccccaaagaccccttcacccttcaccagggaattctatcctgggtgctgtcccacctatgaccccttcaagaggccattggaaaaaggccatttacaagttaatgttacttatagctttgttactaagactcacctattgttagtgcagccaagtcacagaagtgcttattgcagttaaatagcaatttgtttccatgaaactgcaattaaagtattactgagcagccattttagattggcagtgctctgaacgcatgttaaacagccagctactcccacttgcagagtctgagatctgactagcagcaaagtgtagcacattcgccgatgctgggtacctagttaaagaggcatttgtagccctctgctcccatcgtgaacatgctgagagcaatgacaagtcagggctgatttttggaaggtgaacttgcaacttacctcaagtgaatactgttttcagttgtgcaagaagtgctttatgctagtagatatgtgcatgtttcctagagggaatgttttcaagttcagattgattctgctgagaatggacggcaactcggaggcctcaagccaataatgtactacaggccctgacatgttacagctgtgtaaacagggccattctatttcctaaatcacaactaataaagcagaggatgaaaatcaaaaaaaaaaaa

SEQ ID NO: 529 - DNA, 1990 bp, Homo sapiens
ccggcttgaccctgcccgggcgcgccatgttcgcgcgtgggtcccggaggcgccgctccgggcgtgcgcctccagaggcagaggacccagaccggggccagccctgcaactcctgtagggagcagtgccctggcttcctgctccacggctggagaaagatctgccagcattgcaaatgcccgcgggaggagcatgcagtgcacgcggtgcctgtggacctggaacgcatcatgtgtcggctaatctcggacttccagcgccactccatctccgacgacgactcaggctgtgcatcggaggagtatgcctgggtgcccccaggccttaagccggagcaggtatatcaatttttcagctgcctcccagaggacaaggtcccctacgtcaacagtcctggggagaaatacaggatcaagcagctgctgcaccagctgcccccacacgacagtgaggcacagtactgcacagcactggaagaggaggaaaagaaagagctccgagcctttagccagcagcggaagcgggagaatctggggcgtggcatcgtgcgcatcttcccggtgaccatcactggggccatctgtgaggagtgcggaaagcagattggaggtggggacatcgcagtgtttgccagccgtgcaggcctgggtgcctgctggcacccacagtgcttcgtgtgtaccacgtgccaggaactgctggttgacctcatctacttctaccatgttggcaaggtctactgcgggcgtcaccatgccgaatgcctgcgtccacgctgccaagcctgtgacgagatcatcttctcccctgagtgcacggaggctgagggccgccactggcacatggatcacttctgctgctttgagtgtgaagcttcactaggagggcagcgctatgtcatgcgtcagagccgcccccactgctgcgcctgctacgaggcccgccacgcggagtactgtgatggctgtggggagcacatcggcctggaccaaggccagatggcttacgagggccagcactggcatgcctcagaccgctgcttctgctgtagtcgctgtgggcgggccctgctgggccgcccattcctgccacgccgaggcctaatcttctgctctcgagcctgcagccttgggtccgagcccacagctccagggccgagccgccgcagctggagtgccggccctgtcacagccccacttgcagcctccacagcctctttctctgctgtgaagggggcatcagagaccaccaccaaaggcaccagcacagagttagcgccagctacaggccctgaggagccctcccgctttctgagaggggctccccaccgccactccatgccggaactggggctccgcagtgtccccgagccgcccccagagtcccccggccagcctaacctgcgcccagatgatagtgccttcggtcgtcagagcaccccacgcgtcagcttccgcgaccctctggtgtctgaaggaggcccgcgccggaccctgagtgcacccccggcccagcgccgcaggccacgcagtcccccacccagggcccccagccgtcgccgccaccatcatcataatcaccatcaccatcacaaccgccacccaagcagacgtcgccactatcaatgtgacgcgggatcagggtcagactcggaatcttgctccagctcgccctccagttccagttccgaatcatcagaggatgatggcttcttcctaggagagcgcatccctctgcccccgcatttgtgcaggcccatgcctgctcaggacactgcaatggagaccttcaactccccatctttatcgctccccagggactctcgcgcagggatgcctcgtcaggcccgagacaagaactgcatcgtggcttgaaggcaggccgtcctggagggggctccattctccagtcagagtagatgatgaggcccatgcccctcacccccacgccccgcccctacaacctaagtcataaatcctcttcctccctc

SEQ ID NO: 530 - DNA, 7253 bp, Homo sapiens
ggaaagaagtggaataattaggaacctagggtggggtagggtagcaggacatttcaaacattaatgagcatatgagattccaggtcttgttaaaatgcaaattctgattcagctggtaggtgaggtctgagattgtgcatttctaacaagcactcagataatcttaaggctgttggccccagggtcacacttatagtgattttctagaacccagttggggaagtgaatcttgggcaggagaaatacacacctcttgcattgagtttggagatctcatctgatataactttttaagaaagaaaaataattttccaaatatccaattgataagctttcccactaagtggctttcccactaagtggctgcgttatgaaaattgcttcactttgaaacttctggtcttggtaatatagaatttctgtgttctcacagtgcttgattgagaatatgatattgagattatggcataaaatatagtggctgtacaaaaaaaaatacattattaggatctctaacaattatgtaaaagtcattgcttcatgggtagagctcaaactttggtgtgagacctggttttattcttggcacttactctgagttgtcttaggcaaattaataccttaagcaaaaatattctcatgtacattttacatgagaattataaatgaagtacataaagtccagcagtcacaaatgttatctattattaccatcgtcctaagactgcaatcagctatagtgaaagtagtctcaaagattgtttcataaatcatcagattcacctaattttctaaagaatttaaataaggagatggaatgaatagattgcattttgtttccatgcacaggggaactgtgcatatttcttctgtgactcggaaatggtttaacttttaaaaatcccaaaatagctgaagttagcagacatgcaatttaccaaggatgattggaatttttatctttcctgtaataatactatacccaagcacactgctcatgaggaaaacatttttatgtgaatcttttactcttgggggcaaagaatgctgtttttctttttgataactatgtttatagaatctaaatcaccctgagcaattatttcaacatctaaagttattattaccattcatgtttcatttatagctatttgaattttgatgaatttcaatatggtgctacagtgatagggcaagtgcaaataagttcaatatatgggtacggtctaaagctattttaatttttttattacaactgctatgaagaaaattaggatatgccatattttcacgttttacagttggatgtcctatgatgttctcttccagagaacagagctcggagctctggaaatttggaggcaactgatatgtgctcatgtctgcatctgtgtgggttggctgtatctcagggacagagtctgcagcaaaaaagatataattttgaggactgaacaaaattcaggaaggactattctcattaaggcagtaacagagaagaattttgaaacaaaagattttcgagcctctctagaaaatggtgttctgctgtgtgatttgattaataagcttaaacctggcgtcattaagaagatcaatagactgtctacaccaatagcaggattggataatataaacgttttcttgaaagcttgtgaacagattggattgaaagaagcccagcttttccatcctggagatctacaggatttatcaaatcgagtcactgtcaagcaagaagagactgacaggagagtgaaaaatgttttgataacattgtactggctgggaagaaaagcacaaagcaacccgtactataatggtccccatcttaatttgaaagcgtttgagaatcttttaggacaagcactgacgaaggcactcgaagactccagcttcctgaaaagaagtggcagggacagtggctacggtgacatctggtgtcctgaacgtggagaatttcttgctcctccaaggcaccataagagagaagattcctttgaaagcttggactctttgggctcgaggtcattgacaagctgctcctctgatatcacgttgagaggggggcgtgaaggttttgaaagtgacacagattcggaatttacatttaagatgcaggattataataaagatgatatgtcgtatcgaaggatttcggctgttgagccaaagactgcgttacccttcaatcgttttttacccaacaaaagtagacagccatcctatgtaccagcacctctgagaaagaaaaagccagacaaacatgaggataacagaagaagttgggcaagcccggtttatacagaagcagatggaacattttcaagactctttcaaaagatttatggtgagaatgggagtaagtccatgagtgatgtcagcgcagaagatgttcaaaacttgcgtcagctgcgttacgaggagatgcagaaaataaaatcacaattaaaagaacaagatcagaaatggcaggatgaccttgcaaaatggaaagatcgtcgaaaaagttacacttcagatctgcagaagaaaaaagaagagagagaagaaattgaaaagcaggcacttgagaagtctaagagaagctctaagacgtttaaggaaatgctgcaggacagggaatcccaaaatcaaaagtctacagttccgtcaagaaggagaatgtattcttttgatgatgtgctggaggaaggaaagcgaccccctacaatgactgtgtcagaagcaagttaccagagtgagagagtagaagagaagggagcaacttatccttcagaaattcccaaagaagattctaccacttttgcaaaaagagaggaccgtgtaacaactgaaattcagcttccttctcaaagtcctgtggaagaacaaagcccagcctctttgtcttctctgcgttcacggagcacacaaatggaatcaactcgtgtttcagcttctctccccagaagttaccggaaaactgatacagtcaggttaacatctgtggtcacaccaagaccctttggctctcagacaaggggaatctcatcactccccagatcttacacgatggatgatgcttggaagtataatggagatgttgaagacattaagagaactccaaacaatgtggtcagcacccctgcaccaagcccggacgcaagccaactggcttcaagcttatctagccagaaagaggtagcagcaacagaagaagatgtgacaaggctgccctctcctacatcccccttctcatctctttcccaagaccaggctgccacttctaaagccacattgtcttccacatctggtcttgatttaatgtctgaatctggagaaggggaaatctccccacaaagagaagtctcaagatcccaggatcagttcagtgatatgagaatcagcataaaccagacgcctgggaagagtcttgactttgggtttacaataaaatgggatattcctgggatcttcgtagcatcagttgaagcaggtagcccagcagaattttctcagctacaagtagatgatgaaattattgctattaacaacaccaagttttcatataacgattcaaaagagtgggaggaagccatggctaaggctcaagaaactggacacctagtgatggatgtgaggcgctatggaaaggctggttcacctgaaacaaagtggattgatgcaacttctggaatttacaactcagaaaaatcttcaaatctatctgtaacaactgatttctccgaaagccttcagagttctaatattgaatccaaagaaatcaatggaattcatgatgaaagcaatgcttttgaatcaaaagcatctgaatccatttctttgaaaaacttaaaaaggcgatcacaattttttgaacaaggaagctctgattcggtggttcctgatcttccagttccaaccatcagtgccccgagtcgctgggtgtgggatcaagaggaggagcggaagcggcaggagaggtggcagaaggagcaggaccgcctactgcaggaaaaatatcaacgtgagcaggagaaactgagggaagagtggcaaagggccaaacaggaggcagagagagagaattccaagtacttggatgaggaactgatggtcctaagctcaaacagcatgtctctgaccacacgggagccctctcttgccacctgggaagctacctggagtgaagggtccaagtcttcagacagagaaggaacccgagcaggagaagaggagaggagacagccacaagaggaagttgttcatgaggaccaaggaaagaagccgcaggatcagcttgttattgagagagagaggaaatgggagcaacagcttcaggaagagcaagagcaaaagcggcttcaggctgaggctgaggagcagaagcgtcctgcggaggagcagaagcgccaggcagagatagagcgggaaacatcagtcagaatataccagtacaggaggcctgttgattcctatgatataccaaagacagaagaagcatcttcaggttttcttcctggtgacaggaataaatccagatctactactgaactggatgattactccacaaataaaaatggaaacaataaatatttagaccaaattgggaacatgacctcttcacagaggagatccaagaaagaacaagtaccatcaggagcagaattggagaggcaacaaatccttcaggaaatgaggaagagaacaccccttcacaatgacaacagctggatccgacagcgcagtgccagtgtcaacaaagagcctgttagtcttcctgggatcatgagaagaggcgaatctttagataacctggactccccccgatccaattcttggagacagcctccttggctcaatcagcccacaggattctatgcttcttcctctgtgcaagactttagtcgcccaccacctcagctggtgtccacatcaaaccgtgcctacatgcggaacccctcctccagcgtgcccccaccttcagctggctccgtgaagacctccaccacaggtgtggccaccacacagtcccccaccccgagaagccattccccttcagcttcacagtcaggctctcagctgcgtaacaggtcagtcagtgggaagcgcatatgctcctactgcaataacattctgggcaaaggagccgccatgatcatcgagtccctgggtctttgttatcatttgcattgttttaagtgtgttgcctgtgagtgtgacctcggaggctcttcctcaggagctgaagtcaggatcagaaaccaccaactgtactgcaacgactgctatctcagattcaaatctggacggccaaccgccatgtgatgtaagcctccatacgaaagcactgttgcagatagaagaagaggtggttgctgctcatgtagatctataaatatgtgttgtatgtcttttttgctttttttttaaaaaaaagaataactttttttgcctctttagattacatagaagcattgtagtcttggtagaaccagtatttttgttgtttatttataaggtaattgtgtgtggggaaaagtgcagtatttacctgttgaattcagcatcttgagagcacaagggaaaaaataagaacctacgaatatttttgaggcagataatgatctagtttgactttctagttagtggtgttttgaagagggtattttattgttttttaaaaaaaggttcttaaacattatttgaaatagttaatataaatacataattgcatttgctctgtttattgtaatgtattctaaattaatgcagaaccatatggaaaatttcattaaaatctatccccaaatgtgctttctgtatccttccttctacctattattctgatttttaaaaatgcagttaatgtaccatttatttgcttgatgaagggagctctattttctttaccagaaatgttgctaagtaattcccaatagaaagctgcttattttcattaatgaaaaataaccatggtttgtatactagaagtcttcttcagaaactggtgagcctttctgttcaattgcatttgtaaataaacttgctgatgcatttaacgagtgggtcgtctttttcttaggtgtatgtgtctgacctcaggccttttagccatatttcagtatgtggccttttttgatgttatgttttatccagtagctttactaaggtataattgatgtaataaactgcatatatttaaagtgtatactttgacaaattttgacatggtgtataccttcgaaactatgccacagtctggatgtgtttactgaaacattttaataaggaagtttatttttgataaagttatgtttttggatacaatatatttgtatggtgagagtgatgaattgttggatcatttgaataaaatcttttactaaccccatgataaaaggagaagacaacagtgagcttagaatatctataaagcaaaaaatgtagtctcttgtttaaaaaatctggagcgggaatgcaaggatacaaaactttagcatgctttgagcaaaaatttaaacttactggaatcttttataataatgtaagtggaatggaggattctaggaactgagaactgtattggaataggttcaaaatatgtaagaaatgctaatgtgggagataaaaattttatttagtacttattctgattattattaaagtaataatgtgttccttgaggataacttgtcaaatgccccaaagcataaagaatataattctgaatcccaaattccaaagacaagaactctgtgtttgaattcattctgcatataattatttataagtatagattgtgaatttttccatgttcttaaaattatttttatcttttttcatggttgcatagtgctccattgtttggccttggtaatatttagttgataattccattactgtgtatttttcacttgtttctaagatcaaacattttaatatgtgcatgttatatataaatatgtaaattctgtgatactctatgatcatctctttctttatattattttcatagacatgaaatagttgctcagagattatgcattttaagacactcatagtatatattgccaaagtggtttccagaaaggcactgctggcttcgactcctataagcagcacgtgggcttgttcatctcactgcatgtttatgaagatacagttcttttgccttgttctctgcctgatgtgtatgcagaggcagccctcaatatgcagtggttgaataaatgaatgaagaaaccactatcaaaaaaaaaaaaaaaaaa

SEQ ID NO: 531 - DNA, 410 bp, Homo sapiens
aaatgagtcacttcttcaagaccctcatgccagtgtttcatctccatttcaggtgccgagccccttttccatgacctggatagcgacgacacctccctcagtaacctgggtgattgtttcctagcaacctcagaagctgggcctctgcagtccagagtgggaaaccccattgaccatctgtactccatgcagaattcttacttcacatcttgagtcttcccctagagttctgtgactaggctcccatatggaacaaccatattctttgaggggtcactggctttaggacagggaggccagggaagaggtgggttggggagggagttttgttggggatgctgttgtataatgatatggtgtagctcagcatttccaaagactgaatacattatggattgcatagtttaatg

SEQ ID NO: 532 - DNA, 5783 bp, Homo sapiens
gcgtcccatggatatagcaacaggtcccgagtcgctggagaggtgcttccctcgcgggcagacggactgcgccaagatgttggacggcatcaagatggaggagcacgccctgcgccccgggcccgccactctgggggtgctgctgggctccgactgcccgcatcccgccgtctgcgagggctgccagcggcccatctccgaccgcttcctgatgcgagtcaacgagtcgtcctggcacgaggagtgtttgcagtgcgcggcgtgtcagcaagccctcaccaccagctgctacttccgggatcggaaactgtactgcaaacaagactaccaacagctcttcgcggccaagtgcagcggctgcatggagaagatcgcccccaccgagttcgtgatgcgggcgctggagtgcgtgtaccacctgggctgcttctgctgctgcgtgtgtgaacggcagctacgcaagggcgacgaattcgtgctcaaggagggccagctgctgtgcaagggtgactacgagaaggagaaggacctgctcagctccgtgagccccgacgagtccgactccgtgaagagcgaggatgaagatggggacatgaagccggccaaggggcagggcagtcagagcaagggcagcggggatgacgggaaggacccgcggaggcccaagcgaccccggaccatcctcaccacgcagcagcgaagagccttcaaggcctccttcgaggtctcgtcgaagccttgccgaaaggtccgagagacactggcagctgagacgggcctcagtgtgcgcgtggtccaggtctggtttcagaaccaaagagcaaagatgaagaagctggcgcggcggcaccagcagcagcaggagcagcagaactcccagcggctgggccaggaggtcctgtccagccgcatggagggcatgatggcttcctacacgccgctggccccaccacagcagcagatcgtggccatggaacagagcccctacggcagcagcgaccccttccagcagggcctcacgccgccccaaatgccagggaacgactccatcttccatgacatcgacagcgatacctccttaaccagcctcagcgactgcttcctcggctcctcagacgtgggctccctgcaggcccgcgtggggaaccccatcgaccggctctactccatgcagagttcctacttcgcctcctgagagccagccaggcgcacggacgcttgggcaggggcctgggggggactgccagcctctgcggccagcctggccacccccgccctgctctccgcacagactacagacagccatacggtgccctcccctcggccagctgggcctgaccactgtgcccgttgggtacagccagaccggtagatgggcacagcctgggcaggggctgtgtcctgcccacagagaccttgtcatccccagggacccagagctctcggacggccactcgcctcccagccccacctcggcctccatcgcctcctccccatctcttttttgggaagcttaaattctctctatttttttaaatgtcctctctgtgtccatggccctccatgcaagccccaggacaatggtgtcatgaggcggtgacctgagaagcgtgtgtacctgtgccccagcaagggcaggggtggcctctgggggcaggcccactgcctggaaccgcacacccctcagcctgagtctggagcagcagtggagaggggcctgaggggaggcactgtcaggaggcgggctcggagcctgagcctgggcaggcgcaaagggacagagaggcacgtgcagacacatgcacacttgcagacaaacccacgcaaacacacacacagctgtatggggacaccagaagggacagggatgctcagcgggtctgtcctgccttgtcagaaagagaaaaggaggccaggcaggggaccccccagttcttaagagcgattggaaagggaggaaggggagaggaagaggcgaacttgaagcatcggacccagttgtatcccagcctgggcccaaatgggggcagcctgggcagggagggcagccccaggccccaccaactctagaggcagatggagcccccagaaccaggtagcatcagaccagacaacagagcctccaggggtcagggacttcagaagcacctgctgggcaccccatctgcaatgtggtcctctccccagccacctctgcctcccctcacatacctccagtgacaaggagctcactaggtcagcgagcccacagcagctgtgctgtcctgcatcccagagccaggcttccccagctctccctcttaacactgtcccccagcaggcctccggctgtccctctaaaggtgtggggcaggtatcacttcaccttcccactgatgtcagccggccagaagtgagcaggcacatcacctctcctgctgtggcacccttcctctgttaatttggcccaaaagacaatgatttggccacatgaccttagagattcaccctgccctgctgtagctaaatccctgggccccacacgcaagtgacagctaagccacatctgttttctgtgtatatgcaggatgggggcacctactgttttgttttgttttgttttgttttgttttgttttgttttgttttgttttgtttgagacggagtttcgctcttgttgcccaggctggagtgcaatggcgcgatctcggctcaccacaacctccgcctcccaggttcaagtgattctgatgcctcagcctccctagtagctgagattacaggcatgcgccaccacacccagctaattttgtatttttagtagcaacggggtttctccatgttggtcaggctggtctccaacccccgacctcaggtgatccgcctgcctcggcctcccaaagtgctgggattacaggcgtgagccaccgcacccagtctgcacttactgtttagactgaatgagggaccgtgacctctttccttttccattccttcttactcgattcattccagcctgtggaatttctctgcaccctgattcagtgaccactgctctcctctctcccagcacatctgcccagtgaggagttggccctgggtctcacctgaggtgtgtggaccgggctggcctctccctgtttgacattggcccattaatgcatcctctttgggggacacattccaattgcatttcctgcccccttctcccagggcaattgcagaagattgtgtcaggcgccctgctggaagtcaggtgcactagatccatccccagccccagtctgctcaactctatccctgtcagagcaaggaggctgggctgctggggcctgactggtgagcccaccctgtcccctggtgatcactgtgtccccttgttcaggtgctcacaaccctacctttaactctgaggtcaagccctaggccaccaccctaaagtctgcctggtccaacctttgagcaagtaaggataatgaatgtcccttttccacctttggggccctctgcctggatctctggaatcctctaagttcaacctgttctgtggttttgctcccgtttgctgggaaattcagtccccccagaatgtcctgggccaacctccttgcctgacatgtggcctcgtgtcacccattgggccccagcagccagctagcccttctgcagctcttcttacaaacagagcctctccaaggacctcagttgatgttctggtccttctgccgcctcagcccaccagggtccgtgccaccatgggtctcttgagcagcagctgcactggcttctggagagacacccctctttctccttttgcacatgcaccatctgaatcgtgccagggacatcctgggcagattcaggggcagatgccctatcccccaggagacctggcccttctctctcagacccaataagttggaagggacgtcagaagcggtcatctcatctgccccttattttatagttggaaaccctgaggcaagagagggaaagaggcctgtccaaggtccgggttagtgacagagctgagctgagaacagggacgttgtgccccactgtcccctgtggtttgtgaatgacctccaggtcagggggtcacaacttgttcttagtaaacttgccagctgttggggtcacatattcccattctggggcctcacaaacccccgaatccagccgggaccccatgccaggagctggtctagggacagcatgcttgtgacccacagactgttaaagccagaagggacctcagagagtcccttatgctggaggcgccctgtcagccgtggctaggggccccttgctctatgctgtgccttgctgcccacaggctcccagacaccagtgcccactctgcccagccccggactgggtgtggctcgcagatgaacaagatgcagggcctgccttgaggggtgtctcctagaaggaaagccagactctccggcccagccagagagtccagacatggcagggacccgtttctcagatgaggagcctgaggctcagagaagggaggcgatgtgttcagggccacccagcagaagcctgtggggctgggcaaccttctcccactttatgggaggagctgcagccttggctgggagctgggcggggagtagccaggaccaccccttgcccgtgccgtgacatggaaccttcatcactaagggggctggagtgggaagagggagataactgtgtggtctccagagcaaaagagaatgagaggtgggcagggggagtcttggcaaaagaccaagttccacttccctgctggggaagtcaaggctcagaaagaggaaataattgccccaggtaacacagggcagaggagggacaaaaagctgggcatggccccagccagagcctcatctgcctactccgtgaagcctcccaggtactctgctatcctgggaaacgcacagggaggccacacagagacactgctcacaagagtcagaccaaggtgccagcacagcctggaaagagctcagaaagggggttggtgcacgtggctgggcatcttaggaggcttcctgagggtgggtaaaggtgggaaggccctggcgctgcatcagatgagcagggcctggcagggacaagcctcttctcctttgggaagccctgcagcctcctagcaagaggctgattccccactctgcccccatctgaatgtccttttcatgttgcacgcagggaacctcaggaaggaggattgcctgatgcctgcctggctccatccttgagctctgggcaccacctagggtgagggagagcctgcagctctggggctaagtctgccctggggggaaagggctccacgctcacacgcacgcgctcgcacacacacactcacacctggacgcacacggaggcttgcggacccatactcacaggcacatgtggcctggggactgggggagcaggaaagacccctccaacatttggcccttggaaggcaccattgccaatgagcctctttgctggttcccccgaccccacctgggggtcccatgggagcccagcccagccaggtgtggggatgggccaccggccattcctgttttccttgtacagacagattctcactacccacccgccatccccagacacattttatttaataacttgtcattgttaaattatttattagcgtttaccacaccaccacccccaccctgccctccactctcaccttccacctcttcccacaacagcagaaaatggaaacaacaacaaaaaaagatgagacatcagtatatttgtaaataaaccgacctgtacactcaaaaaaa

SEQ ID NO: 533 - DNA, 1468 bp, Homo sapiens
cgagagcacgtgtccagaccctagcctgtacgacgctgactctgcccggtcccagaaccaaagccatgccggggtgtggcctctgaccccacgcggaggggacctcgccttgcgggaccccacctggaacccgacctcccagcctcgcagccggcctgagccgccatgcgcgggaagttgctgccgctggccggcctctacctggtgcagggcctgccctacgggctccagtccggcctcctgccagtgctgctgcgtgccggcggcctctcgctgacgcgcgtggggctggccaaggttctgtacgctccgtggctgctcaagctggcttgggccccgctggtggacgcgcagggctcggcgagggcctgggtgacgcgcagcacggcgggcctgggcctggtgtgtgggctgcttgccgggctgccccctcctggagctggccaggccgggctgcccgccgctgtggcggggttgctgctgttgttgaacctgggtgccgccatgcaggatgtggccctggacgcgctggctgtgcagctgctggagccggccgaactggggccgggcaataccgtgcaggtggtcgcgtacaagctgggggccgcgctagctgggggcgcgctgctggcgctgctgcccaccttctcgtggccgcaactctttctgctcctggctgccacctactggctggccgcggccctggcctgggctgcaccagccctgcggcggctcccacagcagcccccttccgagcagcgtccccacaccgcgcaccttctgcgggacgtgctagccgtgccggggaccgtgtggacggcaggctttgtgctcacctacaagctgggtgagcagggtgccagcagcctgtttcctcttctcctgctggaccacggcgtttctgctcccgagttgggactgtggaatggtgtgggtgctgtggtctgctccatcgctggctcctccctgggtgggaccttgctggccaagcactggaaactgctgcctctgttgaggtcggtgctgcgcttccgcctcgggggcctagcctgtcagactgccttggtcttccacctggacaccctgggggccagcatggacgctggcacaatcttgagagggtcagccttgctgagcctatgtctgcagcacttcttgggaggcctggtcaccacagtcaccttcactgggatgatgcgctgcagccagctggcccccagggccctgcaggccacacactacagccttctggccacgctggagctgctggggaagctgctgctgggcactctggccggaggcctggctgatgggttggggccacatccctgcttcttgctcctgctcatcctctctgcctttcccgttctgtacctggacctagcacccagcacctttctttgagctgagtggctggagtggtcaataaagccacatgtgcctgtgaaaaaaaaaaaaaaaaaaaaaa

SEQ ID NO: 534 - DNA, 1765 bp, Homo sapiens
gatgtggctgggccattgtttctctctgctgccggagctccaggtctacccttcactgctctgtgtcctcagcgtgtgtggcttcgtgacctgaagatactgggaaatccatagctaagatgccaggaccccctgaaagcctagacatggggccgttgacatttagggatgtggccatagaattctctctggaggagtggcaatgcctggacactgctcagcaggatttgtataggaaagtgatgttagagaactacagaaacctggtcttcttggcaggtattgctgtctctaagccagatctggtcacctgtctggagcaaggaaaagatccctggaatatgaagggacacagtacggtagtcaaacccccagtagagacggggtttcaccgttttagccaggatggtctctatctcctgacctcgtgatccgcccgcctcagtctcccaaagtgctggtattacaggcgtgagccaccatgcccagcctaataaaaatttttttatttctattgtatccaatagcttgttttaagtgtgtagaacaataacttacacttttatgttaattttatattttgttaatttactgactgtattattagtttagacaaatttcaatgtactgtggttttttatgtgtaagattatatgttcctcaaacagcaactttttacttatttgtcttcagtttcaatggctttaaaaagaattcttttttcattattctgccacatgcttccagtgctatgttaaaatagaaacattgacaaagggcacaatagagtttactattggtgtctgtgaatttgaaatggcaaacaactccttaagtttttataagctgatttcaggaggtaaagatcttcttttcttgtgttccccagggttttgggatgccctctgggtttgtagtggagtggggttgtaacttggttgcaaggctgctggttctacattagggtccatatttagttgtcatgttacaagaggcttgggtagttgtacttcccaatttttttttttttttttttttttttttttgagacaggagtctcgctctgtcgcctggctggagtgcagtggtgtgatctcagctcatcaaaacttttgcctccctagttcaagcgattctcctacctcagcctcctgagtagctgggattacaggtgcccaccagcacgcccagctaattttttgtgtgtttttagtggagacggggtttcaccatgttggctaagctgggtctcgaactcctgacctcaggtgatccacccgccttggcctcctgggtgctgggattacagacgtgagccaccacccccggccacttgtttcttttaaatgcttattaaaagtttctcatcagaatattttatttataattatactgcatattctctgaaattttactgccaatttttcaaaatacctgcttttgatgagtacagttacagtcaaatactgtagttagacaaattcttttttaatggtatattaatgttgcataccaaattgtatgagttaaacgtctcttcctgtgcagtttcatattagtggtgttttcagtgtaggtatcttaatatcagcttatcgtggtttttggttatgtattataattttagtcaatttgcaattctgtctgtatactttatgtcaatgtgaggttgaattaaaagatagccatatgtctatcacaaaaaaaaaaaaaaaaaaaaaaaaaaaaaaaaaaaaaaaaaaaaaaaaaaaaaaaaaaaaaaaaa

SEQ ID NO: 535 - DNA, 2724 bp, Homo sapiens
ggaagccggcatggcgctccggtcaataaaatcgatagctggaagctgcctgtgttccaggcaaaggcggtgcggtagcagcgccgccattttccccgaaggcatcttccggtgcctttcacccaagttcgggcaggagtttcctgaataacagcaaaaggtttccgttagccccgcgggcgaccaattccgattccctccgggcctccccggccacgctcagccctggtccggcaggggctcctcgatcccaggggccgccagcgcccgagggccgaggcctggacacggaaggccgtggcgccggcttctcgggtcccatggcgccaccttcggctccgctccctgcgcagggaccaggaaaggccagacccagtcggaaaaggggcaggaggccgagggctctgaagttcgtggacgtggccgtgtacttctccccggaggagtggggctgcctgcggcccgcgcagagggccctgtaccgggacgtgatgcgggagacctacggtcacctgggcgcgctcgggtgcgcaggtcccaaaccagccctcatctcctggttggaacgaaacaccgatgactgggaaccggctgctctagatccgcaggagtacccgagagggctaacagtccagagaaaaagcagaaccagaaagaagaatggggagaaggaagtattcccgcctaaggaggcaccccgaaaggggaagcgaggccggaggcccagcaaaccccgactgattcctaggcagacgtccgggggccccatctgccctgactgcggctgtaccttccctgatcatcaggccctggagagccacaagtgcgcccagaatctaaaaaagccttacccttgcccagactgtgggcgccgcttttcctatccatccctgctggtcagtcaccggcgggcacactccggcgagtgcccctatgtttgtgaccagtgtggcaaacgtttctcccagcgcaagaacctctcccagcaccaggtcatccatacaggggagaagccctatcactgccctgactgtggtcgctgcttccggaggagccggtccttggccaatcaccggaccacacacacaggtgaaaaaccccaccagtgccctagctgtggacgtcgcttcgcctacccctccctgctagccatccaccagcgtacacacacgggagagaagccctacacttgcctcgagtgcaaccgccgcttccgccagcgcacggccctcgtcatccaccagcgcatccacacgggcgagaagccctacccgtgcccggactgcgagcggcgcttctcctcctcctctcgcctggtcagtcaccggcgtgtgcactctggggagcgtccctatgcctgcgagcactgtgaggcccgcttctcccagcgcagcacgctgctccagcaccagctcttgcacaccggagagaagccctacccctgcccagactgtgggcgtgccttccggcggagcggctccctggccatccatcgcagcacgcacacagaggagaagctgcacgcctgcgacgactgtggtcgccgctttgcctacccctcactgctggccagccaccggcgcgtgcactcgggcgagcggccctatgcctgcgacctttgctccaagcgttttgctcagtggagccacctggcccagcaccagctgctgcacacgggggagaagcctttcccctgcctcgagtgtggccggtgcttccgccagaggtggtctctggctgtccacaagtgtagccccaaggccccaaactgtagccctagatctgctatcgggggctccagtcagaggggcaacgcccattagaaggggaaggactgcctacgttcatttcattttatggagggtcccagaaaagggaaggaggagccccaggtcatacagggcagagtcagaactaaacccgggtctcctgctgcacagagctgaactttgtatcttgcaatgcgctggctgcctccctgtgcgtgtctggaacagtcccattaggagaggtgacgtcatttgcttaaagttttccaagctaccctatcctaaaatagtttgtgtggatatcagggctaaaagttctccccatctattttaggggctgtctgcttttctagtctgtccacacagggattacctgtcatcttgcatgcaatcaggagaatctcataggggcaggaccttcccctactctgcctcttcctccatactaggttggaaaaatctggtttagcccactttttgcaacactcctgccaagtggtcttctacccattgcttgaaaatctctcttgacagggagctcactacctcacaaggcaggtcatttcattgtgggatctatagaaggttaagtaccacattctcctctaaaccttgcctacgacatgtttaatacttcatctacatagcagcccttcagataatcacaaccactttgcccccaagttttcaggttaagtagcatgaatttggtcattccttaaagacagggtttcaatttccacacatgatctctgcaaacaggcactgggttttcagtgtcctttttgaagggtcatataaaaataaggtaacaccacagtgccactacaccttctggggctggacttgtttcagcagctttggttgcactgaatttgggggagctgcatggtaccaggggtttattgggttgcagatatataaatgccctaaacttaaaaaaaaaaaaaaaaaa

SEQ ID NO: 536 - DNA, 2255 bp, Homo sapiens
agtttccattcttggtctccttttggcgccctggggcagcgagagaccgtgagaaatttctcggcggcgccgaagatgcgcgccacttccggtctggctcctaacaacgggggaggctggtaaccagggtgggggggatggcggagcgggcgctagagcccgaggcggaggcggaggctgaggcgggcgcgggcggggaggcagcagccgaggagggcgcagcgggccgaaaggcgcggggccggccgcgactcacggagtcggaccgggcccggcgacggctcgagtcccggaagaagtacgacgtgcggcgcgtgtacctgggcgaggcgcacgggccctgggtggacctgcggcgccgcagcggctggagcgacgccaagctcgccgcctacctcatctctctggagcgcggccagcggagcggccgccacgggaagccttgggagcaggtccccaaaaagccaaagcggaagaaaaggcggcgacgcaacgtgaactgcctgaagaacgtggtgatctggtacgaggaccacaagcaccgctgcccgtacgagccgcacctggcggagctagaccccacttttggcctgtacaccacggccgtgtggcagtgcgaagctggccaccgctacttccaggacctgcattcgcccctgaagcccctcagcgactcagaccctgacagtgacaaagtgggcaatgggctggtggctggcagctctgactcatccagctctggctctgcctctgactctgaggagtctcctgagggccagccggtcaaggctgcggcagcggcagcggcagcgacgcccaccagcccggtgggcagcagcgggctcatcactcaggagggcgtgcacattccctttgacgtccaccacgtggaaagcctggccgagcagggtaccccgctgtgctccaacccagcaggcaatgggcctgaagccctggagacagtggtgtgcgtgccggtgcctgtgcaagtgggtgcgggccccagcgccctctttgagaacgtgccccaggaggccctgggtgaggtggtggccagctgccccatgccaggcatggtgcccggctcacaggtgatcatcattgcgggccctggttacgacgctctcacggccgagggcattcacctcaacatggcagcaggcagcggtgtccccggcagtggactgggcgaggaggtgccctgtgccatgatggagggtgtggcagcctacacccagacagagcccgagggtagccagcctagcaccatggacgccaccgcagtagcaggcatcgagaccaagaaagagaaggaggacctgtgcttgctaaagaaggaggagaaggaggagccagtagccccggagctggcaacaacggtgcctgagagcgcagagcctgaggcagaggcggacggggaggagctggacggcagcgacatgtcagccatcatctatgaaatccccaaggagcctgagaagaggcggcggagcaagcggtcgcgggtgatggatgctgacggcctgctcgagatgttccactgcccatacgagggctgcagccaagtctacgtggccctcagcagcttccagaaccacgtcaatcttgtgcatcggaaaggaaagaccaaagtgtgccctcatcctggctgtggcaagaagttctatttatccaaccacctgcggcggcacatgatcatccattcaggtgtccgtgaattcacctgcgagacctgcggcaagtccttcaagaggaagaaccacctggaggtacatcggcgcacccacaccggcgagacccccctgcagtgcgagatctgtggctaccagtgccggcagcgcgcgtcgctcaactggcacatgaagaagcacactgcggaggtgcagtacaacttcacgtgcgatcgctgcgggaagcgcttcgagaagctggacagcgtcaagttccacacgctcaaaagccacccggatcacaagcccacctgacccacctgaccactgaccgcccctatttattcgtccgctcggacaccacgcccgggcttgccggggcctggacagctgcgagggccgcccggaccgcgggccggaaggaggcgcccccgccccgccccagagctgggccccctgggcaggttccccaccccgccccaccgcatccttctcggagctggtgcctggggctgcattgctggaactgtgtcaagagagcagagtgagattaaagagcgagaaaggagaaaaaaaaaaaaaaaa

SEQ ID NO: 537 - DNA, 2016 bp, Homo sapiens
tccgaggccccgagggcgggacgtttcgtcctccctgccgcgcgtgccctgcctaccacgagcggcccgggagtacctgtacctttcagctgcgccggccgcgaggccacggagagctcgccttggagagcccaggagcaggggagacatggactcagtggtctttgaggatgtggctgtggacttcaccctggaggagtgggctttgctggattctgctcagagggacctctacagagatgtgatgctggagaccttccggaacctggcctcagtagatgatgggactcaatttaaagccaatgggtcagtttctctgcaggatatgtacgggcaagaaaaatctaaggaacagacaataccaaacttcacaggaaataattcctgtgcctacactttagaaaaaaattgtgaaggctatggcactgaagaccaccacaaaaatctgagaaatcatatggtggacagattctgtacacataatgaaggtaatcaatatggagaagccatccatcaaatgccagatcttaccctgcacaagaaagtttctgctggagaaaaaccatatgaatgcaccaagtgcaggacagtcttcacgcatctttcttctcttaaaaggcacgtcaagtctcactgtggacgaaaagcacctccaggtgaggaatgtaagcaggcctgcatttgtccctcacacctacacagtcacggaagaactgacactgaggagaagccgtataagtgtcaagcatgtgggcaaactttccaacatcctcgttacctctcccaccacgtaaagactcacacagcagagaaaacctacaaatgcgagcagtgtcggatggcgtttaatgggttcgcaagcttcactagacatgtgagaactcacacaaaagacaggccatataaatgtcaggaatgtgggagagccttcatttatccctcgacatttcaaagacacatgacaacacacactggagagaagccctataaatgtcagcactgtgggaaagccttcacttacccccaggcttttcaaagacatgagaagacgcacacgggagagaagccctatgaatgcaagcagtgtgggaaaacattcagttggtctgaaaccttgcgagtccacatgaggatccacactggggacaaactctataaatgtgaacactgtgggaaggcttttacctcttccagatcattccaaggtcatttgaggacgcacactggagagaaaccttatgagtgtaaacaatgtgggaaagccttcacttggtcctcaacgtttagagaacatgtgagaattcacacgcaagagcagctctataaatgtgaacaatgtgggaaggcttttacctcttccagatcattccgaggtcatttgaggacgcacactggagagaagccttatgagtgtaaacaatgtggaaaaaccttcacttggtcctcaacgtttagagaacatgtgagaattcacacgcaagagcagctccataaatgtgaacactgtgggaaggcctttacctcttccagagcattccaaggtcatttgaggatgcacactggagagaagccttatgagtgtaaacaatgtggaaaaaccttcacttggtcctcaaccttacataatcatgtgaggatgcacactggagagaaacctcacaaatgtaaacaatgtgggatgtccttcaagtggcactcctccttccggaaccatctgaggatgcacacaggacagaaatcccacgaatgtcagtcatactcaaaagccttcagttgccaagtcattctttctaaaaccagtgagagcacacactaaagagaaattctataactttaatggggtaacctcacattaattcatgtataatgctccagaaaattcacaccaggagagaaatcttacaagtatgatattgtctttgtcaatacctcatttgtaaaacagacccattagtcgtgaatttccagctctttcaaaaataaatgtttatgtgagaaaataaaaaaaaaaaaaaa

SEQ ID NO: 538 - DNA, 1839 bp, Homo sapiens
ttctaccgcgggtgtacacatggtttgccagggtgtgcgcgtcttcccaaggggtctggggaccaaattccagctcccgccatcgggaggcacggtaagagaccgtaggggacacaatcccgagcaccgcagatgccgaggtctccgctgcgctccagtctgtcaacagaggcttcaggaccgcggggtcccttcaaatgccccgccagtcccaggccaatcaccgcgcagcttcttccgggatcgtcgccaatcatcggccgttgcgtattgcgggtacagaggggtaagtgaagcttcgggcccttacatctttcttgaaggcaagaagcctctcctctacttcccagacaccccgcctcccccactagaaaaagcagccgaagcggctttatttaagggcaagtgggacgatgaggccagagaagtcagaaaggctccatatttgatatggtcaaataatggcgcccttaagagcagcctgtgacaattgaagggtggtcgccatattttcagaaggcaccttccgggtcccttaacccgggtgtctatgtccaagcggccatgaagtgaataaacactgaggaattatatttgtccctatcagaatcctcgaatccctagcagccagtccctgctacttcggttgcctcggctgcgttcggacgccacggctgggcggggccgcccttcctgtggacaacgacagctgaggccgggagcggggaggcggcggctccagggacctggcggccgccgatcggggctgcgaggccccatggcgccgcccccagccccgctcctggcgccgaggcccggggagacccggcctggttgcaggaagcccgggactgtgagcttcgcggacgtggccgtgtacttctccccggaggagtggggctgtctgcggcccgcgcagagggctctgtaccgggacgtgatgcaggagacctacggccacctgggcgcgctcggattcccaggccccaaaccagccctcatctcttggatggaacaggagagtgaggcttggagccccgccgcccaggatcctgagaagggggaaagactgggaggagctcggagaggagatgtcccaaacaggaaggaagaggaaccggaggaagtcccaagagccaaagggcctagaaaggctcctgtgaaggagagtcctgaagtgctggtggaacgcaaccctgacccagctattagcgtggccccggcacgggcacagccacccaaaaatgctgcctgggacccgaccacaggagcacagcccccggcacccatacccagcatggatgctcaggccggccagcggcgccacgtgtgcacggactgcggccgccgcttcacctacccctcactgctggtcagccacaggcgcatgcactcgggggagcggcctttcccctgccccgagtgtggcatgcgcttcaagaggaagttcgcagtggaagcgcaccagtggatccaccgctcctgctccggggggcggcggggccggaggcctgggatccgggctgtgcctcgggcccccgtccgaggtgaccgggacccgcctgtgctcttccggcactacccagacatcttcgaggagtgcggctgagcggcaccgcaggctggagttgagcctgaccttggcacgaaggactgacggatccctgaggtgggccactgagtcggggactccggaactgaaattcatgccctgggctttcctcaaggatccctcaagtttccaacttgtaaaaagaaaagtgcctgtaaagattcgaatagattagacttgccacccatctccccagtcttttgtttaacaaaaaaaaaaaaaaaaaa

SEQ ID NO: 539 - DNA, 6513 bp, Homo sapiens
gtctctcccttcagcccgagctccgggtctcgtcttcactgctctgtgtcctcttcttctagaggcccagcctctatggccctctgacctgcaggtattggcgatccatagctaagacgccaggtcccccggaaacctagaaatggaaccattgaaatttagggatgtggccatagaattctctctggaggagtggcaatgcctggacactatacagcagaatttatataggaatgtgatgttagagaactacagaaacctggtcttcttgggtattgttgtctctaagccagacctgatcacctgtctggaacaagaaaaagagccttggactagaaagagacataggatggtggccgaacccccagttatttgttctcattttgcccaagacttttcaccagagcagaacataaaagattctttccaaaaagtgacaccaagaagatatggaaaatgtgaacatgagaatttacagttaagtaaaagtgtggatgagtgcaaagtgcaaaaaggaggttataatggacttaaccaatgtttgccaactacccagagcaaaatatttcaatgtgataaatatatgaaaatctttcataaattttcaaatttaaatggacataaggtaagacacaccagaaaaaaaccttttaaatataaagaatttggcaaatcattttgcatattttcaaacctaactcaacataaaataatttgtactagagtaaatttctacaaatgtgaagactgtggaaaagcctttaatggatcctcaatctttactaaacataaaagaattcatattggagagaaatcgtacatatgtgaagaatgtggcaaagcctgtaaccagttcacaaaccttactacacataagataatttatactagagacaaactctacaaacgtgaagaatgtagcaaagcctttaacctgtcgtcacacattacaacacatacaataattcatactggagagaatccctacaaacgtgaagaatgtgacaaagcctttaatcagtccttaacccttactacacataagataattcataccagagagaaactcaatgaatataaggaatgtggcaaagctttcaaccagtcctcacaccttaccagacataagataattcatactggagagaaaccctacaaatgtgaagaatgtggcaaagcctttaaccagtcctcacaccttaccagacataagataattcatactggagagaagccctacagatgtgaagaatgtggcaaagcctttaggcagtcctcacaccttactacacataagataattcatactggagagaaaccctacaaatgtgaagaatgtggcaaagcttttaacaagtcctcacaccttactagacataagagcattcatactggagaaaaaccctaccagtgtgaaaaatgtggcaaagcttctaaccaatcctcaaaccttactgaacataagaatattcatactgaagagaaaccatacaaatgtgaagaatgtgggaaagcctttaaccagttctcaaaccttactacacataaaagaattcatactggagagaaaccctacaaatgtgaagaatgtggcaaagcttttaaccagtcctcaatccttactacacataagagaattcatactggagagaaatcctacaaatgtgaagaatgtggcaaagctttctatcgatcctcaaaacttactgaacataagaaaattcatactggagagaaaccctacacatgtgaagaatgtggcaaagcctttaaccattcctcacatcttgctacacataaggtaattcatactggagagaaaccctaccaatgtgaagaatgtggtaaagcctttaaccagtcctcacaccttactagacataagagaattcatactggagagaaaccctaccaatgtgaaaaatgtggcaaagcttttaaccagtcctcaaaccttactggacataagaaaattcatactggtgagaaactctacaaacctaaaagatgtaacagtgattttgaaaacacttcaaagttttctaaacataaaagaaattatgctggtgagaaatcttagaaatgtgaagaatgtaacaaaacctttaaaagttgtcacacttgattgtgcataagataattcatactaaaaaaaaacctacaagtgtgaagaatgtggcaaaacttttaaccaatgctcacaccttattgcacaggaaagcatttgtactagaaaaaaatttcaaatatacagaatgtgaaaaagccattaatatctgttcacatcttactcaacatcagagatttcatacttaataaaagcattatacatgcaattactgtcaaaaatctttcagaaaatataagcctctaaagtgaagagtattcattttgaagacacacattatgaacataaggagggttgtggtacctttacttgtatcacagatctcattgtacacattttgtgctagaggaaaaccatggagcagttgcttaaactttgtgcaacataaggaaatttatattggagaaaaaccctgcaaatgtaataaatttgggaaaacattttttcaaaaacgacagcttagaaaacactagagggttcatactaaaatctatttttgcagatgcagtaaatatgaaaaaatatttaatccaaaattctatgtaaatatcagataattcacagtagaaatagttaaggcactgacacttcaggcattacactaaatcagattgctgagtatagaaaagaatctaaaactaaagttggtaaatgaattatttgtatataacattataagaagtagaaaatttttgcagagttgtaactacattcaaactatcctttgaaaaaaattaggttttatgaaaagtgaataatgtcatttaactcaagttatgctcttcattcctattgtattcacatgtgaaagcatgtgacttaattgttgctgcatcaaagatgagagattctttgttattaggtgtgcattatttacgaccttttttagtgaaagagttaaggacattaaaatgtaagatgcaagatgaaaatgtaagtggagaggctctttctggttaatttataatattgactgatgcatgaggtaggagttcagataaatatcctgtgttatattgagaaaaaaaattttctggtatatcattttactaattgtactttttttttttttgagacagagttttgctcttgttgcccaggctggagtgcaatggtgtgatcttggctcaccaaaacctccacctcccaggttcaagggattctcctgcctcagcctcccgagtagctgggattacaggcatgtgccaccatgcccggctaattttgtatttttaatagagatggggtttctctatgttggtcaggctggtctcaaactcccgacctcgggtgatccacccacctcggcctcccaaagtgctgggattacaggcgcgagtcaccatgcctggccaattgtacttttatgtaataaaatgtagtacattttaaaatttttagataatgtgtgaacttattaatcaggctttttaaaaaacatgttaagaccatcgtgcattcaatgaagcattattatgccattaaatttaacttatcccatcttactcaagggtataggtaaatgatggtaactatacactatttaataagataatggactaacatttctagtaatctgttttgccagtggctttaaattgcaaataagtcagagaatattattcctgtaggttgaattattactcattttttcttatttaaacttatttttcttaatttttgtgggtacatagtatgtgtaaatatggcatatatggcatattttgatacaggtatataatatgtaataattacatatgggtaaatgaaatattcattacctgcagcatttattgtttgtatttgtttgtattataaactaattctgcacttttcggtttttttttgagacgagtctcactatgtcacccaggctgtgcacgcctgggtgcattggcgtggtctcagctcactgcaacctccgcctactgggttcaagtgattcttccgcctcagcctcctgagtagttgggactacaggcgcatgccaccacactcagctaatttttgtatttttagtagaaacagtttcactacgttggccaggtttgtcttgaactcctgaccccatgattagccccctcggcctcccaaagtgctgggattacaggtgggagccaccacacccagccacttttagttgttttcaaatgtacattaaattgttgttggctacagggtctcttttatggtcataagaaaacaatataaacaaaatgcatacatttctgagacctgaattaacattaaaaaattgttatatatttttcttcaaacatgttgcctctctgcctgcaagcacatacagactattagttttgatttacacagagttaaatatatacatatattactttaaagataaagcttgggtttaaaaaaattatggagtaaataaatgccttctttgcgagtatgagtttctacctagtttcagaagagcaatattgaaacaaatcaaattattttaattagatgatgactgcaaaactaaaaaaacttaaaaatgctgaaaacaaatccatactctctgctttgtattgaattgattactgtaaaattgtatggcttataattcagaatctccctatgcaaatttttgtttttacttgcctgattcttaggctagacccataattttcttgtgtcttacatttttttctcttattttatataagatgctatgtgagctggtcagagattataaaaataatttttataaaattagtgcaaaaaatttagatttaatttcaaaattagtgtattgttatattttatgttgttagaatattttattttgttcttttaattggagaacgctgtataagcctactttttttagtttttgttcctttcagtttttataatgaaaataagtaaatattgattgagcccatttatttaggtgagtactaggggggcttcctaaatcatgaggatgtttttatatataaatatagcaaacaaacatgacagtgctttctgtgtcacagatgctttataataagccataaatattcctgttggagttagtttgtaacttcaagacagagatggaacatatcaattgtgagaaataacattgattttttatgtggagaggacatttattttcaggctgcaaagctcagttttgctgaattaaaaaattgtgcttcttttatttcctaattgtcttagttttgtttgtcttattatgtgtatttcagctgtgtatgcatcacagccctcctttttgctgtgctgtggctacagttttctcactgttctcttcacaccatgtcatttcacatggtatattgtaggttttgatgagaaatcggtatttttaatgcactgcaagattggttttaactggagattttgcatatcaatataattttctgatcagttaaattaaaacaaaaagcatacagtgtccacagatgaaaggattaaatcatttagcgttgtttttctctgtttgttaaagaataatcttattaaattcttacacaaagtgtggcaaatataaaatttgcttgaaaatatatcttagaaattaaacttttaatttaattttctacagtatacttatgccacaatgtacgtttccatgcaaaatcttctatttgtaagtgtgaacattaaacattgcaaaatagtaaaatgacctctgtgattttgaaacctggagtaatatttcttttccatattcatattacaatttgaagaaattttctcagttttatatgtttttttagtgggtgaagttcagtctacagtttttacatttagtcacctaactctagccaacttcttggtcatattctctggaaaacattcgaagatcatggcagcttttagataaaaacattttctattattttgcgtgcaaacttgtttactgtgttcacagagtggccagtcatgagaccataagaaacagctgcccttttagtgtctttcataccgtctgtaatatataaattgtgcatttattctgtgaagcatgacattttgaagtatatacacattgtcaaatgcttcattctaggtaattaatgctttacctaacatagttaacatttttgtggtaagagcacatgacaatgttttagcatttttcagaaatacaaatacattgttatgaactataggcaccatgcagtacaaaagcttttttgaacttatttctcctattcaactgtaattatgtatttgactgacatctttctaaacccctcttttttccaaatatgttggcatctggtggtcaccattttattctccacttcagttagattaatttttctagaatcatgtaagtgaaataatttggttaatctatgtaattgaaaataataaatttttttattttaaagatgaaaaaaaaaaaaaaaaaa

SEQ ID NO: 540 - DNA, 1835 bp, Homo sapiens
atccatccctgtggagctgcagagcatcttcatgtgagtagacggatggacataaatagattcatgctcatttaggaagctgggagtttcgtgaagctgagggtgagttcctgtgattcttgttcgcttcaacaaaaagtgggagaccaagtttttatagcaaaagaccaaattagctgtagagtcttgaatgcagaaaaaaattaccctagctttcttagcacttagggttttgtgaggattcagtgtttagcacagtgcttggcacatagtaagccctagtaaatgttaaatattgttattagtgtttcgtaaaacttgagaaatagagctgagctcattcccttcctgttgattcaaaaataatacctacatgaaaacatgattccaagttgattgaatgttgtaggaattactggtttagagtagcccagttctcggcctaccctgctggttgggatcttactgtattcttgaatgcactggtttgaaaatatgccagacttcagcccccaaggaaacaaggctgcaagaatttatgaactccagctggaaaaggtaaaggtgacctttggctagccacatactggaccttaccccactgacgtctttcagaacattccaagggttttcctcaaggaacatttttgagctagaaattaaaatgggttctctggcagactgcaccccttgagtcaaagttaacagtattcctttgaatgcaataatagaggcttttctgcgttaagggagaaggaatgaccaattgaacttacacattccccaggcaggtccctttgccggcccctacaggctggggtggcccctcctgtcctcagggatcagactcccagactggttagttctgcatgtttccatcaaattaaaggttattccctggccgcctcctggagaaaaccaaccccaccctgccagctgggggcaatggggcagggattttggcctctcagaacagctcctagaggctgctcatgactgaatgttttcccaaatcacctaaatatcggtttgctttttgttttgggggagaggatttagcctcttacttccctgatggattcaaagttttatctatctccttatctcctgccctgtcttggcacaactctggatagattgcaggtgtggaatttgctggagtttggtgacttcgtcaaattcctttggattctgttccgccaaatcagcagtctcgtcctgtggatgcagtgactggaatttcccatctgcaaagcatctctgtagcccagattttgtggagccttaagacactccctcaatgccaccctgaccccacggctggagaaccctgtgcttatgtggtgggcagggccactgttgatggaggatggcggggacggggtggtgctcaaaggatctgtggtgctggaggtctacacgcctctcaggacagcgtgtcaggaacctcagagcagcttcacatctgccaaagctgagagggagcgaacttgggaagcattttgctcattgtcctacccaagtattaatagcataatagttgatgccaaaggagatggtgacgtcccttccactgtagttgctgtcacaaccttgacgtctttaagctaatggccgtttgcatctgtgtcttcaaacagatcctggttacagccattttgtgtgattcacttcgggggttaagtaatgcaggattctgcaaacaaggtgtcgccgtccaaatgtactgtcctggcatagagagcactgctttgttttccactgttgtagagaaaactagggagaactttatttttcaataaacttttcttgtgtgaaaaaaaaaaaaaaaaaaa

SEQ ID NO: 541 - DNA, 2621 bp, Homo sapiens
gcgcccagccgctgaacggcgtgggcaggtgggcggtggggttccagggcgccccgaggacagggggccccgacttcaggggaaccccaaccctgaggggcgtacatagtaatcacgccccagccgcaccggaccttgcgctcatcccttgcgtcccccacttctgcacaaacttttctgacgccctggctcgtgggggtcgtggagagcgctggggctaccaggtgggctcccaccccgccggaccctagccacgctgacctcctgcctctcctaacctcagtggcgacctctccaggccgggccgggctcggcactcggagcgagtgcggcaaccactgtcgctctccgaaggctcctgcgccccccggggcagctgggcggggtaatgccctcagtgatggagaagccgagcgcgggctctgggatcctgtcccgtagccgggccaagacggtgcccaacggcggacagccccactcggaggatgacagcagcgaggaggagcactcgcacgacagcatgatccgcgttggaaccaattaccaggccgtaattccggagtgcaagcctgagagccccgcacgctacagcaacaaggagctgaaggggatgctggtgtggtcacccaaccactgtgtgtcagatgccaagcttgacaagtacattgcgatggccaaggagaagcatggctacaacattgagcaggcgctgggcatgcttctgtggcataagcacgatgtggagaagtcgctggccgacctggccaacttcaccccattccctgacgagtggacagtagaggacaaggtgctgtttgaacaggcctttggcttccatggcaaatgcttccagcggatccagcagatgctgcctgacaagttgattcccagcctggtgaaatactactactcttggaagaagacccgcagccgaactagtgtgatggacagacaggcccggcggctggggggccgcaaggacaaagaagacagtgatgagctcgaagagggtcgaggaggcgtgagtgagggagagcccgatcctgcagatcccaagagagagcctctaccctctcggcccctgaatgcacgcccaggccctgggaaaaaggaggtccaggtgtctcagtaccgccaccatcccttgcgaacccggcgtcgcccacccaagggcatgtacctgagccctgaaggcctcacggcagtgtcaggaagcccggaccttgccaacctcacgctccgaggtcttgactctcagctcatctccctcaagcgccaggtacagagcatgaagcagacgaacagcagcctgcgccaagccctggagggcggtattgatccactacgccccccggaggccaacaccaagttcaactcccgctggaccacagatgagcagcttttggctgttcaagccatccgtaggtatggcaaagactttggggctattgcagaggtgattgggaacaagactctgacccaggtgaagactttctttgtgagctaccggcgccgcttcaatctggaggaggtgctgcaggaatgggaggctgagcaggatggggcccctggagccccagtccccatggaggaggctaggagaggggctccattgccagccccagccctagaggaagatgatgaggtccagattacatcggtctccacgtccgtgccccgatcagtgccccctgcgccaccaccccctccacctcccacctcgctgtcccagccacccccgctgctgaggccacctttgcccacggctcccactctgctccgacagccacccccactgcagcagggccgcttcctccagccccggctggcccccaaccagcccccaccgcctctcatccgccccgctctggctgccccccgccacagcgcccgccctggccctcagcccccacccaccctgattggaacccctctggagcccccagcaccctcactctgagccctgacgtcctccaccaaccacgggctccaggacccctttgctggccatccccaggcatctctggtgtcactgaggacagaagggactagggctctggcggggtctttgtaagaccagagtttcggacagcccagccccgccctttgggttctgcatgtgttcctggcagctgggcctgtctcctggggccatggccgggctcaggggcctttgagctggcctgagggcactttcgcttcctggccggtactggaatggctgtgtcctagtctgctggggcttggcctctgggtcctgccctttgtgtgtccggggtagtgaccttagcgtggagtggggagagggcagttgggtgtgctggctgttctcattcctctttcccttcttttagcaataagtctggggtgaggtggggagggaggctgcagggggggaggtgggcagaggggccttacagcagcagaggctggaagagaagctctgtcttcaggggccagctgggaaatgctaaggagctgagggtgcccaccaagcccaccttccagaaacttggagaaatgggggttgggaacttatgcagacatggatttatttttcaacattttttaaaaattaaaaaaaataaaatctaagcttactgaaaaaaaaaaaaaaaaaa

SEQ ID NO: 542 - DNA, 1717 bp, Homo sapiens
agcttcgcgcttgctcacgaacttgcctgcctggctggcgcacccagcccctccttccattccttcttccccctctctgcagcctctgccagcccgcactgcgcatgctttctgacgccccctttggtccagcgtgggaggaggggatggaaatgaggttgggctaagcagcttgcgcgcgctcccttgcctgccctcccccgacgccggacgcgcgccgggcggggcagctccgctggtccgagggcagtgcagcagcggcgacagcggctgcggccgtggccgtggcgggaggagccggaagccccgcccccggggaggggccgtcctgcaggtcccccctctatcctccacggccccatccaagccagggatgaaatttaacggcaagaagggcgcagttgacgcggcgtcaatgaactgagactaagtcaaaagccgggccctccaaccctatccccatcagcctggtcatcaccggcgtcacccccgccccgcgccctgcccctaggttcctgtgccagcaagatgctggagcgaggcgcggagtccgcggccggggctaccgatcctagtcccactggcaaggaaccagtgaccaaagaagctccccaccagggcccaccgcagaagcccagccagtcagctccagggcccaccgcgtccgcgggctcgcctccccggcctcgccggcggcccccgccccagcgcccgcaccgctgccccgactgtgacaaggccttctcgtacccgtccaagctggccacgcaccgcttagcacacggaggcgcccgaccccacccatgcccagactgccccaaggccttctcctacccctccaagctggcagcccaccgcctcacgcacagcggcgcccgcccgcacccgtgcccacactgcccgaagtcctttggccaccgctccaagctggcggctcacctctggacccacgcacccacccgcccctacccgtgccccgactgccccaagtccttctgctacccttccaagctggcggcccaccgccacacgcaccacgccaccgacgcccgcccctatccttgcccgcattgccccaaggctttctcatttccctccaagctggccgcccatcgcctatgtcacgaccccccaaccgcgcccggcagccaggcgactgcctggcaccgatgctccagctgcggccaggcctttggccagagacgcttactgctccttcatcaacgcagccaccaccaggtggagcacaagggggagagagactgagccctcccttggctcactgtccccttctgccgccagccctagccagtaagaggtgggatttctaagaccgactgtatgagctcgcctcttccagatagctggcagagggcagggcaagggattggccatttatactgggctcgagctcagaagcccgaggaactctttgctcccctgctttggggagatctcaaaccatggacgtggagctgtggtttgacagcgctggctctgcttctccccacacacttacatggcaaaggtaaaaagtctgctactatcgtgggttgatgaggattgtgggcaaacaggctctcttgttaaaagtttaaactggtgtctccactttggccatatgacggtatctaagaaattgaaaatacatacatgcttgtctcaactcttccacttgtaggaatttattctataaactcatgaatgtgaaaaaaaa

SEQ ID NO: 543 - DNA, 1333 bp, Homo sapiens
ggggaggcgcggggcggtcggctgcggtggcggcgtttggatgattgtctctcggcggcggagtcggatactgtggcgtatgaggacctgtctgaggactatactcagaagaaatggaaaggtctcgcactcagtcagagagccctgcactggaacatgatgctggaaaatgaccgtagcatggcttctttggcaggtaggaacatgatggagagttcagagctgactccgaagcaggaaatttttaaaggatcagagtcatctaatagcacatcagggggactctttggggtggttcctgggggaacagagactggagatgtttgtgaagataccttcaaagagttagaaggacaaccctcaaatgaagaagggagcagactagaaagtgatttcttggaaataatagatgaggataagaaaaaatccacaaaagacagatatgaggaatataaggaagttgaggaacatccacctctgtcttccagtcctgttgaacatgaaggagttttaaagggacagaaatcctatcgatgtgatgaatgtggcaaagctttttattggagttcgcacctcattggtcatcggagaatccacactggagagaaaccctatgagtgtaatgagtgtgggaagaccttcaggcaaacctcccagctcattgttcatctcagaacccacacaggggaaaagccctatgaatgcagtgagtgtggaaaggcctataggcacagctcccatctcattcaacaccagagactccataatggggagaaaccctataaatgtaatgaatgtgcaaaagcttttaatcagagctccaaactcttcgaccaccagagaacccatactggggagaaaccttatgaatgtaaggagtgtggggcggcctttagtcggagtaaaaatcttgttcgacatcagtttctgcacactggtaagaaaccttataagtgtaatgaatgtgggagagcattctgttccaatagaaatctcattgaccatcagagaacccacactggggagaagccttataaatgtaatgaatgtggcaaagccttcagtcggagtaaatgtcttattcgacatcagagcctccacactggggaaaagccatacaaatgtagtgaatgtgggaaagccttcaatcagatctctcaacttgttgaacatgagcgaattcatactggagaaaaaccatttaagtgtagtgagtgtggtaaggcattcggtctgagtaaatgtcttattcggcaccagaggcttcacacaagtgaaaagccctataaatgcaatgagtgtggaaaaaaaaaaaaaaaaaaaaaaaaaaaaa

SEQ ID NO: 544 - DNA, 2644 bp, Homo sapiens
aatgctccggcagtcctgttccttcccggttacgtcccttccagcccttggcggagtctgcgggcgagagggcgcaggtgcagaggtgccgccggcggcgtgcggctgcgaaggaagggaccccgacaccgagcgttcctgcggacgctcctcaaccgggggttgttctccgtgctctggacccggcccttcctcacctaggacgtctcgcggtgcactgtccccctctctcgggcgacttttcccccacatccaagtagtgatcaagctcagaatccagctcgcgcccgctgtgcacctagcacttcccacctgtagtcttttgacctcatcgccccctctagaaggctgctgccatcgcttaaatgaggaagccgaggtgcagagaggtttcagacctattgcggtggagctggagttcgagaaccaaccactcggtgctgagacgcgcttgcggaacgggcggcgggcgggggtgaagcggagtgaggggagaggccaggtgcgacccgggcaggtgaggagcacgggcccggagggaggacttacgagaatggaaaggaaagcagcccgtcttcagtgggacagtgggagcattaagatgtcagagaatgagcagttgtgggaagagccatagggtattttattttttagagatggggttttgctctgtcgcccaggctgcaacctcgacctcccgggctcaagcgatcctcctgcctcagcctcccgagtaactgggactacaagcaacgcgccaccacactaaatctttaattttttggggggaggttgaaggtgggggcgggacagggtctctctccgtctcccaggccagagtgcagtggcgcaattacggcccgactcctgggctcaagcgatcctcccacctcagcctccggagtagctgggaccacaggcgcccaccaccacgcccagctagtttttgtatttttttgtagaggtggtgttttgccatgtttcccaggctggtcttgaactcctgagcgcaagtgatccacccgtctcagccttccaaagtgctgggattacaggtgtcagccaccacgcccggccctaaatatttttttaaaagttggatttttcatggtgcccaagggaagagacactcctttccttttactaagaccatttcttttagaaaactttgtaataggaaaatctttctttgccctcttgaaatgtatgtaaattttttaaaaagctgcataagcctcttgccagttttataaaccaggaatttctttcttaaggacctttcttaaggaccttggagtgatttctttgaaataaaaaggccaaggaagatagcttccctccttgtctctgtgggagtttagcagatggctggctccaagttgcaattacctgcttgtcatagagacatgaggtttattttaactttggataaaggcagttagctaacacagatggccgccccaagtaccacgtacctgccttctcgtttagaaacactgtgggcattaggggcaactcatgcagaagacccaggaatcttccaggtatactccatgggatgcctgttccactctggcccattggcacaagctagccttttcttttaaggatagtggggtccgttctgagagcggcctttgcaacatctcacttcccctgttgactgttatttcttttcttcctgctttcctactcccttgatcccaaactcactaggggtatttagtgagcacttactgttgcagtaagactgtagccaaggaagacgaagagacagttggagaccaaagagaacttcaattcgggcacccgagcctagagcaggctcatgcccaaaatggctaccgacccagacaaagaaagcaggcttgcttatatgtcgtttcaggcgtgaaaaacaaggcaggatacaagtttcagacaaagacagtaaattattcaacctgtgacaattctgagaaaacttacatttagttatcttgaccagtcaaccttgaagctggacagagctggggtaagggaaaacaggaattacggaagtatgagggagtcgcgaggccggagataagcttggaaggttgagataagctcgcaggtgcaacttcttagcaatgctgagagtggctgcttaaatttcttagcctatgtataacttctaaatagcctacactaaatggtaactattacctatgttgtgtttgttattttaaactttaatgttatttattttatttcattttccttccacattacctctgctgttagcagctttgagaaatgctgctataggatgtgggaggtcattaaaggatttaagcagggagaggcaagatcagattaacatttcagaaaaatatttactgttttccagctgaaactagtagagtacaatttactttctggtcacagcacacagcagtcacatcctggaggaactgtacttctctaagatctagtctgtcctgtggtttaaatgacctttagcaaattgtctttattactttgtacactgctttcaccagtctgctcttccatggctaacggggcagaactgttatttttagggttttccacatccagtatgttcataagatttctaccctgtgtgaacttccagatgtcgaataaaggctggatgctgacc

SEQ ID NO: 545 - DNA, 907 bp, Homo sapiens
agatctgaaatctcattttctgtgtggctgtgtgtttgggacaggggtaaccaattcctgactactctatatgctgcatagaacctggagaggatttttcaaagtaaatgaatctcgaaagctggattgcagagcaaacgagtgcagtcaattcagccaggggcttgcaagaggagaaagagaaaaagactgtggaatggaaagtttcccaacccaagcctttcccaaggggtagccattctctgttctacagtttagggcttgcatgtgctttttctggagtccaaaaatacataagttataaccaatttaacagacagaaaggcgcacagaggaatttaaagtgtgggctggggggcgaggcggtgggcgggaggcgagcgggcgcaggcggaacaccgttttccaagctaagccgccgcaaataaaaaggcgtaaagggagagaagttggtgctcaacgtgagccaggagcagcgtcccggctcctcccctgctcattttaaaagcacttcttcttgtattgtttttaaggtgagaaataggaaagaaaacgccggcttgtgcgctcgctgcctgcctctctggctgtctgcttttgcagggctgctgggagtttttaagctctgtgagaatcctgggagttggtgatgtcagactagttgggtcatttgaaggttagcagcccgggtagggttcaccgaaagttcactcgcatatattaggcaattcaatctttcattctgtgtgacagaagtagtaggaagtgagctgttcagaggcaggagggtctattctttgccaaaggggggaccagaattcccccatgcgagctgtttgaggactgggatgccgagaacgcgagcgatccgagcagggtttgtctgggcaccgtcggggtaggatcc

SEQ ID NO: 546 - DNA, 653 bp, Homo sapiens
ctgacgtagctgatcggcccggaagtgctcacacgtgtgctccctgccctgctcctggccccttggccggccgggctgtttctggccatgggtcgctcccgccggacaggcgcgcaccgagcgcactctctagcccggcagatgaaggcgaagcggcggcggccggacttggatgagattcaccgcgagctgcggcctcagggatccgcacgaccccagcccgacccaaacgccgagttcgaccccgacctgccagggggcggtctgcaccgctgtctggcctgcgcgaggtacttcatcgattccaccaacctgaagacccacttccgatccaaagaccacaagaaaaggctgaagcagctgagcgtcgagccctacagtcaggaagaggcggagagggcagcgggtatgggatcctatgtgccccccaggcggctggcagtgcccacggaagtgtccactgaggtccctgagatggatacctctacctgacatggcctgaagatgcagggcagaggaattgcccatggacagtgacgcaaggactaggctgggagggagcgtgccaaccccttttgcctctgggtttggggagcggagggcctcttcttggtgccctgccccaaataaaggaactggacaaagagaaaaaa

SEQ ID NO: 547 - DNA, 1852 bp, Homo sapiens
ccagacctggtccctgctgtgctctcccgttggatctctgacatggaggaaatgctgtccttctgggatgtggccattgatttttctccagaagagaaagaatgcctggaccctgctcagtgggatctgtacagggatgtgatgctggagaatttcagccaccttgatttcctgggtcttgctgttgctaaaccatacttggtaacatttctggagcaaaaccaagggtcttcgggtgtgaaaagccaaacatcagccaccattcctccaggaacaacaggcaatgaatttaacaatcacaatgaggccattgatcacagctctctaagtatgcaatgccagagaattcatacaggagaggaaccctactactttgaagactgtggtaaggcccttagttctcaggcaacactttctgtactccagggacattttattggagacaaaccctacaagtgtagagaatgtcataaaacacttagcagtcgctcatcacttttaatacaccagaaatatcatactgatgaaaaaacctacaagtgtgaaaaatgtggcaaagggtttttccgttcctcagatcttcagcatcatcaaaaaattcatactggagagaaaccatacaaatgtgaagagtgtgacaaagcctttcttcatcactcatatcttaggaaacaccaggcagttcatactggagagaaaccctacaagtgtgaagagtgtggaaattcattttactatcctgcaatgctgaagcaacatcaaagaattcattctggagagaaacttgacaagtgtgaagaatgtgggaaagtattttcctctgctttctttcttaaccagcataaaggaattgattccggagagaaaaggtacaagtgtcaagaatgtggcaaatccttttgctatcgttcatatcttagggaacattatagaatgcattctggagaatatccctacaagtgcgaagaatgtggcaaagggttttcccgttcctcaaagcttcaggaacatcaaacaattcatactggagttaaaccttacaagtgtgaagagtgtgggaaatgtttttcctcttttacgtcccttaaaagacatcaaatcatccattctgaagatactccccatgagtgtgtagaatgcggcaaaaggttttctagttcttcccgccttcaggaacatcagaaaattcacactgaagagaaaccatacaaatgtgaggaatgtgacaaagcctttctttatcactcgtttcttaggagacacaaagcagttcatactagagagaaaccctacatgtgtgaaaagtgtaggaaatgtttttcttcctttacatccctgaaaagacatcaaatccattccatagacatttcccatgagtgtgtataatgtggcaaaagattttctagttcttcccacctacaggaacatctagaaattcatactggagaaatcatacaaatatgaagactgtcacaaagcctttctttatcattcatttcttaggagacttgaggcagttcacagagagaaaccatacaagtgtgaagagtatgggaaatgtctgttcttttcttcaacccttaaaagacatcaaataattcattatgaagtcagtctctacaagtgtggggaatgtttaaagctccttgtatgctgtccactcttaagaaacacaaatttgttcattttggagaggaacatacaagtgtgaccaatgtcagaaagccttgtcttttgtaatacttctctatttgagcacaagctaagtcatactggagtgaaattttcctagtttgaagaatataccaaaatattttactctaatttataactgaaaaaaaaaaaaaaaaaa

SEQ ID NO: 548 - DNA, 1591 bp, Homo sapiens
ccctcgcctacagaggcggcgctgtccctgatcgagcggcgggagcgagggttcagagatgggcagtgagaaggagcagagtccagaaccacacctgcctgaggaaggggaagggggtaagccttggagagtggatgactcagagggttcttggatcccacctggggagaaggagcatgggcaagagagcctgtcggatgaactgcaagaaactcatccaaaaaagccatggcagaaagtcactgtccgggctcgagagctaggggaccccattgctcatccaaggcatgaggcagatgagaagccctttatatgtgcccagtgtggcaaaaccttcaataatacctccaacctgagaacacaccagcggatccacactggtgagaagccttacaagtgttctgaatgtggcaagagcttctcgagaagctccaaccgcatccggcacgagcggatccacctggaagagaaacactacaaatgccccaagtgccaggagagctttcggcggcgctcagacctcaccacgcaccagcaagatcacctaggcaagcggccataccgctgtgacatctgtggcaagagcttcagccagagtgccacgctagctgtgcatcaccggacccacctggagccagcaccctacatctgctgtgagtgtgggaagagcttcagcaacagctccagctttggcgtgcatcaccgcacccacacaggtgagagaccttatgagtgcactgagtgtgggcggaccttcagcgatatctccaactttggagcacaccagcggacccacagaggggagaagccctaccggtgcactgtgtgtgggaaacacttctcccggagctcgaatctcatccgccaccagaaaactcacttgggcgaacaggctgggaaagattccagctgaaggagagccccatttagagtgagggagagagagtgagagaccctaacctattggaggaagatcttcagcatcttttgctgctaccttgacctcaagcccttcatcccactttggagaatggttttgtatagcctctgaagtcaggatctcaggaagtcctgaggagggactctggaataaaaacccttgcctctttccaggccaatttctcgtgttggaaagtcagaagacccagtcttggctttactttcttggggtgaaagagaaatagggtaggctcagaacatgctcatgttattaaggcagcagtccccctggcctttgaggaagtacttatgagatgggtgtcactgtctgaaggttctccaaattgtctgtgaactgcttaggtaggagtgcactgcagtttcctgctagttcccacctgttgtgccccaactttgcttctagatctctggggtgggaggagtgaccttctcaatggaaggggcctccttggtctggagaagagatctgaggtcccaccttagaaatgaaagggaaaccctcagggagccatgacccagggaccttcacactcccccatgtttgttacttgttatccctcccccaacctgcctctgttttccccagagtgattagcagtaaaacccttcaatgaaaaaaaaaaaaaaaaaa

SEQ ID NO: 549 - DNA, 2755 bp, Homo sapiens
cagaaaggcacatgggcggggctgcgaggagcaggcggggcgggggcgccgaggagagcggcgcggcgtgcgcgggcacgaggcgtagtggtctcccctaaggctgaggcggcggcgggcgcgcggcggcggcgggcgtgcgaggctgttgtgctcccggctctcgtgtttcccctcctgagcgggtggaggaggcccaagcggtgctgggcgcgctcccccttcctttccctccggcgtcctctcccggccctctcgcgctgcactgtctctccgacgcaagactgtcccggcccggatatggctcgtggacagcagaaaattcagtctcagcagaaaaatgccaaaaagcaagctggacaaaagaagaaacaaggacatgaccaaaaggctgctgccaaagctgccttaatatatacctgcactgtctgtaggacacaaatgccagaccctaagaccttcaagcagcactttgagagcaagcatcctaagactccacttcctccagaattagctgatgttcaggcataaggttgtttacaggtgaattcatgacacctttgactcttctactgtctcagaccttaggtaacatacctgcagctgcttttctaacaaactgttgatcagcaaaaataaaggggctacagaaacactcatttttatgctgttccctcttgggcttcatgcaaagacaattctgtgtaaatgtacagttgactctgatttggaaatatgaaaatcagtccatccttgttataaaaaatttttttacaattgtaattatattgatgttcatattgtgtaaaataactcatttaataaaatagtactttgatttacgacatcacaggataaatggttttagaaattctgttctaactttccacattatttgccttataaaaatctaatgaattcatcagctagaattgcaagtgcaattcttatatccctttctctgctcagtggcaggttcctcagttaaactagagcagactgattcattaaaattgtgcatacgattttatgggcagctgatgatctaggtgaaaaatgacttatctgctgccttagtatattgcggttatgtgtcattgtacccctctgatcatttcctgtgtttgagttggaatatttaaaattgcagtatgacctggctctaactgccagtcaggtgtaccctgtagataactgatagcttcctaaaagcggttggattgtcagtgagcccttgtgaaaggttaggttctaatgtatatgccgtaatgaaataatcattaagcctattgtttaatgcaaaatatggaacaaatgtgaactggtaaaggtcgatcttgatactatattctttgaaaattcttgaagttctttaatttgaaattgaaacattaatttttgaggtttttggaagttactatttggccatttttacaaatggattttgcattaacaggaagattggaatgacttgtggctggattaattcccagaaccctctccctcctttcttttctaagtgagttgttgattttaggagtttgctttgtgctgttacctaaaatcagagactggtgtacagtatgacttccatctgaacttgaaaagtattaaaatgggtcaatattcacattcttttagatctcaggatgggaaaatgggtttgttcagatggatatggtaaatcttacccaattaaggaaggctaattttagagttcttctaatttgcttgtgtcaactcttaacttgtaaaactgctgttaactcggtttaaatttttaaattaatataatagaaagaacactaaaatacttactggtaactgcttagagccatttatctgatcctgtggattacagaatgcattccctcttctgctgtagcttatcattgctttgttttgtagctctgcatattttgcccaccttgtcttccctgtaagtttaagacgtttccaaggaaaagcttcagggctgatagtttcttagcaattcctattcttatgcccttactttaaaatagtccttttattttgtgtattttatttcctaagtttcagatgtaatatctgttgtttcctaacatgtcgattaccagaacgttagaattttacctaatttcttgtggatattgcagaagttctggttaaatcacaacttaaaagtttttaaaagtgctttgagcatatgtatatgtttagtgacaaatcatataaaaccattcacaagttttggttttttttttttcgtttgttttagtgactaattcaggatgaaagtttttttgttcttgtatttaacccttttttataagcagctgaagacaccatatttaacactatatctcagtgatagggaaatagctgcattgatcttacatgagcataatcatccttatacttcatgaggggattattagtacaatccccattttactgtgtttgagttaaaaaccaaacatccctgtaatttaatttgaagattctttaacagattgcagcaaagttcattataaaactgttatggtgtcttcaaagacttgataaaataacactgagagagaattggtccatttgtatgctgtatttctattacttgccaaaaggaatggggttaagattaaacttgtttccattctcttcacatggatatacatccccatgtttaactgacacactgggggctcagttgtgtgctgtaatgtcttattaaagaagatattaaagaaaactaaactagtctaaaaaaaaaaaa

SEQ ID NO: 550 - DNA, 1102 bp, Homo sapiens
actggtgacgtagatctcatgtgaccaggagtcgacgtgtgcagaagtcctggtaatctggtccttgttcccgtctggataccagcttccttcagcagcgcaggcggtggtccctgaggcccgtggaaggagtcaaacttgcgggaattttgcagtttatctgcagggctgttgtttccagcaagacccaaagctagaaaaggaggaggaagaaactgacccgatcagtgccagaagtcattgtattcaaagaagaataagcaagaaagaaaagaaggaaggaagagaggtagacagatacaagatgaaatcctgtcaaaaaatggaaggaaaaccagaaaatgagagtgaaccaaagcatgaggaagagccaaagcctgaggaaaagccagaagaggaggagaagctagaggaggaggccaaagcaaaaggaacttttagagaaaggctgattcaatctctccaggagtttaaagaagatatacacaacaggcatttaagcaatgaagatatgtttagagaagtggatgaaatagatgagataaggagagtcagaaacaaacttatagtgatgcgttggaaggttaatcgaaaccatccttacccctatttaatgtagtttaccttgatttttatctgatattaacaataccatatagcttgctttttattagcatttcctgatattcctttgtccatatttctacttataacctgttgctattaatggttttagatgtatctcttgttatctgcatctcattgtttattgtattttgaaccaatctacaagtctctgtcttttaataaaagaactttacacatttgtaaaaaagaggttcttggtaagatataaaatggaaaaaggctaagtaatatgtgaatatcatatttttgaaaggtaaaaagtacatttgtatattacatatatggacataacttgtgaaggatgaaagaaagtacagcctctcggtggtgggattatgaatgatttttctccttttgcttgtttgtattttctatattcctaaaattaacacacattattattgctagaataataaaagttttataaaaaagaagcaacaaaaaaaaaaaaaaa

SEQ ID NO: 551 - DNA, 3013 bp, Homo sapiens
caacgagttgtagccgcggagagcaggcgtcgatgctggcgcccaaagcctccagcctgagagtcgcctcactcgtgtgacgacagagtttcactcctgttacccaggctggaggacagtgatgtgatctcgggtcaccacaacctccgcctcccggattcaggcgattctcatgcctcagcctcccgagtagctcagattacaggcatgtgccaccacgcccggctaattttgtattttcagtcgagacggggtttccccatgttggtcaggctggtcttgaattcccgacctcaggtgatctgttcgcctcggcctcccaaagtgctgggattacaggcgtgaaccactgcacccggcgaggcattttttactgtctacagaaacttattgtaattcatttttcctcactccagtagtaagaattataccaaattgaaaagatatgaatgagtatcctaaaaaaagaaaaaggaagactctacacccttctcgttattcagattcctctggaataagcagaattgcagatggattcaatggaattttctctgatcattgttacagtgtctgttctatgagacagccagatttaaaatattttgacaacaaagatgatgattctgataccgagacgtcaaatgacttgccaaaatttgcagatggaatcaaggccagaaacagaaatcagaactacctggttcccagtcctgtacttagaattctagaccacactgccttttctacagaaaaatctgctgatattgtaatttgtgatgaagagtgtgactcacctgaatcagtcaaccagcaaacccaagaggagagtcctatagaagttcacactgctgaagatgttccaattgctgtagaagtgcatgcgatttctgaggattatgatatagagacagaaaacaattcctctgagagtctccaagaccaaactgatgaagaaccgccagctaaactttgtaaaattcttgacaagagccaagctttgaatgtgactgcccagcagaaatggcctttactgagagctaatagcagtggcctctataaatgtgaactttgtgagtttaacagcaaatatttttctgacttaaagcagcatatgatcctgaagcataaacgtactgattcaaatgtgtgtcgagtatgcaaggaaagtttctctaccaatatgcttctgatagaacatgccaaactgcatgaagaggatccctacatttgtaaatactgtgattataagacagtaatttttgagaacctcagccagcacattgcagacacccattttagtgatcacctctattggtgtgaacagtgtgatgtacagttctcctcaagcagtgaactctacctacatttccaggagcacagctgtgatgaacagtacttgtgtcagttctgtgaacatgaaactaatgatccagaagacttgcatagccatgtggtaaatgagcatgcatgtaaattaatagagttaagtgataagtataacaatggtgaacatggacaatatagcctcttaagcaaaattacctttgacaaatgtaaaaacttctttgtatgtcaagtatgtggttttcggagtagacttcacacaaatgttaacaggcatgttgctattgaacatacaaaaatttttcctcatgtttgtgatgactgtgggaaaggcttttcaagtatgctagaatattgcaagcatttaaattcacatttatctgaagggatttatttatgtcaatattgtgaatattcaacaggacaaattgaagatcttaaaattcatctagatttcaagcattcagctgacttgcctcataaatgtagtgactgcttgatgaggtttggaaatgaaagggaattaataagtcaccttccagtccatgagacaacttgattattctctttaacttacagaatgttagtttaaaataataaattcatcctttttttggagatgattaaatggatgattgtaaacacaacttatgaaatctgcctttaacaagtaacttttttaaattataaaattttattggcattgctccattttctgtatataaatatatctttaatgtggtattttcaattgcgtgatagtttgtagtttcaaccactcttggtgactgtcatcctgtttcttccatattctctgatttcatgaattgaaaagaaacaaatgtattgaagaagtgagctacagttttccttccttaaccatgggtgctagtaactttttaaaactcaagacaagattagttttttatgtgtgaagtcattaaattattacacgaccagaactaaaatgcaatatacagttaagtccacggatactcccattaatgagaaataacactaggaagccactattacaggaagaaaagatttggttttcatggcagtctgtttttttaaaaaaaaatttttgagccactatctattgttgaatattttaagatgggatgagggaggaactaataagggcttacacaataaaaaataactatatcataactcattcataacttgatgtttcattttctgttgaggaaccataaattcattcacagacttaatatttttttcttagagatggtctcgttctgttgtccaggatggagtgcagtggttgatcatagctcccgggccgtagtctcccaggctcgagcaatcctcccacttcaccctcctgcatagctaggactacaggcatgtggcaccatgcccgctaagtttttaaatttcttgtagagatgagatctcgctatgttgcccaggccagtctcaaactcctggactcaagcaatcctcccaccttggccttccaaatcactgggattataggcatgagccattatgcctgactcttgcccaaatttctgatgtcaaattgttcattgacagaaaacccactgaagtatttaaagttaggaagatctgggagataggggttgctggcatgaaaatgtataacttacaacatttattaataaaatgataaattagc

SEQ ID NO: 552 - DNA, 1680 bp, Homo sapiens
cacggcagccctacactcggcctggaagaattgtttttcttctctggaaaggtgaacatttatagcatttatttcccaaatctgttaacatggcaaaatatgtcagtctcactgaagctaacgaagaactcaaggtcttaatggacgagaaccagaccagccgccccgtggccgttcacacctccaccgtgaacccgctcgggaagcagctcttgccgaaaacctttggacagtccagtgtcaacattgaccagcaagtggtaattggtatgcctcagagaccagcagcatcaaacatccctgtggtaggaagcccaaacccacccagcactcactttgcctctcagaaccagcattcctactcctcacctccttgggccgggcagcacaacaggaaaggagagaagaatggcatgggcctgtgccgtctttccatgaaggtctgggagacggtgcagaggaaagggaccacttcctgccaggaagtggtgggcgagctggtcgccaagttcagagctgccagcaaccacgcctcaccaaacgagtcagcttatgacgtgaaaaacataaaacggcgcacctacgatgccttaaacgtgctgatggccatgaatatcatctccagggagaaaaagaagatcaagtggattggtctgaccaccaactcggctcagaactgtcagaacttacgggtggaaagacagaagagacttgaaagaataaagcagaaacagtctgaacttcaacaacttattctacagcaaattgctttcaagaacctggtgctgagaaaccagtatgtggaggagcaggtcagccagcggccgctgcccaactcagtcatccacgtgcccttcatcatcatcagcagtagcaagaagaccgtcatcaactgcagcatctccgacgacaaatcagaatatctgtttaagtttaacagctcctttgaaatccacgatgacacagaagtgctgatgtggatgggcatgacttttgggctagagtccgggagctgctctgccgaagaccttaaaatggccagaaatttggtcccaaaggctctggagccgtacgtgacagaaatggctcagggaacttttggaggtgtgttcacgacggcaggttccaggtctaatggcacgtggctttctgccagtgacctgaccaacattgcgattgggatgctggccacaagctccggtggatctcagtacagtggctccagggtggagaccccagcagtcgaggaggaagaggaggaggacaacaacgatgacgacctcagtgagaatgacgaggatgactgacgtcctctcgccttaagattcagcttcaggaaaacatttagggaaaagaaactttttttttttttttaatgtgaggttttctgtttcttttttgcctactcccaagaagatattggtaagctatagaatttagatatgcacctctgataagcaaggattgtttcccgtatgattaagacgtgctgttgatgtgtgttttgataccagtgtgctgacacagaatctttatttactttttaggattttgtgttttcattttctatttttctttaaatgcagagttcattgttgccccttaacagtttttcctgagtttactgaagaaattgtacttcatccacatccatgaaaataaaatgctctccttttgtgc

SEQ ID NO: 553 - DNA, 1781 bp, Homo sapiens
agtcgcttttgttctcgcgatatttccgggtacgcgggagccccggcgacccgggcttctgtgaaacatggcggtaggctgggaccataacacaagcatgactatatgaaggaagaggaaggttttcctgaagatgaggcgactgaatcggaaaaaaactttaagtttggtaaaagagttggatgcctttccgaaggttcctgagagctatgtagagacttcagccagtggaggtacagtttctctaatagcatttacaactatggctttattaaccataatggaattctcagtatatcaagatacatggatgaagtatgaatacgaagtagacaaggatttttctagcaaattaagaattaatatagatattactgttgccatgaagtgtcaatatgttggagcggatgtattggatttagcagaaacaatggttgcatctgcagatggtttagtttatgaaccaacagtatttgatctttcaccacagcagaaagagtggcagaggatgctgcagctgattcagagtaggctacaagaagagcattcacttcaagatgtgatatttaaaagtgcttttaaaagtacatcaacagctcttccaccaagagaagatgattcatcacagtctccaaatgcatgcagaattcatggccatctatatgtcaataaagtagcagggaattttcacataacagtgggcaaggcaattccacatcctcgtggtcatgcacatttggcagcacttgtcaaccatgaatcttacaatttttctcatagaatagatcatttgtcttttggagagcttgttccagcaattattaatcctttagatggaactgaaaaaattgctatagatcacaaccagatgttccaatattttattacagttgtgccaacaaaactacatacatataaaatatcagcagacacccatcagttttctgtgacagaaagggaacgtatcattaaccatgctgcaggcagccatggagtctctgggatatttatgaaatatgatctcagttctcttatggtgacagttactgaggagcacatgccattctggcagttttttgtaagactctgtggtattgttggaggaatcttttcaacaacaggcatgttacatggaattggaaaatttatagttgaaataatttgctgtcgtttcagacttggatcctataaacctgtcaattctgttccttttgaggatggccacacagacaaccacttacctcttttagaaaataatacacattaacacctcccgattgaaggagaaaaactttttgcctgagacataaaacctttttttaataataaaatattgtgcaatatattcaaagaaaagaaaacacaaataagcagaaaacatacttattttaaaaaagaaaaaaaaggataaaaaaacccaaactgaaattctatatacgttgtgtctgttacaaatgtcgtagaagaaatcatgcagctaaacgatgaagaagcccaactggagtgttgctttgaagatgacgccttcttatattttcatagcaaatgggtggtatcaaaatcagacattgcttcttgctgataaaaagcctgaaggaaataagtgaaactacatctatgggaaaaaaaaaaacattgagaagtgcaaatgttcgcatccttttgtttttaaaagatatgatgtcagaataaaatgtggaaaacatacggaaaactagtctagactttaaagaattgtgatcaggtcacattgttaataaaaaaaaaaaacgggctaaaaa

SEQ ID NO: 554 - DNA, 1473 bp, Homo sapiens
gctccaggtgcttgggagtcgggggactgcggaggacgccaagtctgagctcgccgccctctccgagccgtttgggccggacgcctgggtccttcgggctccgccccagggggtggggctatatgttcggaccaatgaccggccgtccctgcggtcccgccccctccccgcccccggagccgcggcctcgctgagtgcccagccgcccggcgcccaggcctggggcaccgcgagtgccgaaccttcggctgctccccgcctcaggacaccaagatgcctggcgaacagcaggcagaggaagaggaggaggaagagatgcaggaggagatggtgctgctggtgaagggtgaggaggatgagggtgaggagaagtatgaggtggtgaaactcaagatccccatggacaacaaggaggtcccgggcgaggcgcccgcgccgtccgccgacccggcgcgtccccacgcgtgccccgactgcggccgcgccttcgcgcgccgctccacgctggcgaagcacgcgcgcacgcacacgggcgaacggcccttcgggtgcaccgagtgcgggcggcgcttctcacagaagtcggcgctgaccaaacacggccgcacgcacacgggcgagcggccctacgagtgccccgagtgcgacaaacgcttctcggccgcctcgaacctgcggcagcaccggcggcggcacacgggcgagaagccgtacgcatgcgcgcactgcggccgccgcttcgcgcagagctccaactacgcacagcacctgcgcgtgcacacgggcgagaagccgtacgcgtgcccggactgcggacgcgcctttggcggcagctcgtgcctggcgcgccaccgacgcacgcacacgggcgagcggccctacgcttgcgccgactgcggcacgcgcttcgctcagagctcggcgctggccaagcaccggcgcgtgcacacgggcgagaagccgcaccgctgcgctgtgtgtggccgtcgcttcggccaccgctccaacctggcggagcacgcgcgcacgcacacaggcgagcggccctacccctgcgccgagtgcggccgccgcttccgcctaagctcgcacttcattcgccaccgacgcgcgcacatgcggcgccgcctgtatatttgcgccggctgcggcagggacttcaagctgccccctggcgccacggccgccactgccaccgagcgttgcccggagtgtgagggcagctgagtcccgcagggctgcggaggggcgcgctggggcttcgacctggctgcactaacccaggctcctcctcgccccggcctccgggtctgggaaattgaggggacggcaggcccggctgccctggaactgggagacagggagaatcccctgccggggtccctggaaacagtgcccaccccacatcactacattccctcggcccgtgttagtgaataaagtattatatcctcaaaaaaaaaaaaaaaaaaa

SEQ ID NO: 555 - DNA, 4807 bp, Homo sapiens
aagtgcgcatgtgcgcgaggagtcgctcgggcacttattgagcgccgactgtctacgggcggccgggggtgatgggcagaggcttcagtgtccccttcgcctccgcaggagaggagaggcagcagcatggcgagtgtcctgtcccgacgccttggaaagcggtccctcctgggagcccgggtgttgggacccagtgcctcggaggggccctcggctgccccaccctcggagccactgctagaaggggccgctccccagcctttcaccacctctgatgacaccccctgccaggagcagcccaaggaagtccttaaggctcccagcacctcgggccttcagcaggtggcctttcagcctgggcagaaggtttatgtgtggtacgggggtcaagagtgcacaggactggtggagcagcacagctggatggagggtcaggtgaccgtctggctgctggagcagaagctgcaggtctgctgcagggtggaggaggtgtggctggcagagctgcagggcccctgtccccaggcaccacccctggagcccggagcccaggccctggcctacaggcccgtctccaggaacatcgatgtcccaaagaggaagtcggacgcagtggaaatggatgagatgatggcggccatggtgctgacgtccctgtcctgcagccctgttgtacagagtcctcccgggaccgaggccaacttctctgcttcccgtgcggcctgcgacccatggaaggagagtggtgacatctcggacagcggcagcagcactaccagcggtcactggagtgggagcagtggtgtctccaccccctcgcccccccacccccaggccagccccaagtatttgggggatgcttttggttctccccaaactgatcatggctttgagaccgatcctgaccctttcctgctggacgaaccagctccacgaaaaagaaagaactctgtgaaggtgatgtacaagtgcctgtggccaaactgtggcaaagttctgcgctccattgtgggcatcaaacgacacgtcaaagccctccatctgggggacacagtggactctgatcagttcaagcgggaggaggatttctactacacagaggtgcagctgaaggaggaatctgctgctgctgctgctgctgctgccgcaggcaccccagtccctgggactcccacctccgagccagctcccacccccagcatgactggcctgcctctgtctgctcttccaccacctctgcacaaagcccagtcctccggcccagaacatcctggcccggagtcctccctgccctcaggggctctcagcaagtcagctcctgggtccttctggcacattcaggcagatcatgcataccaggctctgccatccttccagatcccagtctcaccacacatctacaccagtgtcagctgggctgctgccccctccgccgcctgctctctctctccggtccggagccggtcgctaagcttcagcgagccccagcagccagcacctgcgatgaaatctcatctgatcgtcacttctccaccccgggcccagagtggtgccaggaaagcccgaggggaggctaagaagtgccgcaaggtgtatggcatcgagcaccgggaccagtggtgcacggcctgccggtggaagaaggcctgccagcgctttctggactgagctgtgctgcaggttctactctgttcctggccctgccggcagccactgacaagaggccagtgtgtcaccagccctcagcagaaaccgaaagagaaagaacggaaacacggagtttgggctctgttggctaaggtgtaacacttaaagcaattttctcccattgtgcgaacattttattttttaaaaaaaagaaacaaaaatatttttccccctaaaataggagagagccaaaactgaccaaggctattcagcagtgaaccagtgaccaaagaattaattaccctccgtttcccacatccccactctctaggggattagcttgtgcgtgtcaaaagaaggaacagctcgttctgcttcctgctgagtcggtgaattctttgctttctaaactcttccagaaaggactgtgagcaagatgaatttacttttcttaaaaaaaaaaaaaaaaaaaaaaaaaaagagtttctggctgatgggtgactcagagtgcaggactgcctggccgtggggcagaggggtttgcccttctcggagggtacctcctgttccctgtctgagcatcctgcatggaagtcaaaggaaatccctttcttggtgacgacttaaatctgggttccctcagacattgggttgcaccccaacaaatattaaatggcttcttcttaaagcccagagaaagaggttttttaaaagactgtcgccaaatagctgagccaaaaggctgatcagaattcactttttggaatgtggcagttaaacactaccttgatcattctctcctctttcctcgaggaactcctggagggtttgagcgtctggaaactctctgctctgacccgaggaagcaccctcctgacgccgccttcctccggttattgaaaggacgcctcagaaatgctttgttttcttttacgatgtattcagaagcctttactgattaaagttttcttttatttgggtggccgggagagacccagggaggttctggaggttcctttctgtctcctggccccaccagggatttccccatttctgtttgctgcctgaaagcaggatgaggaaggccaaggagagtccttgcacccgtgagcgtcaggatgaggaaatgacaggaggaagacgtgggtttgggttagtggctgctggcgttttggcccttggtgtttctggagcctccagggatctaggggagcctgggctgcgtgcatgtcgataagcagagctgttcttggggagaaggagggaggtctcgggagtgtagcaccatgccaaccagccctgcgcgaagacagagtgagccacgcccggatggcagggcatgtttctgttttggtgtctcactttcctcccagcgtgacttatttggggattcctcagggcctactggaatgtgactgcccactgcccagctgcctcgggtacaagtcctggccctatgtcccagctgtcaggggctcagggaatcctacccagccacctgtcctgggatggagtgtcagcatccaccccttggttgtcatcgaggccgccctcccagtcctgggtgaagatatttgggccaccagggctcccttggccccttcacgtaggaaatagacacgtgctttttaatgcaggacactttgagtgttacaaaatctgtagacctggcagtagggtcatgatgttgggaagggtgtagtgccctaggttggtgacagaagggacagacacttgtgcacaggtgtctttggtgatggggtttttttttttataacttagtaaaaaaaaaaaaatgtatgtggaattctgtctcttggtaaagctcaaagccaggctagcctgaggtggcgcagggctctccttcctgtcccttcgatctccttgagaattaagagctggcagctgctgatggtgtttcccaacccccctcacttcccaagacaacccccagcttcaggtcctcatggggaggggagggcacgttcttgacacatgggaacttcgctcaggagggcctccccttcccctctccctcagagttttcactgccgtctcgtctttagaaagctgtttgaattccccccgcccccagtttggaccgtgtagatataactggatatacggatttttctctttgtgcaggcttcttatgccgttggtatacagggcaggaaagagaggaataaagggagagagcagtgtggaaaccacggtggttttgctttgttcttactaggttttggtgccaccttccctgcctgcgcttgtgccccctctcctccttggcactggcggcctccttgcctcccttccacccgtgctgccatcccgtgcctgtcgtgttggttcttcacacgtgctctgttctcggggttgttccattcatgccttcttggagggtgagggtggcttgggaaccgacccagtgatcatgcctactttcttctttgtatctccctccttcccagcccacccgggcagcagactctgatggaaggaaggtgccgtaggtgggcttttagaaactaacgggactggttttcaaagcagttatcttgggaaactgtttattccagcgatgtgacttttttcagaatatttcttggaatcatattcagagtctggggctgtgtgttgagcagccttaaggatgctagacactcatttagtgcccagggagtccagcgaatgacgtctgtggccaagcgaggtctcaggtgcaaagcaaaaggaccatttaaagtaaaatagcttggattcaatcatgtgacttttaaattggctcagaaagcaattttgtaatttcagagagtgttttgagccatggccacgttgtcattgtgagtctatagcttgactccttggagaacaatattcatttggttgtggagactgatttgctgggagaaatctgtcctgttactttctggtcatcccaggttctgacttttaccaggggcaaaaaaaaaaaaagcaagagggagataaatcccatctgtgagtttgtcttattggcgcctttttcctcagctgtcttccaagtattatttttactgttaaaaaattttttaaaaatgtgaaatgtaatgtttttacagcaacaatatgaaatatattttataaggaataaaatggtaccttgtctgatttaaaaaaa

SEQ ID NO: 556 - DNA, 2596 bp, Homo sapiens
gtggggcgcgggcgcgcgcacggacgtccagcacgcacgcacgcacgtccagcacacacgcacatccagcacgcacgcacgtacgtccggcacttccggccgcggcggcctcagcgccggcccgaagggaccaggccgccgtccccagcgagaggcatgcagcgctgaggagcggcgacccagcacggcggcgccatgaacctcctgccgtgtaaccctcacggcaacgggctgctctacgccggcttcaaccaggaccacggatgctttgcgtgtgggatggaaaatggattccgagtctataacactgatccactaaaagaaaaagagaaacaagaatttctagaaggaggagttggccatgttgaaatgttatttcgctgcaactatttagctttagttggtggtggaaaaaagccgaaataccctcccaacaaagtaatgatctgggatgacctgaagaagaagactgttattgaaatagaattttctacagaagtcaaggcagtcaagctgcggcgagatagaattgtggtggttttggactccatgattaaggtgttcacattcacacacaatccccatcagttgcacgtcttcgaaacctgctataaccccaaaggcctctgtgtcctttgtcccaatagtaacaactccctcctggcctttccgggcacgcacacgggccatgtgcagcttgtggacctggccagcacggagaagccacccgtggacattcctgcacacgagggtgtcctgagctgcattgcactcaacctgcagggaacaagaattgcaactgcatccgagaaagggacgcttataagaatatttgatacttcatcagggcatttaatccaggaactgcgaagaggatctcaagcagccaatatttactgcatcaacttcaatcaggatgcgtccctcatctgcgtatccagcgaccacggcacagtgcatatttttgcagctgaagatccaaaaaggaataaacagtccagtttggcctcagccagtttccttccaaaatacttcagttccaagtggagtttctccaagtttcaggttccctcaggctctccgtgcatttgtgcctttggaacagagccaaacgccgtcattgcaatttgtgcagacggcagctactacaaattcctgttcaaccccaagggggagtgcatccgagatgtctacgcgcagtttctagagatgaccgatgacaagctgtgactccagctgggggcgccacagcacccaccacctgccgccttcagactctcggggctggtgccagtgccccaggggcctcctgggccacgggctggaggggctgcccagggaccttggtctcgaagccatacgtggttgtctgctttcctaaggactcccatttccagtattaaagagagaatcatcatcaaggcaccgtaggtaactcagtggctgtgaccagctcgactggcggccactggctgttcccatgagttcagctgtgacgttagcttcagtggctccgccgcatcctcacactgacgggggctccatacggacctggggactgggctgagagggtggacgagttcaggtttgtttttgcagcagattccgtcgttcttactgagtctgcagcgggggagtgaacaagtgtgcagatgtaagttcttacatgataagcagattgaatacaacaccagcagcttgccttagaaaaggagaaaggaattccttttcccgcccgaacatgaagaaaaatgacctgaccctgtagagagaacacagtgtgaatgtttcccctcgtgtgagcccagcctgtggtcttctccgtacccgcaacgtggtcatctgtgcccgtgacgtcacctgtgcccgtgcgtggcgtccccgtctccgttggggccattagaatgaggcagacaccaggccactctagaagccgagccgtcacacctcaggcgtgtgcggggcggggacggggggtctcctggttacattttggattaaacctgtttcccggttatgtgtagggaacagcagagtgatgcacgaactttgaacattcgttatggggaaaacatcctttaacttcggggtcgtctgccagagcagggtctgggagggtccatgcagttcccgctggtgtggagggaaatgccctggtctggcctccgagcccccaggtccaccgtctcccctcccctcatttgtaagaatagctacacactaacattttgggaaggagaggcacataactttttttaacatttggtaactaggttatgggctctacattgtcagctacttgggatatatatttaattttcttaaattcccgttaaactctattttatggttttgatttcagattgcaaacatgtaaaacctgcatagcagcgagttctcggttttgccggtttctttagttctttactgtcactgtcatgtaatcagctaattctctgtggatgttgctgtaaagtatgcatgttcctttcatgtgtatttaatcatgatgtttaattttgcacacttatttgtaatgtttcttttaaataaaagtgactaattttgttgtagtctggacctgtaaaaaaaaaaa

SEQ ID NO: 557 - DNA, 1869 bp, Homo sapiens
gcgagtcctcagggcgcccgggagccaccagtctgctctcgggctctactcagactagcgccaacagtctccgcggacagactcgcatcagccgccctggggctcggcctcctcccataggctcctcttcctctctttcattcaagtcttcaaactttgaaaaaaatatgagcttttgccaaataagacgggatagtttatggagttttctgaggcgcattgaactctggtcagcccctcgagcgtgggctcggccatcagcaggcccggtgggttggccgggctggccctcccaggctgcctttctctctggtcgcggcctggcccgccccggcctccaccgccgcaattcatgctggtgccgcacccgcagccccactcctggtatgcctgagattctccaggggccaagccggtcctccttcccggcccactcttccagggccaggacgctcccgcggagccagcccatcgtggctgggggtcccaggggctggaggcctgcctggttagcctctgtttcccagacattgactcgaggcgcctccagtcctctcaaccccctgactttcaagtcctttcaagtccttgtgccctgaccaagttatgaggaaaagagggctgagggcctggaggtgggctcgcaccccctcgaacccacctagatgtctcctcctccccagcctatgagttcagacttggggggctccatctgtccctccctgaggtccctcatcttgtccctgctctgattctgtcagcagatcctgaacactccttggtggggacccatgcctccaaggctgcccccaatgccagctgtcctggggaaactccccagaactctcggggaaaggcccgagaaccttcggaggaagcctccgggactcctcgccacctgctctgtttctctcccggccccactgccttcaggtatcaggaagagggcaggcccctgtgccccctctccccttcccagggcggccaacaatactccaccatggggcgcttcctttcttctctggaaactaagacattggactgaaggaactggcctgaggggggctgaccgggggcccgtgctgctgggagctctacgcacaagaggccgccggggtcacggacaggaacctcagcccagggtgctggcctttctccttcgcaggagtcccccaaaatccacacagcgactcgagcagccttccactcagccagaggagggtcgggctcccccgcctgctctcggtggtggcgtctggcccttcctgccgtttccaaggcctccggaagcaccaacccagttctcagttacctcctctggccggaaggcctcacgttgtcctccagagctgctctgggcccagggctggctccgtgaccacctgatggacgtgctgggcagcatgggctcccaaggcagcatccccagctgctctcccaccccaccccagctgcccggcggctgggcccacgagggctctggggacacttccataggaaaggggcctggcactttgtgattgccacgtgtttcctgttaagccgcctgcccccagtgcaaatctctgtgttttgctctctcctgaacaaaaatgtaaaccgacgccggaaagcaaatggtatcgaatacctttcttgcccataagggtttttacaaagaacgtgtctcactaggaactaggacactcatcggcccgagaccaactcctggataaaaggaataaggagaatcgtgtttgtaacgagttacaggattgtttctttcctggattttaaacttttgttaaattgtgaaattatggaggagttttatagaaaaaaaaagtgaaataaagtcagatgggaaagccaaaaaaaaaaaaaaaaaaa

SEQ ID NO: 558 - DNA, 2871 bp, Homo sapiens
gatctcagataggagagacagtctgtaaatataacgaatgtggaagaaccttcattgaaagtttaaagctgaatatatctcaaagacctcatttggaaatggagccgtatggatgcagtatttgcgggaagtccttctgcatgaatttaaggtttggacatcagagagctcttacaaaggacaatccttatgaatataatgaatatggggaaatcttctgtgacaattcagctttcattatccatcagggagcttacacaagaaagattctccgtgaatataaagtgagtgacaaaacctgggaaaagtcagctctcttaaaacatcaaatagtacacatggggggaaagtcttatgattacaatgaaaatgggagtaatttcagcaagaagtcacatcttacccagcttcggagagctcacacaggagaaaaaacctttgaatgtggtgaatgtgggaaaaccttctgggagaagtcaaacctcactcaacatcagagaacacacacaggagagaagccctatgaatgtactgaatgtgggaaagccttttgccagaaaccacacctgaccaaccatcagcgaacacatacaggagaaaaaccctatgaatgtaagcaatgtggaaaaacattctgtgtgaagtcaaacctcactgaacatcagagaacacacacaggggagaagccctatgaatgtaatgcatgtgggaaatccttctgccacagatcagccctcactgtgcatcagagaacacacacaggggagaaaccgtttatatgtaatgaatgtggaaaatccttctgtgtgaagtcaaacctcattgtacatcaaagaactcacactggggagaaaccatataagtgtaatgaatgtgggaaaaccttctgtgaaaaatcagctctcactaaacatcagaggactcacacaggggagaagccgtatgagtgtaatgcatgtgggaagacctttagtcagaggtcagtgctcaccaaacatcagagaattcacacaagggtgaaagctctttcaacatcctgaatgttagaagccttcatacacttgtgaaattggttatacagtttcaaaaaaggagatcagagaaagccaaagaatgtcagaaatttgtagaaaatgacttcttgtttgaatatgtaaaagctttcaagaaaaattaaaacttttcattagaaaatttgtactgaggggaattctattcatctaagtaatatggtgaaaatatttatctggaatttatgttgtttagtgttatattccagacgtgataccaaaattttgttgcaaatataatggacaatatttatttatacccatattcacagtggaatctgaagcttataaaagttgaatgacagcagcattaaacatatatgtgaagagtccccgatgtttgtagaccttatgtgagtatgcaaatatataaatttgagtatgcttgatttgtatattggaactcaacatgatcataaggagaagatacgtacccttaattgagtaactactatggtatttgttaatattttctacactaaataccattggtgtctttataggttgacataattatatatgtgtatgtacatatgtttgtgtgtatatgtaaatatatttctacacacatacttaaatatagtgatgtgctagtataacctcatactgacttaaaagttctgattgttaaattttaaggaattttgtgagccagttattaaaagcagtcattatttaaaatatgtaaacttacagttaaaaacaaaggtaataaatactcagcactcatcacttcctaattattttgctacatttcactattacctttgctgttttacttatttaatctgtatgatgaaaatactgtataatagtgtgcactgcacatctgtctcttcccagctccacattcagtgctgtcttggtagcttggacttagtgggagtgtttacaccatggaaattgacaaactataaatcagggttttaattttctcagagaacctgctgtcaaatatttacagcacatcactgtgtatatatgaaaacgtatttggcaatacaaaccacataccccttctatttcctgacataaataaatggctatggccatttacagctgaaccacgtcttcaagaaagaagccaaaaatatttccgtgaggtttttaactacctctgaatctgtcctactctaaatactaccggagtctctttgtaggttggccagtatatgtttttagtgaaatattatttcacaaagaactatatcacgtacctttcctctgactgtttcctggcatatatgcatgaatatggccattattgaactatcacttcagtaaagaagttaaacagtacttttctgaggtttttcagctacctctgggtcattctgtaatgtaaatgttgttaataagaatggtttttacataaattatgcaaaggttaacaagcagtaacactgcactcctcaaaaagtggcggtatgtaatgaaaggcccttttgatatccttgatttttcattgtgtatctgtttgggcacggtctatgtaacactagttctgcgtattagtattttagagtatctctgcctcccttgtcctgttgtttcttttgcccccttggaacacattggtcagcagttctaagagacactgcccacatgatggccattccctacttcatccttgctgagctaaattttatatttttgtgcatccttctcccagatgacttaggtggtaagtccagattagtcaaagctaatcatggaagttccattttaatgattctgttggggtgaacttgggagcaatgagatgtttgggaagtattgtgtagtacttctgggaaagatc

SEQ ID NO: 559 - DNA, 962 bp, Homo sapiens
gggaaagaatgcggagccgggttcacacaccccgcggcggcgaggccttaaatagggaaacggcctgaggcgcgcgcgggcctggagccgggatccgccctaggggctcggatcgccgcgcgctcgccgctcgcccgccagcccgcccgtggtccgtggcggcgcgctccacccggcacggggaggcgcggggcgcaccatggccgcagacacgccggggaaaccgagcgcctcgccgatggcaggagcgccggccagcgccagccggaccccagacaagccccggagcgcggccgagcaccgcaagtcctccaagccggtcatggagaagcggcgccgagcgcgtattaacgagagcctcgctcagctcaaaaccctcatcctggacgccctcagaaaagagagctcccgccactcgaagctggagaaggcggacatcctggagatgaccgtgagacacctgcggagcctgcgtcgcgtgcaggtgacggccgcgctcagcgccgaccccgccgttctgggcaagtaccgcgccggcttccacgagtgtctggcggaggtgaaccgcttcctggccggctgcgagggcgtcccggccgacgtgcgctcccgcctgctgggccacctggcagcctgcctgcgccagctgggaccctcccgccgcccggcctcgctgtccccggctgcccccgcagaggccccagcgcccgaggtctacgcgggccgcccgctgctgccatcgctcggcggccccttccctctgctcgcgccgccgctgctgccgggtctgacccgggcgctgcccgccgcccccagggcggggccgcagggcccgggtgggccctggaggccgtggctgcgctgaggctgtggccctgagactgcatcggaggcggcgccccgttctagggccgtggcctttgccgagactgtagcagagaaaacgtatttattattccaga

SEQ ID NO: 560 - DNA, 1293 bp, Homo sapiens
acacaggtgagaagccctatgagtgtaatgagtgtggaaaagcctttagagtgagctcagatcttgctcagcatcacaagatacatacaggagagaagcctcacgaatgtcttgagtgtcggaaagccttcactcaactctcacatctcattcagcaccagcggatccacacgggagaaaggccatatgtgtgtccgttgtgtgggaaagccttcaaccatagcactgttctgcggagccaccagagggtacacactggggagaagcctcacaggtgcaatgagtgtgggaaaaccttcagtgtgaagaggacactgctgcagcaccagaggatccacaccggggagaagccctacacgtgcagcgagtgtgggaaggccttcagcgaccgctcagtcctcattcagcaccacaacgtgcacaccggggagaagccctatgagtgcagtgagtgtgggaagaccttcagccaccgctccacactgatgaatcacgagcggatccacaccgaggaaaagccctatgcatgctacgaatgtgggaaggccttcgttcagcactcacacctgatccagcaccagagagtccacactggggagaagccctatgtgtgtggtgaatgtggcacgccttcagtgcacgccggtctctgatccagcatgagagaatccacacaggtgaaaagcccttccagtgcacagaatgtggcaaagcttcagcctgaaagcaactctgattgtgcacctgaggacccacacgggcgagaagccatatgagtgcaatagctgcgggaagccttcagccagtactcagttgctcatccagcaccagcggatccacacaggcgagaagccctatgagtgcggggagtgtgggggtgccttcaaccagcatggccacctaatccagcaccagaaagtgcacagaaagttgtgacccatggctgacacaagaatccattctcacagaaactgcatgtggaaccacaagcagccttcagcccaagagaagtctctgttaactctataggaagcttttctttggcgattcagtgtcacaaaataactccagaaagaagcacttagcgtgctgttcctgtggaaaaacttcagagactacctgttttattttcctcaacatcttgaagttatgttggagagtaatcatacaattgtagagaatttggtaaaaaacagccataattctttaacattagtttatttgaactaagggaatttaaggcataagaaccattatcccaataaaatcttacattccaaataaaaaaaaaag

SEQ ID NO: 561 - DNA, 1976 bp, Homo sapiens
ggccgcgcagtgccggaacccggctgcagcggtgggaaggcgggggcgtgccggcccagcggggagagggggctgctgagagtaaatacttggcgcctccagctgctggccaaggagacagatggagctcaagttgggagatacgccctgagagccgatgatagacacaagtccagatctcggattttgatactgtatgttccctgggttcctgagagaggacattgaggagtaggagtcggcgattaaggagatcggtacaattgggaagcctcctgtcagagcttccagcaatttcctcatcagaggtggacaagccctatgggctaagacagagggtcctcagaaaggagtgcggacgccgtcatgctgcagcagctcctgatcaccctgcccaccgaggccagcacctgggtgaagttgcgtcatccaaaggcggccacggagcgggtggccctgtgggaggatgtgactaagatgtttaaagcagaaggaactgttaaccttcaaggacgtatctgtggacttcactcaggaggagtgggggcagctggcccctgctcaccggaatctgtaccgggaggtgatgctggagaactatgggaacctggtctcagtgggatgtcagctttccaaacctggcgtgatttcccagttggagaaaggagaagaaccatggctgatggagagagatatttcaggagttccaagttcagacttgaagagcaaaacaaaaaccaaagagtcagccttacagaatgatatttcgtgggaagaactacattgtggcctaatgatggaaagatttacaaaaggaagcagcatgtattccaccttgggaagaatctccaaatgtaataagctagaaagccaacaagagaaccaaagaatgggtaaggggcaaatccccctgatgtgcaagaaaacattcactcaggagagaggccaagagtctaatagatttgagaaaagaattaatgtgaagtcagaagttatgccaggaccaataggtcttccaagaaaaagagatcgtaaatatgacacacctggaaagagaagcagatacaacatagatttagttaatcattcaaggagttatacaaaaatgaaaacctttgagtgtaatatttgtgaaaaaatcttcaaacagcttattcaccttactgaacacatgagaattcataccggggagaaacctttcagatgtaaggaatgtggaaaagcctttagccaaagttcatctcttattccgcatcagagaattcatactggtgagaaaccctatgaatgtaaggagtgtgggaaaaccttcagacatccttcatcgcttactcaacatgttagaattcataccggggaaaagccctatgaatgtagggtatgtgagaaagccttcagccagagcattggactgatccagcatttgagaactcatgttagagagaaaccttttacatgcaaagactgtggaaaagcgtttttccagattagacaccttaggcaacatgagattattcatactggtgtgaaaccctatatttgtaatgtatgtagtaaaaccttcagccatagtacatacctaactcaacaccagagaactcatactggagaaagaccatataaatgtaaggaatgtgggaaagcctttagccagagaatacatctttctatccatcagagagtccatactggagtaaaaccttatgaatgcagtcattgtgggaaagcctttaggcatgattcatcctttgctaaacatcagagaattcatactggagaaaaaccttatgattgtaatgagtgtggaaaagccttcagctgtagttcatcccttattagacactgcaaaacacatttaagaaataccttcagcaatgttgtgtgaaatatactaaacatcaaagaatctatgttggagcacaagattctaaatcagtggttccctgatccctcaaaaatccatttgtttttggatt

SEQ ID NO: 562 - DNA, 1448 bp, Homo sapiens; identical to SEQ ID NO: 439

SEQ ID NO: 563 - DNA, 2279 bp, Homo sapiens
atgtaaacatgtcgaaaaacctatcaacaacagttccttagtttcaccacttcaaaaaatttattctagtgtcaaatcccacattttaaataaatacagaaatgattttgatgattctccatttctcccacaagaacaaaaagcacaaataagggaaaaaccgtgtgaatgtaatgagcatggcaaagcctttagagtgtcttcaagccttgctaaccatcaagtaatccacactgcagataacccttacaaatgtaatgaatgtgacaaggtcttcagtaacagttcaaaccttgtacaacatcaaagaattcatactggagagaagccttacaagtgtcatgaatgtggcaagctcttcaatcgaatttcactccttgcacgacatcagagaatacatactggagagaaaccttacaaatgtcatgagtgtggcaaagtcttcactcaaaattctcaccttgcaaatcatcacagaatccacactggagagaaaccttacaaatgtaatgagtgtggcaaggtcttcaacagaaatgcacaccttgcacgacatcagaaaattcatagtggagagaaaccttacaaatgtaaggaatgtggcaaagcattttcagggggttcaggccttactgctcatcttgtaattcacactggagagaaactttacaaatgtaataaatgcggcaaggtcttcaatcgaaatgcacaccttaccagacatcaaagaaaccatactggagagaaaccttatgaatgtaaagaatgtggcaaggtcttcaggcacaagttttgtctaaccaatcatcatagaatgcacacgggagagcaaccttacaaatgtaatgaatttgggaggccgaggcgggtggatcatgaggtcaggagatcgagaccatcctggctaacaaggtgaaaccccatctctactaaaaatacaaaaaattagccgggcgcggtggcgggcgcctgtagtcccagctactcgggaggctgaggcaggagaatggcgtgaacccgggaagcggagcttgcagtgagccgagattgcgccactgcagtccgcagtccggcctgggcgacagagcgagactccgtctcaaaaaaaaaaaaacaaacaaacaaacaaaaaaaaacaaatgtaatgaatgtggcaaagtcttcagttacaattcacaccttgcacaacatcagagaatacatactggagagaaaccttacaaatgcagtgactgtggcaaggtatttagtcgacttccgtgccttacacgacatcaaagagttcacactggagagagaccttacaaatgtaatgaatgtggcaaagcatttagagactgttcaggccttactgcccatctactaattcacactggagagaaaccttacaaatgtaaagaatgtgccaaggtcttcaggcatagattatccctaagcaatcatcagagatttcataccggagagaaaccttacagatgtgatgaatgtggcagggacttcactcgaaattcaaaccttgcaaatcatcacagaatccatactggagagaaaccttacaaatgcagtgaatgtcacaaagtctttagtcacaattcacaccttgcacgacataggcaaattcatactggagagaagtcttacaaatgcaatgaatgtggcaaggtcttcagccacaagttatacctaaaaaaacatgagagaattcatactggggagaaaccgtacagatgtcatgaatgtggtaaggacttcactcgaaattcaaacctggcaaatcatcacagaatccatactggagagaaaccgtacagatgaaatgtgtgtggtaagatctttagtaataattcacaccttgcacagcatgagagaattcattcatgagagagttcttacaaactgagtatggcaaactcttcatgctaagttctagcattaatcaacatcagagattccatactaaagagaaatcatagcaatgtatgtgaatcaggtctcttgaggcctgccaaatgactagatatcaaaacatacatcttggatgaaaccatacagatggattatgtatgctgaggctattattcaaggaccattactatggaacatgataagatttacacaagcgataattcagtctctagttctccaatatttatgatactgcatgctgcagaaaagtcacagctccaaatacgttgaatctcatgacgcgatgcatgtcgaaggtccaagggcatgtggaaatggtcagttatattcaggcaattaaaaaacctaattat

SEQ ID NO: 564 - DNA, 2173 bp, Homo sapiens
cacttccccgatcgggccgtgtccgccgcggccctgcgaggtccgaggggcaatagccctctggaacaagacaattcatgtgagataagaaagaagagcccacaagaccaaggatgtattctcagtttacagaccactgaccagaggccactccagggtgtcaggactaagagaagtcacaaaacagcagatttcccaagagcagcggaaaatgacccagtcacagatatcatttgaggatgtggctgtggatttcacgctggaggaatggcagctacttaatcctactcagaagaacttgtacagagatgtgatgttggagaactatagcaatctggttttcttggaagtctggctagataatcccaaaatgtggctccgagataatcaagacaaccttaaaagtatggagagaggccataaatatgatgtttttggaaaaatatttaattcaagcataaacattgttcatgtaggactgcgatcccataaatgtggcacaggagaaaaaagtttgaaatgtccttttgatttgcttattccaaaaaataattgtgaaagaaagaaaattgatgaactcaataagaaattattgttctgtatcaaacctggcagaacccatggtgggataaaatactgtgattgcagtacatgtagaaaatccagcaacgaagagccatggctcactgctaatcacataacacacacaggagtctatttatgcatggaatgtggcagattttttttaacaagaagtcacaacttgttattcaccagagaactcatacaggagagaagccctatcaatgcagtgagtgtggaaaagccttttcacagaagtcactgctcacggttcatcaaagaactcactcaggagaaaaaccgcatgggtgcagcgaatgtcagaaagcttttagtaggaagtcactcctcattttacatcagagaattcatactggagagaagccgtatggatgcagtgaatgtggaaaagccttcagtaggaagtcgcagcttaaaagacatcagataacgcacacaatagagaaaccctacagttgcagtgagtgtgggaaagcattctcccagaaattaaaactcatcacacatcagagagcgcacacaggagagaaaccctatccatgtagtcactgtggaaaagccttcttttggaagtcgcagctgattactcatcagaggacccacacagggaagaaaccttacggatgtggtgagtgtcaaaaagccttcagcaggaactcacttctcattaggcatcagaggattcatacaggagagaagccctacgaatgcaacgaatgtggtgaagccttcatcagaaaaccacagctgattaaacatcagataactcacacaggttaaatatctgtggacaagaaacaggataatcagttactgagtgaagaaagacgggaatgatgtcccatactccccagctctctaaagtgttatgctgtacaattaaaatacccctgacccatcatctgctaccattcgttgtggataattcatgtaatctctaacctgtgggcaagtctttacccttcagtagtcaagattacgttagagacttcgtccacgaatccacaccacctttcccatcagttctcaccggaaatatgctgccaaaaagaaaatcagcttttctaagatcaagccagagttgcttctcttacaaccttacggcgctaatgcattaagttgaagtcgactgccaaagaggcccagcagagggcagcacccccatcatttttttgaatttctcccttaggaattttgccttcctttgtcttctgtccaccaggccttctctccagctggacacaaacctcctttgaagggaaataattgccgttaggcttcacagtagtgctttttcctttcacttggatttgcattttaacctgcatttcgaagatttttatacatgttttctatttccgacaatgccaggaggcttcattgacgttgtagtctgtgttaataaacttgtgtatcactctgctctgatcttttaggaattaacttgcaaatgaaatgaatatgttgggactttggcataatttgaatatagcattgtgtgagttgtgattgtctcttcctaattgtgctgtaataacctgtgtatgagaataaaatgatttccaccatc

SEQ ID NO: 565 - DNA, 1690 bp, Homo sapiens
gcgtcttgcaccaaagggaggtcgggatctcggttttccggccccgagagggaccaggtgcctccgccatagcttctgtcgctccatcgcccgcactgtgactggactgttagagggatccgtggagaggaggccaggacacctggaagccgggaaatggattcagtggtctttgaggatgtagatgtgaacttcacccaggaggagtgggctttgctggatccttcccagaagaatctctacagagatgtgatgcaggaaaccttcaggaacctggcttctgaaaaaaatggaaagatcagaaaattgaagatgagtacaaaaatcccaggagaaacctaagaggtcttatgggagagagactcttagaaagtaagaaagatcatcagcatggagaaattttgacccaggttccagatgacatgctgaagaagaaaactccccgagtaaaatcatgtggagaagtcagcgtgggtcatgcatcccttaataggcaccacagagctgacactggacacaagccatatgagtatcaggaatatggacagaagccatataaatgtacatactgtaagaaagccttcagtgatctcccctactttcgaacacatgaatgggctcacactggggggaaaccttatgattgtgaggaatgtggaaaaagctttatttcccgttcaagcattcgaagacacaggataatgcacagtggagatggaccctacaaatgtaacttttgtgggaaagccttgatgtgtctcagtttgtatcttatccacaaacgaactcacactggagagaaaccatatgaatgtaaacagtgtggtaaagcctttagtcattctggtagccttcgaatacatgaaagaactcacactggagagaagccttatgaatgcagtgagtgtgggaaagcattccatagttccacatgcctccatgcacataaaataactcacactggggagaagccgtatgaatgtaaacagtgtgggaaagcctttgtttctttcaattccgttcgatatcatgaaagaactcacactggagagaagccctatgaatgtaagcaatgtgggaaagccttcagatctgcctcgcaccttcgaacacatggaaggactcacactggagagaaaccctatgaatgtaaacaatgtggtaaagcctttggatgtgcctcgagcgttaaaatccatgaaaggactcacactggagaaaaaccctgtagctccaacacttcgaaaggccaaggcgagaagattgcttaattcacataagattcctagaagccaccgaatccaatcatggtaaaaatgtgtttccctcaaatcatgggaaccatcgcaaaattattctgaagcttctgcagtcactgtcatttgacagcattcagaaataaatgccagtagcccaggagcaaaaatttttgggagtagtttagctggggcctcactcagatacctaggacacagagttggaaataactcttaagagagacacacctccagtaagaccttaagacagttctgtcataaaaaaaatacgaggtttggccgggtgcagtggctcatgcctgtggtcccagcgctttgggaggccgaggcaggcggaccacgaggtcagtagttcgagaccagcctggtcaatatggtgaaaccccatctctactaaaaaaaaaaaaaaaaaa

SEQ ID NO: 566 - DNA, 2334 bp, Homo sapiens
gggctcggtgcgactgcgcagctcctcggcgcttcctcggtggcttccccgggtcgagcaaacaggtaagttcggggagacttcaggccagggcagtctcctgtcttctcctggaaaccacagcagcccatgcacacagaatggcagccacattccagcttccagggcaccaggagatgccgctgaccttccaggatgtggccgtgtacttctctcaggcggaggggcggcagctgggcccccagcagcgggcgctctaccgggatgtgatgctggagaactatgggaacgtggcctctctgggattccctgtccctaagccggagttgatctcccagctggagcaggggaaggaactttgggtcctgaatcttctgggagctgaggaaccagatatcttgaaaagctgccagaaagattctgaggttgggaccaagaaggaactatctattttaaaccaaaaattttccgaagaagtaaaaaccccagaatttgtatcaagaagactcttaagggataatgcacaggccgctgagtttcgggaagcatggggccgtgagggcaaactcaaagagcgcgtgggaaattctgccgggcagagtttgaacaaacccaatattcacaagagagttttaacagaagctaccgtgggcagggaaagatctttgggagaaagaacccaagagtgtagtgcatttgatagaaacttgaatctggaccaaaatgttgttagacttcaaagaaataaagcaggagagagggtctttaaatgtgatatatgcagcaaaaccttcaaatataattcagacctaagtagacaccagagaagtcacactggggagaagccgtacgaatgtggccggtgtgggcgagcctttactcacagctcaaatcttgttctgcaccatcacattcacactggaaataaaccatttaaatgtgatgaatgtgggaaaacttttggactcaattctcacctccgtcttcatcggagaattcacactggagaaaaaccctttggctgtggtgagtgtgggaaggctttcagtcgaagctcaactcttattcaacatcggatcattcacacaggagagaaaccctacaagtgtaatgaatgtggaagaggctttagccagagcccccagttaactcagcatcagagaattcacactggagagaagccgcatgaatgcagtcactgtgggaaggccttcagtcgaagctccagccttattcagcatgagagaattcacactggagagaagccccataaatgcaatcagtgtgggaaggccttcagtcagagctcaagccttttcctccatcatcgggttcatactggagagaaaccctatgtatgtaatgaatgcggcagagcctttggttttaactctcatcttactgaacatgtaaggattcacacaggagaaaaaccctatgtttgtaatgagtgcggcaaagcctttcgtcggagttccactcttgttcagcatcgaagagttcacactggggagaagccctaccagtgcgttgaatgtgggaaagctttcagccagagctcccagctcaccctacatcagcgagttcacactggagagaagccctatgactgtggtgactgtgggaaggccttcagccggaggtcaaccctcattcagcatcagaaagttcacagcggagagactcgtaagtgcagaaaacatggtccagcctttgttcatggctccagcctcacagcagatggacagattcccactggagagaagcacggcagagcctttaaccatggtgcaaatctcattctgcgctggacagttcacactggtgagaaatcctttggatgtaatgaatatggaaaagctttcagtcccacctcacgacccactgaagatcagataatgcatgctggggaaaagccctataaatgtcaagaatgtggaaacgccttcagtggaaagtcaacccttattcaacatcaggtaactcacactggtcagaaaccatgtcattgcagtgtgtatgggaaagccttcagccagagttcacagctcacaccacctcagcagactcgtgttggagagaaacctgctttaaatgatggctctaaaagatactttattcatatcaagaagattttccaagaaagacatttttaatgtgataaatgcagaagacagtttagcaactgttcacttgacattagaagataagatggcataatgaaagatatataaggtctaaatattactggcaaagtaaaataaatagttcagatgactaaaaaaaaaacaaaaaaaaaaaaaaaaaaaaaaaaaaaaaaaaaaaaaaaaaaaa

SEQ ID NO: 567 - DNA, 3207 bp, Homo sapiens
ttcattgcttagtatcctctgctctagtagttcccggtgactgtcgcagcctctgttgccctctgacttgcagatgctgtgagatccagagctaagactccacgacatcccggaagccgaaaaatggaactgttgacattcagggatgtgaccatagaattctctctggaggagtgggagtttctgaaccctgctcagcagagtttgtataggaaagtgatgctagagaactacagaaacctggtctctctgggtcttactgtttctaagccagaactgattagccgtctggagcaaagacaggagccctggaatgtgaagagacatgagaccatagccaaacccccagctatgtcttctcattacactgaagaccttttgccagaacagtgcatgcaagattcattccaaaaagtgatactgagaagatatggaagctgtggacttgaggatttacacttaaggaaggatggggaaaatgtgggtgagtgtaaggatcaaaaagaaatttataatggacttaaccaatgtttgtcaactctacctagcaaaattttcccatataataaatgtgtgaaagtctttagtaaatcatcaaatctaaatagagaaaacataagacatactacagagaaacttttcaaatgtatgcaatgtggcaaagtctttaaatctcactcaggcctttcttatcataagataattcacactgaagagaaactctgcatatgtgaggaatgtggcaaaacctttaagtggttctcataccttactaaacataagagaattcacactggagagaaaccatacaaatgtgaagaatgtggcaaagcttttaactggtgctcgagtcttactaaacataagagaatccatactggtgagaaaccctacaaatgtgaagaatgtggaaaagcctttcactggtgttcaccctttgttagacataagaaaattcatacaggagaaaaaccctatacatgtgaagactgtggcagagcgtttaaccggcactcacatctcaccaaacataagacaattcacactggaaagaaaccctacaaatgtaaagaatgtgggaaagcctttaaccactgctcactacttactatacatgagagaacccatacgggagagaaaccctataaatgtgaagaatgtggcaaagcttttaactcatcatcaattcttactgaacataaggtaattcatagcggagagaaaccctacaaatgtgaaaaatgtgacaaagtctttaagaggttctcataccttactaaacacaagagaattcacactggagagaaaccctacaaatgtgaagaatgtggcaaagcttttaactggtcctcaatccttactgaacataagagaattcatactggagagaaaccctacaactgtgaagaatgtggaaaagcctttaatcggtgctcacaccttactagacataagaaaattcatactgccgtcaaacgctataaatgtgaagaatgtggcaaagcttttaaacggtgctcacatcttaatgaacataagagagttcaaagaggagagaaatcctgcaagtataaaaaatgtggggaagcttttaatcactgctcaaaccttactacgtaagaatttttactaaagagaaatcctacaaatgtaaagaatgtggcaaattccataaatcttgctcaaggcattgaaatcacaagataattcatactggagagaaacactacaaatgtgaagaatgtggggaaagtcttcaaccattgctgacagcttattgcacagaagaaaattcatgctgagaaaaattctgattttaaagaatgtggcaaagcatttaataactactatgaacttactcatcagaggttttgtgctagataaaagcaatgtaagtgtaatgatacacattacatttatctgtggaaagatgtcaccaaataaaagccttagagtacacaaggtgtaatgatagtgatacattacatttgtacatggaaagacttcaaaaatataagccttagagtacacaagagtttttatactgaagaaaaacattacaaatataaagattgttgcaatacttttacttatgttacagattttgttgtacataggagaatttatactgaaaggtaaccctctaacagttgctcaaattttattccattttagataatttacattggaaagaaaccctacaactgtaatgaatatgaaaaaaattgtttaaaaagtacaccttagaaaacactagtttaaggccgggcgcggtggctcacacttataatcccagcactttgggaggccgaggcaggcggatcacgaggtcaggagatcgagaccacgatgaaaccctgtctctactaaaaatacaaaaaattagctgggcatgttgtcgggtgcctgtagtcccagctactgggagaggctgaggcaggagaatggcgtgaacccgagaggcggagcttgcagtgagccgagatcgcgccactgaactccaacctgggcgacagagactctgtctcaaaaaaaaagaaagaacgctagtttatatgaaagcatttaacagatgcagtaaatataaaaaattaataaaaaattaagtctaaatgaacatcagaagattcacagtagaaaccactaagacgctaacactttcaatgttattctaaatcagggcattgattataaagagtaattcaaggttaacataatttagttagcctaaacagaaataggagattaatattttgagacttaaacaattatattcaaagtacactttttgcattgaaagaattttagatttttacaaaggcaaattttgatgtaattgaactctcaaattacttgatgctgtgtctttattcctagtgtctgtatgaaagcatgtggtcaatttctgctgctcggggtttgagaagttctatattaggatgtcatttacatacttttcaacagaagattgaggacactgaaatatgaggtgtgtgaagaaagtacacagagaaacttttgtggttgacttataaaacttgtaagtgctgcatgagatagatgttcagagtaatagtcttgtgcattattcaaattttagtaaattgttttaccaattgcacattagatagtatagtggattttgtaatgcttttcttagactgtgtgaacttagtttcaataaaacaattatttttaatgtgttaa

SEQ ID NO: 568 - DNA, 3403 bp, Homo sapiens
tgatcaacaactgtcagctcccagtcagagagaaagggcctcttcagtctgtctcaggagactgggagaaacagcataaaggaccccacaaggaagggagaggtaccctgggtcaggcgcttgtggagagagggcttcgcatgtaaagtgacgtcagggaaaatagaacagaaaaaaagccagggccagcccagaggcacctgagaagaatcagacccacagctcagcccagccctggcacagagaagagacaggcctggcagcacccagggaccccctttcctcagcctccacctgcaggacagcaggagcactgatgcgctgaaggtacgttctggagtctggaagcagcagaactgaaggaagtaaacacgggtgtctgggaagacccctcaagctgcagtaaagcccaggactgaattggccacctgaggccaagggtggcactccaacctcctcctaaaggctggctagagccacaggaaagggccagaagccagagaaagggcaaaggtggacccctgcctccaaacctcctctggagactgacctcctctttcctgtgccttattgtttctccctcttctctttgttcgccactgggcggtgacctcagggatcctggcctaacctggtgattgtgcaggcaactgtgtccgagaagacccttctctggaagattgaaccccaattcagccatggtgactcctttgatgtcaaactggtaagggctgagccgtgggcacaggataccactccttccagctcttctgctgtgacctgcccatggaagtccctgtggacacgaaatcctgtttggatcatctaactggaggctctctgttcttcacctccacgcgccctcttgaccccaggaggttcaggggaggaagtacgccactctccactggcaccctccttggcctacacagagtcacccctgagcccctcaatgtgtgctgaggtgggccctgctctctgcaggggtatggagagaaatagcttggggtgctgtgaggccccgaagaagctgggcctgtccttctccatcgaggcgatcctaaagaggcctgccaggaggagtgatatggacagaccagaagggccaggtgaagagggccccggagaagctgcggcctcaggctctgggctagaaaagcctccaaaggaccagccccaggaaggaaggaagagcaagcggagggttcgtaccaccttcaccactgagcagctgcatgagctggagaagatcttccactttacccactacccagacgttcacatccgcagccagctggcagccaggatcaacctcccagaagctcgggtgcagatctggttccagaatcagcgagccaagtggcggaagcaggagaagattggcaacctgggggctccacagcagctgagtgaagccagtgtggtcctgcccacaaatctggatgtggctgggcccacgtggacatccactgctctgcgcaggctggctcctcccacgagctgttgtccatcggctcaagatcagctggcctctgcctggttccctgcctggatcaccctcctcccagcgcacccatgggaaacacagcctgtcccaggtcttcccatccatcaaacttgcatccctgtgctatgcatccttccacctccacaccccaaatggggcagcatctgtgctacttcaacatagagattggacatgctctccccaaatgagccactttcctctccaggtgaaggcaggtagcagatgtgccctgggcctctggggaaatcgatctcacaatccaaaaatggcccacagcccaggaagctaccctgaacatgccagttggaaggctgcaccagactcaaaagcaaactaaacaataaaggacagctctcttctctcctggctaaagctgctctcctggttcagaagacaggctggatgagatctcaggccgagctctgaaatagggaggtaatcctccagcacctgtgtttcctctaacttgctgtgtgacctccagccggtcactcaccctctctggacctcatctgtaagaggagccagctggataagatgatttctgaagacgcttccatggtgggcactgaggcacagaggaggccaaggagaggttgtttgttcatgcatgcattcatccgtgacacatgagtacctactgaggactccataaacagaacgggatacagagataaacaatttgggttctgtccacgtttgtcaaaaggtggtgctggcccacctctgaaagcagaacacttgctcaacaaccttgctgttggcccaagtctaacacattctttatgactgtgagcatctcagagtgagagaaaaatgtagaaagttttttaaattctaaacaggatttagtgtctttagttatcttgctggatgggaaagggatgttgtcatttctggcacaaatgaaaagtaggacggaaagctcctttcattcagtttatctttccaggatatatgaaaagggaccagctggaagactagcctcactctgtcctcgaaagcctgagctttcattcaactccctatttccatgcaaagacgctgggcaaaccacatgttctgtctgagcctcagttttcctatccataaaatgaaggtagccaggcctgcctcaaagagcattcaggaggctctgagaggacatgagagtattttgcaaagtgagggcaaggcccagtgtggagtgatattgttattccaagattccactgcaaaagtggctgctttggatgccagcccaggatgagtagttcctgttctcagggaggtcatccgctgagcatcccttctgcacagatgtctctgattcttgtccttgcaggtggaggacagggcctgctcccctaagctgggaagcctggaatgacctcttgcacaagcctaaattccaggaatcttccccaaatcccagatcctctgcaatctacctgcacccctgacccacccaggagttggaccgggagttgggaagcctaggtcttagtcctacactccttctaatttgctgtgtaaccttaccattaatctctctgggtctcagttttctcatctgtattggaggtagcagtgctagctctgccttcaggcatgcaatatgccagaactacagacaacagcccacaggatgcaaaagtgctttgccatcttaaaaatgccagatcactcagagcctatgaatgtggatatcaacaccaggtctctagcaccgctggatgaaaggagaaggctagaggctgagggaggaaagagcagttaacaaacaaaggcagtagctcatcacttgggtagcaggtacccattttaggaccctacactcaaatgtgcaaaataaaatttctatcattttgctataaaaaaaaaaaaaaaaaaaaa

SEQ ID NO: 569 - DNA, 1729 bp, Homo sapiens
ggagctgtgaagctgctggaggagttggcgtccggggagcaagggccatggccaccgtgcaggagaaggctgctgcgctgaacctctcggctctccacagccccgcgcacaggcctccgggtttcagtgtagctcagaagccatttggagccacgtatgtatggagcagcatcataaacactcttcaaacacaagtggaagtgaaaaaacgaaggcaccgtttaaaacgacataatgactgctttgttggttcagaagctgtggatgtcattttttctcacctaattcagaataagtattttggtgatgtagatattcctcgagccaaagtggtgagagtgtgtcaagcgcttatggactacaaagtatttgaagcagttccaaccaaagtctttggaaaagacaaaaaacctacatttgaagatagtagttgcagcctttatagattcaccacaatacctaaccaagacagtcagttaggcaaagagaacaaactatattcacctgccaggtatgcagatgcattatttaagtcatccgatatcagatcagccagtttagaggacctgtgggaaaatctgagtttaaagcctgccaactcccctcatgtaaatatctctgcaaccttgtctccacaagttattaatgaagtgtggcaagaagaaacaattgggcgtctactacaacttgtagaccttccacttcttgactccttactgaaacagcaagaggctgtacctaaaattcctcaacctaagaggcagtccaccatggtcaacagcagtaactatctggatcgagggattctcaaggcttatagtgactctcaggaagatgagtggctctcggcagcaattgactgttcagaataccttccagaccaaatggtggtggaaataagcagaagctttcctgagcaaccagaccgaacagacttagtgaaagaacttctgtttgatgccattggcagatattacagtagtagggaacctctgttaaatcacttatctgacgttcataatggaattgcagaactcttagtgaatgggaagacggaaatagctttagaagctacccagctccttctaaagcttttagatttccaaaatagagaagaatttagaagactactgtatttcatggctgttgcagcaaatccttctgagtttaaattacagaaagaaagtgacaaccgaatggttgtgaaaaggatattctcaaaagctattgttgacaataaaaatttatccaaaggcaaaacagatcttctggtactctttttaatggatcatcagaaagatgtttttaagattcctggaactctacataaaattgtaagtgttaagcttatggccatacagaacggaagagatccaaatagagatgcaggatatatttattgccagagaattgatcaacgtgactattccaacaatacagagaagacaaccaaagatgagctgttgaatttactaaaaactcttgatgaggattcaaaactttctgccaaagagaagaaaaaattgctaggtcaattctataagtgtcacccagacatctttattgagcattttggagactgagtttttaatatctgtatataagttgtgtattttaagaataaattatgtatcctaaatatccaatcacatttgtaagcgtggaagctctaaatttgaaactgtacttaataaaaatttttttgtataaaaaaaaaaaaaaaaaaaaa

SEQ ID NO: 570 - DNA, 4144 bp, Homo sapiens
gctgccattcggcaccggagtcgctccgcgctcccagaatgcaccggcagtccgcgggaaaccaaaatggcgaggggctgtattgaagtgggctgtgtttgaggccggtgtaagaacgctcattctacccccaacccttgtctccaaggacctcggtttgtgcgtgcatatgtgccgggtacccggtggggcgggtgcccagtaagtgctcggactcgcaggggaagcgcccacggggacggattggttgttttttcctgtatgaagcggttggcaccactgaagtgaccgaatgagagactctacaggggcaggtaattcactggtccacaagcggtctcctttacgtcgaaaccaaaagaccccaacatccttgaccaagctgtctttacaggatggacataaagccaaaaagccagcatgtaaatttgaagagggtcaggatgtcctagctagatggtcagatggcttgttttatcttggcactatcaaaaagataaacatattgaaacagagctgcttcatcatatttgaagacagttctaaatcctgggttctctggaaggacattcaaacaggagccactggaagtggggaaatggtctgtacaatatgtcaagaagagtattcagaagctcccaatgaaatggttatatgtgacaagtgtggccaaggatatcatcagttgtgtcacacacctcatattgattccagtgtgattgattcagatgaaaaatggctctgtcggcagtgtgtttttgcaacaacaacaaagaggggtggtgcacttaagaaaggaccaaatgccaaagcattgcaagtcatgaagcagacattaccctatagtgtggcagaccttgaatgggatgcaggtcataaaaccaatgtccagcagtgttactgctattgtggaggccctggagactggtatttgaagatgctacagtgctgcaaatgtaagcagtggtttcatgaggcttgtgtgcaatgccttcaaaagccaatgctatttggagacagattttatacgtttatatgctctgtctgcagttctggaccagaatacctcaaacgtctaccattacagtgggtagatatagcacacctatgcctttacaacctaagtgttattcataagaagaaatactttgattctgaacttgagcttatgacatacattaatgaaaactgggatagattgcaccctggagagctggcagacacaccaaaatctgaaagatatgagcatgttctggaggcattaaatgattacaagaccatgtttatgtctgggaaagaaataaagaagaagaagcatttgtttgggttgcgaattcgtgttcctcctgtgccaccaaatgtggctttcaaagcagagaaagaacctgaaggaacatctcatgaatttaaaattaaaggcagaaaggcatccaaacctatatctgattcaagggaagtaagcaatggcatagaaaaaaaaggaaagaaaaaatctgtaggtcgtccacctggcccatatacaagaaaaatgattcaaaaaactgctgagccacttttggataaggaatcaatttcagagaatcctactttggatttaccttgttctatagggagaactgagggaactgcacattcatccaatacctcagatgtggatttcacgggtgcttccagtgcaaaagaaactacctcgtctagcatttccaggcattatggattatctgactccagaaaaagaacgcgtacaggaagatcttggcctgctgcaataccacatttgcggagaagaagaggtcgtcttccaagaagagcactccagactcagaactcagaaattgtaaaagatgatgaaggcaaagaagattatcagtttgatgaactcaacacagagattctgaataacttagcagatcaggagttacaactcaatcatctaaagaactccattaccagttattttggtgctgcaggtagaatagcatgtggcgaaaaataccgagttttggcacgtcgggtgacacttgatggaaaggtgcagtatcttgtggaatgggaaggagcaactgcatcctgactgtaggactgaacattatgttcactgcactctgattttctgtaggtacagttcaaagccctaaaggagtctggcttttactatctttcttaaaaaaaaaaaaaagtcaaaaaaattcaaaaaaggggatgatactagccttaacatgtacctgtcaatgttatggatattgtcataaaaaggtatcttttaaaaatcagaacagagacttaattttttaaatcttaagatttgtagaatgtttctaggataggatattaaaaatgattgaaacccatgcatggtgttagacaatttttctaattattccattgagtcagttttttgtgattagtgattatcagagcaaacatcatgtagatagcacaagtatttggagaaacgttgtttgttttgttaccaaaatgttggaaaaatttatttcaataccttttagatttcataaagtgcagtgtatataatgcctactgaaagactgtaaaatattgaaattttctttcaagcaaagtgtaaaaaaatatattgagcctgtaaattgctctgtgactagacttcattgtcgtcttaatatattcttgcatgtgcatatatatacacacgtgtatatatatgtgtgtgattatgtgacctatgcaatacaaattatgggaatgggcagctttggagtatatatcccataattcttttttcaggaatagttgcagtatttacacagcagcatttcttctcaggcttttattgggtgctgttgcttgctatgtatgaagagaaatgtgtcagacaagtttagtgtgttctgaagaagggtgtgaacaacagtgttcatgggcttttagaatgcttttcacttttagtccttgtaactcagctgttcagtacctaaaacaaattcaaataatatgaacattatctcctactagaagtaacgttttcaagttttcatggcacattatgattgtaaatgtctctcatttttaacagtaagtctataggagtcccgtgaagattcctgaaatgtctgtagtaactgttagtcatgtttgaataagtgtagtatgaacaaagtattttattgcacagggttaacaaacagtatgttgccagctgaggctactgctgttttattacaacattacctcttgtttttataaagtgtaccaagatttaaattgataactttattttacttgtaaaaaaaaagtttcttttatcaccagtgttacagttgtcttctgtttctttttgttttgttttatttgttttcctttttagccaaagagtgaacagaagattttcttattttggtggctattcattttacttttaaaagtgattggtggattttagactaattatgggggaatttgccaccaaaataaaaaatatgtaaagtgtagtgattacagagtggttaaaatgtgggttagtacttatttattccattaattgattatttgactgtttataaagaaagttgctttatttctttaaacatcttcaaaagatgatcctttcttgtcacattatagccaaaagaagcagagaacttcattgtctgcatttggttcctggttggccaggtataaatgagctttacaaaagtgcaaattaaaaactgttacttctgtttacctccaccaaaacttgattttcccctagctattaatttaaggttgcctttcctgcagctgcaatattttgaataacacacagagtttgtgttgatttttgaatgtttgtttatatctaggggtaatgaaaaatgtaaatcccgtgtatccttattcactccacctgtatcatattatttcattttccccaaagtcctttaattctaactgaacaccagcagtatttttagaaatttttctttaacatacttggaagatgatttatccagctgaactgtctttagacgtaattattgtgaatgtctgttttattttctcatggtggttcacatggctctgatgttcagtttgtatttttggaattgctttacttagaaattaaaacagaccaacattaaatgtgtgtattttttaaagagctaaaaaaaaaaaaaaaaaa

SEQ ID NO: 571 - DNA, 5587 bp, Homo sapiens
gagtcggggataaacactccgcggcggtggcggctgctgctctgctccgggttctgtcactgtgtcggcggtgcccagctcactggccccctccctctcttgtcgagcgtggttgccagagaggctccctcagccctgctccgcggggtccacagcgggctccacagcgggctccatagcgggctccacagcggtccggcggcggcagcgagcccgtgggcagtgggggttggtcccgtggctccggcccccggtgcagaatggcggcggcggttcggatgaacatccagatgctgctggaggcggccgactatctggagcggcgggagagagaagctgaacatggttatgcctccatgttaccatacaataacaaggacagagatgccttaaaacggaggaacaaatccaaaaagaataacagcagtagcagatcaactcacaatgaaatggagaagaatagacgggctcatcttcgcttgtgcctggagaagttgaaggggctggtgccacttggacccgaatcaagtcgacacactacgttgagtttattaacaaaagccaaattgcacataaagaaacttgaagattgtgacagaaaagccgttcaccaaatcgaccagcttcagcgagagcagcgacacctgaagaggcagctggagaagctgggcattgagaggatccggatggacagcatcggctccaccgtctcctcggagcgctccgactccgacagggaagaaatcgacgttgacgtggagagcacggactatctcacaggtgatctggactggagcagcagcagtgtgagcgactctgacgagcggggcagcatgcagagcctcggcagtgatgagggctattccagcaccagcatcaagagaataaagctgcaggacagtcacaaggcgtgtcttggtctctaagagagtgggcactgcggctgtctccttgaaggttctccctgttggttctgattaggtaacgtattggacctgcccacaactcccttgcacgtaaacttcagtgtcccaccttgaccaaaatcagctttgtaactgttttcaaggaggtgcttaggattgtgggtttctgattgcatccactagcttctctttttctcgccataaaaatttgtctctgagagactatacattccaatcaatttgaagcatccaagaattcttagaccgaataagcaatgtccacatctcagcaatccccctctttgctctcctcgtgtcctctcccagacctttcttccagttttctggcttactgtgttacttgcctaggaggaatgtccaagtgtgtcttgtacttaggaaactgaaggaaacaaacttttgaaattgagatcctgatctcagaactccaaagtaagctttgaaagcagcatttaagagcacttaaccatggacctcaccaccagtgaggaagtcaggaatacctctagaaaacacgcccttcacaccgcgcatgctcattcccccgacgcgccgcgtgtggatgggagcagtatttctcactttaaaatggacaccttgatagtgtgtctctggggttgcacagctcatcaaagttccaaattgtttgttctcacaaacaaaacggtacaatctatttttgtgcgatgttcttgggacctcgctgtgttctgctatctcgaggcacattctcccctccaactttgttaatgctacttgtctctggaacatttttttttcctacctcagagataaatgagatctccatttcccacttaacacagtgattatccttttttccccccccaaaatagtgacatttggtccaattataatctattttcctattgaactttcagcaataactgagctgtggcactagcagagctagtagccattatcagtgaaagaaaaagtccacatttctactctctgttgcaggtgaacaggagaggatggtacactgttactagaactcctctccttattgattatttttggacacacccagaaacttctttatggaggcttttgggttgatagtttaaaaggctgatttttctttttggttatgatttctcccttaagtggtctccgactttgtagcatttttatttaagctaaaacagagcacatgtatatgtacataagacacattaaatctataaatactatttattcattttatataaactaatgtaatggaaaacaaattcttatgactttgtggttttatagatgttctagaaactttgtatgtaggtatctacaaaattagttcattcccctgaatatttttgcattcatatttttgaggtcttgatgttttcagcctctggcgaatctttttcattgaatttgaaccatttgtaaaatctgtgatgctgaagcagagtgtgtcacaaagtgatgagaacattactaaaatccacggacgcactgcgacctaagggctcaacggctgactcggcagcgggcagccaccccacgctcccctgcggtcactcgcacaccacagcctgaagctcccccagcgcctgcacctcgcacacagctaaggtcaaagttcaaacgcactccacacggaagctcattctatacccgaagagcagtctcagaaagcaagattacttttgtgttttttaaaaaatgattctttaatgtatttttctaaacattctgattggaagtagtggattcctaaatgattccaaagtcacctgtaattcttctgtttttgttttgttctgtcttttcttcattttggctttgggtggggggaggggcaggtgacacaaaggattttttttttttttttttaatttttggaatcttttccaataaccagctaaagatttgcactgaaatacaacttgtatgccttttgcatttttaaagcctgcttcctggatttaagcagagtgatagtgttcaaagagccagttcagcctgtaacatatttgaaaaagatatgtctgcactttgaggtcccttttgaatgccattcactagacctctcaagcattttgtttcattgctacatccaagcgcctcacaagtccacaatgcgggacagcatcaaaagctcaagactttggaaaaagcttgtgggcttgcactgggggagggaagggaacaaaatttgtgtacttctttgtttaatttagaaataaggcatccaagagatgccattattttctgtgtttcaattgttgtgcctttgagttaaactgcatttttgtcttttggttgaaatctgaaatgtactgtcccaatataaaacagtaattatttgacctttgcactgtttgtctggtccttttcagtttgattgcatataaatgtggaacttgatagatctctatatttttaatgcacttgtgataaactggcagcagggttagacattactttcaaagcttgaggtagaccgagtcagcatgctagacaggcttctctctctaaccaaaactgtaatcttcaggaccagcaaactcagcccaaggcagctaatccccccaaccccatcctccgcgccccgtgcggctgatcggcagccctgattcgccaatttgtcctctctcattcactgatccaccagcctgactgctaagagctatagtctttttagttgttttgtctttttaagcaagatgaaaacctttctattagggattttggggttgggaggggatgggcagagatataaaccccagcctttaagactttgacaattgtacgtaaatacagatgtgtataaatataggcacatgcatatttttatgtgaaagttgattttaaaaaactaaaaaaatctaaactgcactcttattgataccatcataacgcaagtgggaaaaataagagtacgcagtctaatttaatttcatgcagtgggaaaatatatatgtgtgcttctgtaacatcctgaaaacatagctttccatcccctgttggctttgaatggtgggccgagcacccaggtcgtctgtattttggttttcttttgctaagcagagatcttgaattcttcaaggtgctgatagcaactgctggctcctttctgtagtcacacacctaatgctagtttagtgattcaaaatgcatcacatttttaggcaggacctagattttccctgtcaacctaagatgaaaataatttcagtgttgattcagaactgaacattaagtaggccctcgtcctgcagttggccacttgagtgttttgttttgtttttattttttaaggtgggcattttcctttaacctctactttttcaaaagcaacaaaggggcctcaacctgagtttcctatgggcctctcttctgcatccccaaagcggccaagagcaaatcctgggggataagaaaaaagtgtaaactaggtaggattgtgatgctcaaaataaccatctagcaatatcttggagcttgagaatagattttgtgggcttatttcttcttgcctcttccccatcctttcaagagagaacttatttttgaaaagtatctatatatacacacacacacacacacacacatattattatttaggtttttataccatactgtattggcgagaataccactatcattgtcctttacagtctatttcttcccccaagtcttggtctttttttattttctattttttcatgaaccacacaggagactttaacatcctggtcttttctgtttcttctttgtttccccaagtttgtctgtccccctttgccttccctgagtgttgaacatcaggtagtaaaaggctaaacgcaatttcttgcatgtcaatctattctttttctatgtttgactctgatgcagtgtgtttagcgtgtctagtagctggctactcctatttaaaaactcttcctggtagaagacaacccaaagacccttttcgatgaggtggtttctcattctacatcctctgatctctatagactgtaggatgctttgctttcaaagataactgggttagagggtggggtgtgcaataggtgatttatcatggtttttttcattatcaatattacatggatgattttctcagattcttctgaaagaagaaattgacaggcactgctagattcagctattgaatggctgaagagattgagtatttgaccttctctcaaaatcataaagtgagaattcataaggcacccaatgttaagatttatccagatttttacattttgatttcttctctctgtggggtggcaagttgagggagcattcttcattttagcttttacctgacaaccaaacttgcctttaccccatccctagaattggtgctcttggaatattgctgttaccatcatttttggggggccatcttcctaatgctacacacagcctgacaggggagcagcagatgaaagggtatgctattctgtttccagatgtttctttatgtaaatatgacgccaatgtaaatcctgtgtcaagatcatagagaatggtgctttttactacagttagcacatgcatttttagaaactactacatgttttagagaatctttgctgtgtatatgtaaactgtattgttcaactgttaacaaataataaattatttcattattaaagaaa

SEQ ID NO: 572 - DNA, 3056 bp, Homo sapiens
ggcagctgaggagtggaggctgggcagctccgactccctgacgccagcgcgaccagatcaatccaggctccaggagaaagcaggcgggcgggcggagaaaggagaggccgagcggctcaacccgggccgaggctcggggagcggagagtggcgcagcgcccggccgtccggacccgggccgcgagaccccgctcgcccggccactcgtgctcccacacggacgggcgcgccgccaacccggtgctgactgggttacttttttaaacactaggaatggtaatttctactcttctggacttcaaactaagaagttaaagagacttctctgtaaataaacaaatctcttctgctgtccttttgcatttggagacagctttatttcaccatatccaaggagtataactagtgctgtcattatgaatgtgacaagtttattttcctttacaagtccagctgtgaagagacttcttgggtggaaacagggcgatgaagaagaaaaatgggcagagaaagctgttgatgctttggtgaaaaaactgaagaaaaagaaaggtgccatggaggaactggaaaaggccttgagctgcccagggcaaccgagtaactgtgtcaccattccccgctctctggatggcaggctgcaagtctcccaccggaagggactgcctcatgtcatttactgccgtgtgtggcgctggcccgatcttcagagccaccatgaactaaaaccactggaatgctgtgagtttccttttggttccaagcagaaggaggtctgcatcaatccctaccactataagagagtagaaagccctgtacttcctcctgtgctggttccaagacacagcgaatataatcctcagcacagcctcttagctcagttccgtaacttaggacaaaatgagcctcacatgccactcaacgccacttttccagattctttccagcaacccaacagccacccgtttcctcactctcccaatagcagttacccaaactctcctgggagcagcagcagcacctaccctcactctcccaccagctcagacccaggaagccctttccagatgccagctgatacgcccccacctgcttacctgcctcctgaagaccccatgacccaggatggctctcagccgatggacacaaacatgatggcgcctcccctgccctcagaaatcaacagaggagatgttcaggcggttgcttatgaggaaccaaaacactggtgctctattgtctactatgagctcaacaatcgtgtgggtgaagcgttccatgcctcctccacaagtgtgttggtggatggtttcactgatccttccaacaataagaaccgtttctgccttgggctgctctccaatgttaaccggaattccactattgaaaacaccaggcggcatattggaaaaggagttcatctttattatgttggaggggaggtgtatgccgaatgccttagtgacagtagcatctttgtgcaaagtcggaactgcaactaccatcatggatttcatcctactactgtttgcaagatccctagtgggtgtagtctgaaaatttttaacaaccaagaatttgctcagttattggcacagtctgtgaaccatggatttgagacagtctatgagcttacaaaaatgtgtactatacgtatgagctttgtgaagggctggggagcagaataccaccgccaggatgttactagcaccccctgctggattgagatacatctgcacggccccctccagtggctggataaagttcttactcaaatgggttcacctcataatcctatttcatctgtatcttaaatggccccaggcatctgcctctggaaaactattgagccttgcatgtacttgaaggatggatgagtcagacacgattgagaactgacaaaggagccttgataatacttgacctctgtgaccaactgttggattcagaaatttaaacaaaaaaaaaaaaaaacacacacaccttggtaacatactgttgatatcaagaacctgtttagtttacattgtaacattctattgtaaaatcaactaaaattcagacttttagcaggactttgtgtacagttaaaggagagatggccaagccagggacaaattgtctattagaaaacggtcctaagagattctttggtgtttggcactttaaggtcatcgttgggcagaagtttagcattaatagttgttctgaaacgtgttttatcaggtttagagcccatgttgagtcttcttttcatgggttttcataatattttaaaactatttgtttagcgatggttttgttcgtttaagtaaaggttaatcttgatgatatacataataatctttctaaaattgtatgctgaccatacttgctgtcagaataatgctaggcatatgctttttgctaaatatgtatgtacagagtatttggaagttaagaattgattagactagtgaatttaggagtatttgaggtgggtggggggaagagggaaatgacaactgcaaatgtagactatactgtaaaaattcagtttgttgctttaaagaaacaaactgatacctgaattttgctgtgtttccattttttagagatttttatcatttttttctctctcggcattcttttttctcatactcttcaaaaagcagttctgcagctggttaattcatgtaactgtgagagcaaatgaataattcctgctattctgaaattgcctacatgtttcaataccagttatatggagtgcttgaatttaataagcagtttttacggagtttacagtacagaaataggctttaattttcaagtgaattttttgccaaacttagtaactctgttaaatatttggaggatttaaagaacatcccagtttgaattcatttcaaactttttaaatttttttgtactatgtttggttttattttccttctgttaatcttttgtattcacttatgctctcgtacattgagtacttttattccaaaactagtgggttttctctactggaaattttcaataaacctgtcattattgcttactttgattaaaaa

SEQ ID NO: 573 - DNA, 10384 bp, Homo sapiens
gcgcccgggccgccggccgggcccgggcctgggggcggggcgggaagacggcggccgggagtgttttcagttccgcctccaatcgcccattcccctcttcccctcccagccccctccatcccatcggaagaggaaggaacaaaaggtcccggaccccccggatctgacggggcgggacctggcgccaccttgcaggttcgatacaagaggctgttttcctagcgtggcttgctgcctttggtaagaacatgtcgtccatcttgccattcacgccgccagttgtgaagagactgctgggatggaagaagtcagctggtgggtctggaggagcaggcggaggagagcagaatgggcaggaagaaaagtggtgtgagaaagcagtgaaaagtctggtgaagaagctaaagaaaacaggacgattagatgagcttgagaaagccatcaccactcaaaactgtaatactaaatgtgttaccataccaagcacttgctctgaaatttggggactgagtacaccaaatacgatagatcagtgggatacaacaggcctttacagcttctctgaacaaaccaggtctcttgatggtcgtctccaggtatcccatcgaaaaggattgccacatgttatatattgccgattatggcgctggcctgatcttcacagtcatcatgaactcaaggcaattgaaaactgcgaatatgcttttaatcttaaaaaggatgaagtatgtgtaaacccttaccactatcagagagttgagacaccagttttgcctccagtattagtgccccgacacaccgagatcctaacagaacttccgcctctggatgactatactcactccattccagaaaacactaacttcccagcaggaattgagccacagagtaattatattccagaaacgccacctcctggatatatcagtgaagatggagaaacaagtgaccaacagttgaatcaaagtatggacacaggctctccagcagaactatctcctactactctttcccctgttaatcatagcttggatttacagccagttacttactcagaacctgcattttggtgttcgatagcatattatgaattaaatcagagggttggagaaaccttccatgcatcacagccctcactcactgtagatggctttacagacccatcaaattcagagaggttctgcttaggtttactctccaatgttaaccgaaatgccacggtagaaatgacaagaaggcatataggaagaggagtgcgcttatactacataggtggggaagtttttgctgagtgcctaagtgatagtgcaatctttgtgcagagccccaattgtaatcagagatatggctggcaccctgcaacagtgtgtaaaattccaccaggctgtaatctgaagatcttcaacaaccaggaatttgctgctcttctggctcagtctgttaatcagggttttgaagccgtctatcagctaactagaatgtgcaccataagaatgagttttgtgaaagggtggggagcagaataccgaaggcagacggtaacaagtactccttgctggattgaacttcatctgaatggacctctacagtggttggacaaagtattaactcagatgggatccccttcagtgcgttgctcaagcatgtcataaagcttcaccaatcaagtcccatgaaaagacttaatgtaacaactcttctgtcatagcattgtgtgtggtccctatggactgtttactatccaaaagttcaagagagaaaacagcacttgaggtctcatcaattaaagcaccttgtggaatctgtttcctatatttgaatattagatgggaaaattagtgtctagaaatactctcccattaaagaggaagagaagattttaaagacttaatgatgtcttattgggcataaaactgagtgtcccaaaggtttattaataacagtagtagttatgtgtacaggtaatgtatcatgatccagtatcacagtattgtgctgtttatatacatttttagtttgcatagatgaggtgtgtgtgtgcgctgcttcttgatctaggcaaacctttataaagttgcagtacctaatctgttattcccacttctctgttatttttgtgtgtcttttttaatatataatatatatcaagattttcaaattatttagaagcagattttcctgtagaaaaactaatttttctgccttttaccaaaaataaactcttgggggaagaaaagtggattaacttttgaaatccttgaccttaatgtgttcagtggggcttaaacagtcattctttttgtggttttttgtttttttttgtttttttttttaactgctaaatcttattataaggaaaccatactgaaaacctttccaagcctcttttttccattcccatttttgtcctcataatcaaaacagcataacatgacatcatcaccagtaatagttgcattgatactgctggcaccagttaattctgggatacagtaagaattcatatggagaaagtccctttgtcttatgcccaaatttcaacaggaataattggcttgtataatctagcagtctgttgatttatccttccacctcataaaaaatgcataggtggcagtataattattttcagggatatgctagaattacttccacatatttatccctttttaaaaaagctaatctataaataccgtttttccaaaggtattttacaatatttcaacagcagaccttctgctcttcgagtagtttgatttggtttagtaaccagattgcattatgaaatgggccttttgtaaatgtaattgtttctgcaaaatacctagaaaagtgatgctgaggtaggatcagcagatatgggccatctgtttttaaagtatgttgtattcagtttataaattgattgttattctacacataattatgaattcagaattttaaaaattgggggaaaagccatttatttagcaagttttttagcttataagttacctgcagtctgagctgttcttaactgatcctggttttgtgattgacaatatttcatgctctgtagtgagaggagatttccgaaactctgttgctagttcattctgcagcaaataattattatgtctgatgttgactcattgcagtttaaacatttcttcttgtttgcatcttagtagaaatggaaaataaccactcctggtcgtcttttcataaattttcatatttttgaagctgtctttggtacttgttctttgaaatcatatccacctgtctctataggtatcattttcaatactttcaacatttggtggttttctattgggtactccccattttcctatatttgtgtgtatatgtatgtgttcatgtaaatttggtatagtaattttttattcattcaacaaatatttattgttcacctgtttgtaccaggaacttttcttagtctttgggtaaaggtgaacaagacaactacagttcctgcctttgctgagacagcagttacactaacccttaattatcttacttgtctatgaaggagataaacagggtactgtactggagaataacagatgggatgcttcaggtaggacatcaaggaaagcctctaaggaaaggatgcatgagctaacacctgacattaaagaagcaagccaagtgaggagccaggggagataagcattcctggcaaagagaatagcatcaaatgcaaaaaggttcacactaaaggaaactcctgattaggtattaatgctttatacagaaacctctatacaaatccaaacttgaagatcagaatggttctacagttcataacattttgaaggtggccttattttgtgatagtctgcttcatgtgattctcactaacatatctccttcctcaacctttgctgtaaaaatttcatttgcaccacatcagtactacttaatttaacaagcttttgttgtgtaagctctcactgttttagtgccctgctgcttgcttccagactttgtgctgtccagtaattatgtcttccactacccatcttgtgagcagagtaaatgtcctaggtaataccactatcaggcctgtaggagatactcagtggagcctctgcccttctttttcttacttgagaacttgtaatggtgttagggaacagttgtaggggcagaaaacaactctgaaagtggtagaaggtcctgatcttggtggttactcttgcattactgtgttaggtcaagcagtgcctactatgctgtttcagtagtggagcgcatctctacagttctgatgcgatttttctgtacagtatgaaattgggactcaactctttgaaaacacctattgagcagttatacctgttgagcagtttacttcctggttgtaattacatttgtgtgaatgtgtttgatgctttttaacgagatgatgttttttgtattttatctactgtggcctgattttttttttgttttctgcccctccccccatttataggtgtggttttcatttttctaagtgatagaatcccctctttgttgaatttttgtctttatttaaattagcaacattacttaggatttattcttcacaatactgttaattttctaggaatgatgacctgagaaccgaatggccatgctttctatcacatttctaagatgagtaatattttttccagtaggttccacagagacaccttgggggctggcttaggggaggctgttggagttctcactgacttagtggcatatttattctgtactgaagaactgcatggggtttcttttggaaagagtttcattgctttaaaaagaagctcagaaagtctttataaccactggtcaacgattagaaaaatataactggatttaggcctaccttctggaataccgctgattgtgctctttttatcctactttaaagaagctttcatgattagatttgagctatatcagttataccgattataccttataatacacattcagttagtaaacatttattgatgcctgttgtttgcccagccactgtgatggatattgaataataaaaagatgactaggacggggccctgacccttgagctgtgcttggtcttgtagaggttgtgttttttttcctcaggacctgtcactttggcagaaggaaatctgcctaatttttcttgaaagctaaattttctttgtaagtttttacaaattgtttaatacctagttgtattttttaccttaagccacattgagttttgcttgatttgtctgtcttttaaacactgtcaaatgctttcccttttgttaaaattattttaatttcactttttttgtgcccttgtcaatttaagactaagactttgaaggtaaaacaaacaaacaaacatcagtcttagtctcttgctagttgaaatcaaataaaagaaaatatatacccagttggtttctctacctcttaaaagcttcccatatatacctttaagatccttctcttttttctttaactactaaataggttcagcatttattcagtgttagataccctcttcgtctgagggtggcgtaggtttatgttgggatataaagtaacacaagacaatcttcactgtacataaaatatgtcttcatgtacagtctttactttaaaagctgaacattccaatttgcgccttccctcccaagcccctgcccaccaagtatctctttagatatctagtctgtggacatgaacaatgaatacttttttcttactctgatcgaaggcattgatacttagacatatcaaacatttcttcctttcatatgctttactttgctaaatctattatattcattgcctgaattttattcttcctttctacctgacaacacacatccaggtggtacttgctggttatcctctttcttgttagccttgttttttgttttttttttttttttttgagagggagtctcgctctgttgcccaacctggagtgcagtggtgcgatcttggttcactgcaagctccgcctcccgggttcacgccatgcttctgcctcagcctcccaagtagctgggactacaggcgcccaccaccacactcggctaattttttgtatttttagtagagacggggtttcaccgtgttggccaggatggtctcgatctcctgacctcgtgatctgtccacctcggcttcccaaagtgctgggattacaggcatgagccaccgcgcccagcctagccatatttttatctgcatatatcagaatgtttctctcctttgaacttattaacaaaaaaggaacatgcttttcatacctagagtcctaatttcttcatcatgaaggttgctattcaaattgatcaatcattttaattttacaaatggctcaaaaattctgttcagtaaatgtctttgtgactggcaaatggcataaattatgtttaagattatgaacttttctgacagttgcagccaatgttttccctacgataccagatttccatcttggggcatattggattgttgtatttaagacagtcagaataatgatagtgtgtggtctccagaggtagtcagaatcctgctattgagttctttttatatcttccttttcaattttttattaccattttgtttgtttagactacactttgtagggattgaggggcaaattatctcttggagtggaattcctgtgttttgagccttacaaccaggaaatatgagctatactagatagcctcatgatagcatttacgataagaacttatctcgtgtgttcatgtaattttttgagtaggaactgttttatcttgaatattgtagctaactatatatagcagaactgcctcagtctttttaagaaggaaataaataatatatgtgtatgaatttatatatacatatacactcatagacaaacttaacagttggggtcattctaacagttaaaacaattgttccattgtttaaatctcagatcctggtaaaatgttcttaatttgtctgtgtacattttcctttcatggacagaccattggagtacattaattttcttaatctgccatttggcagttcatttaatataccattttttggcaacttggtaactaagaatcacagccaaaatttgttaacatcaaagaaagctctgccatataccccgttactaaattattatacatccagcagattctgggatgtactaacttagggttaactttgttgttgttgataatactagattgctccctctttaattcttcttctggtgcaaggttgctgcttaagttaccctgggaaatactactacaaggtcaaattttctagtatcttacagcctgattgaaggtgattcagatctttgctcaatataaatggattttccaagattctctgggccatccttgacccacaggtgatctcgctggagtatattaacttaacttcagtgccagttggtttggtgccatgagatccataatgaatccagaacttcaccattgcttagatataagagtcccttggaagaataatgccactgatgatgggggtcagaaggtgtattaactcaacatagagggcttttagatttttcttcaaaaaaatttcgagaaaagtattcttttaccctccaaacagttaacagctcttagtttctccaaatatgctctttgatttacttatttttaattaaagatggtaatttattgaacaatgaaatccgtaatatattgatttaaggacaaaagtgaagttttagaattataaaagtacttaaatattatatattttccatttcataattgttttcctttctctgtggctttaaagtttttgactattttacaatgttaatcactaggtaacttgccatatttctggttctatattaagttctatcctttataatgctgttattataaagctggtttttagcatttgtctgtagcaatagaaattttactaagtctctgttctcccagtaagttttttcttttctcagtaagtccctaagaaaacatttgtttgccactcttactattcccaatcttggattgttcgagctgaaaaaaaatttgatgagaaacaggaggatccttttctggtgaatataggttcctgctttaagaatgtggaaatccattgctttatataactaatatacacacagattaattaaaattgtgagaaataattcacacatgacaagtaggtaacatgcatgagttttgaatttttttaaaaacccaactgtttgacaaaatatagaacccaaattggtactttcttagaccagtgtaacctcacacctcagttttgcttttccaaccctgacttgaaaggcatatttgtatctttttattagtgatagtgaagctgtgacactaaccttttatacaaaagagtaaagaaagaaaaactacagcgattaagatgagaacagttctgcagttgttgaactagatcacagcattgtaggcagaataaaaaatgttcatatctgagaatattcctttcgccatcttttcccaaggccagacctcctggtggagcacagttaaaagtaacattctgggcctttgtaatcggagggctgtgtctccagctggcagcctttgttttaatatataatgcaggactgtggaaaacagttggcatagaatattttcacctaaaaaagaaagaaaagacatacaaaactggattaattgcaaaaagagaatacagtaaaataccatataactggacaaagctagaagaacctttagaagatttgtctgaaaacagatttcaagagtgagcttttatacactgctcactaatttgcttgattactaccaactcttcttaaagttaacacgtttaaggtatttctggacttcctagccttttagcaagcttagaggaactagccattagctagtgatgtaaaaatattttggggactgatgcccttaaaggttatgcccttgaaagttcttaccttttctctagtgatattaaggaacgagtgggtagtgttctcagggtgaccagctgccctaaagtgcctgggattgagggtttccctggatgcgggactttccctggatacaaaacttttagcagagttttgtatatatgtggatttttctgataagtagcacatcagaggccttaaccactgcccaaaagcgattctccattgagagtacatatcttgaacttaagaaattcatttgctctgatttttaatcttgtaaagtttttgctaaactcaaaacaagtcccaggcacaccagaaggagctgaccaccttaggtgttcttgtgatttatccttacttccctatgttgtcatagttgcttctaaactcagctgcactatggctgtcaacatttctgatacttattgggatatgtgccatccagtcatttagtactttgaatggaacatgagatttataacacaggtaatagctgaaggtaccagtatggtggtgagactcacacttagtgatccagctaaggtaactgatgttataatggaacagagaagaggccaactagatagctaagttcttctgaacctatgtgtatatgtaagtacaaatcatgcgtccttatggggttaaacttaatctgaaatttacatttttcatagtaaaaggaaaccaattgttgcagatttcttttcttgtgaggaaatacatggcctttgatgctctggcgtctactgcatttcccagtctgttctgctcgagaagccagaatgtgttgttaacatttttccgtgaatgttgtgttaaaatgattaaatgcatcagccaatggcaagtgaaggaattgggtgtcctgatgcagactgagcagtttctctcaattgtagcctcatactcataaggtgcttaccagctagaacattgagcacgtgaggtgagattttttttctctgatggcattaactttgtaatgcaatatgatggatgcagaccctgttcttgtttccctctggaagtccttagtggctgcatccttggtgcactgtgatggagatattaaatgtgttctttgtgagctttcgttctatgattgtcaaaagtacgatgtggttccttttttatttttattaaacaatgagctgaggctttattacagctggttttcaagttaaaattgttgaatactgatgtctttctcccacctacaccaaatattttagtctatttaaagtacaaaaaaagttctgcttaagaaaacattgcttacatgtcctgtgatttctggtcaatttttatatatatttgtgtgcatcatctgtatgtgctttcactttttaccttgtttgctcttacctgtgttaacagccctgtcaccgttgaaaggtggacagttttcctagcattaaaagaaagccatttgagttgtttaccatgtta

SEQ ID NO: 574 - DNA, 6256 bp, Homo sapiens
gcggccgccgcctccgccccgcgttcggggccttcccgaccctgcactgctgccgtccgcccgcccggccgctcttctcttcgccgtgggagccgctccgggcgcagggccgcgcgccgagccccgcaggctgcagcgccgcggcccggcccggcgccccggcaacttcgccgagagttgaggcgaagtttgggcgaccgcggcaggccccggccgagctcccctctgcgcccccggcgtcccgtcgagcccagccccgccgggggcgctcctcgccgcccgcgcgccctccccagccatgtcgtccatcctgcctttcactcccccgatcgtgaagcgcctgctgggctggaagaagggcgagcagaacgggcaggaggagaaatggtgcgagaaggcggtcaagagcctggtcaagaaactcaagaagacggggcagctggacgagctggagaaggccatcaccacgcagaacgtcaacaccaagtgcatcaccatccccaggtccctggatggccggttgcaggtgtcccatcggaaggggctccctcatgtcatctactgccgcctgtggcgatggccagacctgcacagccaccacgagctacgggccatggagctgtgtgagttcgccttcaatatgaagaaggacgaggtctgcgtgaatccctaccactaccagagagtagagacaccagttctacctcctgtgttggtgccacgccacacagagatcccggccgagttccccccactggacgactacagccattccatccccgaaaacactaacttccccgcaggcatcgagccccagagcaatattccagagaccccaccccctggctacctgagtgaagatggagaaaccagtgaccaccagatgaaccacagcatggacgcaggttctccaaacctatccccgaatccgatgtccccagcacataataacttggacctgcagccagttacctactgcgagccggccttctggtgctccatctcctactacgagctgaaccagcgcgtcggggagacattccacgcctcgcagccatccatgactgtggatggcttcaccgacccctccaattcggagcgcttctgcctagggctgctctccaatgtcaacaggaatgcagcagtggagctgacacggagacacatcggaagaggcgtgcggctctactacatcggaggggaggtcttcgcagagtgcctcagtgacagcgctatttttgtccagtctcccaactgtaaccagcgctatggctggcacccggccaccgtctgcaagatcccaccaggatgcaacctgaagatcttcaacaaccaggagttcgctgccctcctggcccagtcggtcaaccagggctttgaggctgtctaccagttgacccgaatgtgcaccatccgcatgagcttcgtcaaaggctggggagcggagtacaggagacagactgtgaccagtaccccctgctggattgagctgcacctgaatgggcctttgcagtggcttgacaaggtcctcacccagatgggctccccaagcatccgctgttccagtgtgtcttagagacatcaagtatggtaggggagggcaggcttggggaaaatggccatgcaggaggtggagaaaattggaactctactcaacccattgttgtcaaggaagaagaaatctttctccctcaactgaaggggtgcacccacctgttttctgaaacacacgagcaaacccagaggtggatgttatgaacagctgtgtctgccaaacacatttaccctttggccccactttgaagggcaagaaatggcgtctgctctggtggcttaagtgagcagaacaggtagtattacaccaccggccccctccccccagactctttttttgagtgacagctttctgggatgtcacagtccaaccagaaacacccctctgtctaggactgcagtgtggagttcaccttggaagggcgttctaggtaggaagagcccgcagggccatgcagacctcatgcccagctctctgacgcttgtgacagtgcctcttccagtgaacattcccagcccagccccgccccgccccgccccaccactccagcagaccttgccccttgtgagctggatagacttgggatggggagggagggagttttgtctgtctccctcccctctcagaacatactgattgggaggtgcgtgttcagcagaacctgcacacaggacagcgggaaaaatcgatgagcgccacctctttaaaaactcacttacgtttgtcctttttcactttgaaaagttggaaggatctgctgaggcccagtgcatatgcaatgtatagtgtctattatcacattaatctcaaagagattcgaatgacggtaagtgttctcatgaagcaggaggcccttgtcgtgggatggcatttggtctcaggcagcaccacactgggtgcgtctccagtcatctgtaagagcttgctccagattctgatgcatacggctatattggtttatgtagtcagttgcattcattaaatcaactttatcatatgctcttttaaatgtttggtttatatattttctttaaaaatcctgggctggcacattgactgggaaacctgagtgagacccagcaactgcttctctcccttctctctcctgaggtgaagcttttccaggttttgttgaagagatacctgccagcacttctgcaagctgaaatttacagaagcaaattcaccagaagggaaacatctcaggccaacataggcaaatgaaaagggctattaaaatatttttacacctttgaaaattgcaggcttggtacaaagaggtctgtcatcttccccctgggatataagatgatctagctcccggtagaggatcaccggtgacaactatagcagttgtattgtgtaacaagtactgctcccagcagcaattagggagaaaactagtctaaattatttcaactggaaaaaagaaaaaagagtcctcttcttttcccagccttttgcagaacacagtagacagaactgccaccttcaattggtactttattctttgctgctgtttttgtataaaatgacctatcccacgtttttgcatgaatttatagcaggaaaaatcaagggatttcctatggaagtcctgctttattccaggtgaagggaaggaagtgtatatacttttggcaagtcatacagctcaaatgtgatgagatttctgatgttagagggagatggagaggcttcctgatgcctcatctgcagggtcctgtgcctctgaagttctagccatgaggtttccaggtaggacagctgctccccaagcctcctgaggacacaggaagagacggaaggagcaccttgacagacttgtgtgagtcttctcgaaggagggttgactcagaacccagagacaatacaaaacccctcacttcctctgagagggccaaatgctgtgagtctgaagtatgtgcctggtgtgaaatgatctatggcctgtttcttacacaggaagccccctgaacctcctgtacatgtgttcatgttcccagccagctctgagacccaggaaccaaatattccattttggcttctgctagagcagtcatggttcctctcctaaaagccatgggcagcagtttccgagggcctgcatgatccacctgctgcacgatcctatgagggcttcctgtggcacacagccctctgggtgcttgggaactagcttcaggcacagcctgattctggtgatccagtgatctatggaagtcgtgtcttactccaggtgaagggggaaaaaaaaagcctatactttggcaggttatgaactttgaatgtgatgaaatgacacgtttggctgcatttggatggtgtcttagaaccctcattgctcagacctgaaggctacttctaggagcatgaagtttgagttttgtgtttttccaaaggatacttccttggccctttttctttattgactagaccaccagaggaggatgtgtgggattgtaggcaaacccacctgtggcatcactgaaaataaatttgatcatacctaagaggttaggaaatggtgccattcccaccttagagtgctacataggtgctttgggcgtatgtaacattagtgtccttccttgaagccacaagctagttttcttagttttaaaatcctgttgtatgaatggcatttgtatattaaaacacttttttaaaggacagttgaaaagggcaagaggaaaccagggcagttctagaggagtgctggtgactggatagcagttttaagtggcgttcacctagtcaacacgaccgcgtgtgttgcccctgccctgggctccccgccatgacatcttcaccttgcagcttgtgctgagactgacccaagtgcagctagcactgggacacagatccttgtcttcagcaccttccaaggagccaacttttattccctttcctctctcccctccccacctcgcttcttcccaatttagtaacttagatgcttccagcacatacgtaggtagctaccccagccggtttggattacaggcctgtgctggaacatcatctcagttggccaccttcctggcaggctgtagacctgacattttgagacaagcctagagtcaggagcagggactttgactcttaggaagagcacacatgagggcaaggctgctggcagacgtctccattgtccttatgttgtctgtgttgtatttttttttttttattgaccatggtgattatttttttaaaccatcgttaatatactgaagtgagctatagcacatatcatgtgcttagtttgtttatttttctccatctccccttggcttcctagagtttggacatattccaggctaaatgcttttactcaagactacagaaaggtttgaagtagtgtgtgcatggcatgcacgtatgtaagtaatctggggaagaagcaaagatctgtttcattcttagcctcaggcctcatgagggtctccacagggccggagctcaggttacaccactccttcgtccttacaggagatgtagggagaagaatctgcaggctgcttgtaggactgttcaccaagggggataccagcagcaagagagtgcacccgtttagccctggaccctgtttcttactgtgtgacttggctagagttgggagttcccccaaaataaacgtgtccccattttaccagaaccaaacctcaacacagcgaagctgtactgtctttgtgtggcaaagatgttcccttgtaggcccctttcaggtaaccgtcttcacaatgtattttcatcacagtttaaggagcatcagccgcttctcaagtgggtagggaaagcagaaaaacgtacgcaagaggacatggatccaaaatgatgatgaagcatctcccatggggaggtgatggtggggagatgatgggctaaacaggcaacttttcaaaaacacagctatcatagaaaagaaacttgcctcatgtaaactggattgagaaattctcagtgattctgcaatggatttttttttaatgcagaagtaatgtatactctagtattctggtgtttttatatttatgtaataatttcttaaaaccattcagacagataactatttaattttttttaagaaagttggaaaggtctctcctcccaaggacagtggctggaagagttggggcacagccagttctgaatgttggtggagggtgtagtggctttttggctcagcatccagaaacaccaaaccaggctggctaaacaagtggccgcgtgtaaaaacagacagctctgagtcaaatctgggcccttccacaagggtcctctgaaccaagccccactcccttgctaggggtgaaagcattacagagagatggagccatctatccaagaagccttcactcaccttcactgctgctgttgcaactcggctgttctggactctgatgtgtgtggagggatggggaatagaacattgactgtgttgattaccttcactattcggccagcctgaccttttaataactttgtaaaaagcatgtatgtatttatagtgttttagatttttctaacttttatatcttaaaagcagagcacctgtttaagcattgtacccctattgttaaagatttgtgtcctctcattccctctcttcctcttgtaagtgcccttctaataaacttttcatggaaaagctcctgtgccaggagctcagtctgaaaaaaaaaaaaaaaaaaaaaaaaa

SEQ ID NO: 575 - DNA, 8789 bp, Homo sapiens
atgctcagtggcttctcgacaagttggcagcaacaacacggccctggtcgtcgtcgccgctgcggtaacggagcggtttgggtggcggagcctgcgttcgcgccttcccgctctcctcgggaggcccttcctgctctcccctaggctccgcggccgcccagggggtgggagcgggtgaggggagccaggcgcccagcgagagaggccccccgccgcagggcggcccgggagctcgaggcggtccggcccgcgcgggcagcggcgcggcgctgaggaggggcggcctggccgggacgcctcggggcgggggccgaggagctctccgggccgccggggaaagctacgggcccggtgcgtccgcggaccagcagcgcgggagagcggactcccctcgccaccgcccgagcccaggttatcctgaatacatgtctaacaattttccttgcaacgttagctgttgtttttcactgtttccaaaggatcaaaattgcttcagaaattggagacatatttgatttaaaaggaaaaacttgaacaaatggacaatatgtctattacgaatacaccaacaagtaatgatgcctgtctgagcattgtgcatagtttgatgtgccatagacaaggtggagagagtgaaacatttgcaaaaagagcaattgaaagtttggtaaagaagctgaaggagaaaaaagatgaattggattctttaataacagctataactacaaatggagctcatcctagtaaatgtgttaccatacagagaacattggatgggaggcttcaggtggctggtcggaaaggatttcctcatgtgatctatgcccgtctctggaggtggcctgatcttcacaaaaatgaactaaaacatgttaaatattgtcagtatgcgtttgacttaaaatgtgatagtgtctgtgtgaatccatatcactacgaacgagttgtatcacctggaattgatctctcaggattaacactgcagagtaatgctccatcaagtatgatggtgaaggatgaatatgtgcatgactttgagggacagccatcgttgtccactgaaggacattcaattcaaaccatccagcatccaccaagtaatcgtgcatcgacagagacatacagcaccccagctctgttagccccatctgagtctaatgctaccagcactgccaactttcccaacattcctgtggcttccacaagtcagcctgccagtatactggggggcagccatagtgaaggactgttgcagatagcatcagggcctcagccaggacagcagcagaatggatttactggtcagccagctacttaccatcataacagcactaccacctggactggaagtaggactgcaccatacacacctaatttgcctcaccaccaaaacggccatcttcagcaccacccgcctatgccgccccatcccggacattactggcctgttcacaatgagcttgcattccagcctcccatttccaatcatcctgctcctgagtattggtgttccattgcttactttgaaatggatgttcaggtaggagagacatttaaggttccttcaagctgccctattgttactgttgatggatacgtggacccttctggaggagatcgcttttgtttgggtcaactctccaatgtccacaggacagaagccattgagagagcaaggttgcacataggcaaaggtgtgcagttggaatgtaaaggtgaaggtgatgtttgggtcaggtgccttagtgaccacgcggtctttgtacagagttactacttagacagagaagctgggcgtgcacctggagatgctgttcataagatctacccaagtgcatatataaaggtctttgatttgcgtcagtgtcatcgacagatgcagcagcaggcggctactgcacaagctgcagcagctgcccaggcagcagccgtggcaggaaacatccctggcccaggatcagtaggtggaatagctccagctatcagtctgtcagctgctgctggaattggtgttgatgaccttcgtcgcttatgcatactcaggatgagttttgtgaaaggctggggaccggattacccaagacagagcatcaaagaaacaccttgctggattgaaattcacttacaccgggccctccagctcctagacgaagtacttcataccatgccgattgcagacccacaacctttagactgaggtcttttaccgttggggcccttaaccttatcaggatggtggactacaaaatacaatcctgtttataatctgaagatatatttcacttttgttctgctttatcttttcataaagggttgaaaatgtgtttgctgccttgctcctagcagacagaaactggattaaaacaattttttttttcctcttcagaacttgtcaggcatggctcagagcttgaagattaggagaaacacattcttattaattcttcacctgttatgtatgaaggaatcattccagtgctagaaaatttagccctttaaaacgtcttagagccttttatctgcagaacatcgatatgtatatcattctacagaataatccagtattgctgattttaaaggcagagaagttctcaaagttaattcacctatgttattttgtgtacaagttgttattgttgaacatacttcaaaaataatgtgccatgtgggtgagttaattttaccaagagtaactttactctgtgtttaaaaagtaagttaataatgtattgtaatctttcatccaaaatattttttgcaagttatattagtgaagatggtttcaattcagattgtcttgcaacttcagttttatttttgccaaggcaaaaaactcttaatctgtgtgtatattgagaatcccttaaaattaccagacaaaaaaatttaaaattacgtttgttattcctagtggatgactgttgatgaagtatacttttcccctgttaaacagtagttgtattcttctgtatttctaggcacaaggttggttgctaagaagcctataagaggaatttcttttccttcattcatagggaaaggttttgtattttttaaaacactaaaagcagcgtcactctacctaatgtctcactgttctgcaaaggtggcaatgcttaaactaaataatgaataaactgaatattttggaaactgctaaattctatgttaaatactgtgcagaataatggaaacattacagttcataataggtagtttggatatttttgtacttgatttgatgtgactttttttggtataatgtttaaatcatgtatgttatgatattgtttaaaattcagtttttgtatcttggggcaagactgcaaacttttttatatcttttggttattctaagccctttgccatcaatgatcatatcaattggcagtgactttgtatagagaatttaagtagaaaagttgcagatgtattgactgtaccacagacacaatatgtatgctttttacctagctggtagcataaataaaactgaatctcaacatacaaagttgaattctaggtttgatttttaagattttttttttcttttgcacttttgagtccaatctcagtgatgaggtaccttctactaaatgacaggcaacagccagttctattgggcagctttgtttttttccctcacactctaccgggacttccccatggacattgtgtatcatgtgtagagttggttttttttttttttaatttttattttactatagcagaaatagacctgattatctacaagatgataaatagattgtctacaggataaatagtatgaaataaaatcaaggattatctttcagatgtgtttacttttgcctggagaacttttagctatagaaacacttgtgtgatgatagtcctccttatatcacctggaatgaacacagcttctactgccttgctcagaaggtcttttaaatagaccatcctagaaaccactgagtttgcttatttctgtgatttaaacatagatcttgatccaagctacatgacttttgtctttaaataacttatctaccacctcatttgtactcttgattacttacaaattctttcagtaaacacctaattttcttctgtaaaagtttggtgatttaagttttattggcagttttataaaaagacatcttctctagaaattgctaactttaggtccattttactgtgaatgaggaataggagtgagttttagaataacagatttttaaaaatccagatgatttgattaaaaccttaatcatacattgacataattcattgcttcttttttttgagatatggagtcttgctgtgttgcccaggcaggagtgcagtggtatgatctcagctcactgcaacctctgcctcccgggttcaactgattctcctgcctcagcctccctggtagctaggattacaggtgcccgccaccatgcctggctaacttttgtagttttagtagagacggggttttgcctgttggccaggctggtcttgaactcctgacctcaagtgatccatccaccttggcctcccaaagtgctgggattacgggcgtgagccactgtccctggcctcattgttcccttttctactttaaggaaagttttcatgtttaatcatctggggaaagtatgtgaaaaatatttgttaagaagtatctctttggagccaagccacctgtcttggtttctttctactaagagccataaagtatagaaatacttctagttgttaagtgcttatatttgtacctagatttagtcacacgcttttgagaaaacatctagtatgttatgatcagctattcctgagagcttggttgttaatctatatttctatttcttagtggtagtcatctttgatgaataagactaaagattctcacaggtttaaaattttatgtctactttaagggtaaaattatgaggttatggttctgggtgggttttctctagctaattcatatctcaaagagtctcaaaatgttgaatttcagtgcaagctgaatgagagatgagccatgtacacccaccgtaagacctcattccatgtttgtccagtgcctttcagtgcattatcaaagggaatccttcatggtgttgcctttattttccggggagtagatcgtgggatatagtctatctcatttttaatagtttaccgcccctggtatacaaagataatgacaataaatcactgccatataaccttgctttttccagaaacatggctgttttgtattgctgtaaccactaaataggttgcctataccattcctcctgtgaacagtgcagatttacaggttgcatggtctggcttaaggagagccatacttgagacatgtgagtaaactgaactcatattagctgtgctgcatttcagacttaaaatccatttttgtggggcagggtgtggtgtgtaaaggggggtgtttgtaatacaagttgaaggcaaaataaaatgtcctgtctcccagatgatatacatcttattatttttaaagtttattgctaattgtaggaaggtgagttgcaggtatctttgactatggtcatctggggaaggaaaattttacattttactattaatgctccttaagtgtctatggaggttaaagaataaaatggtaaatgtttctgtgcctggtttgatggtaactggttaatagttactcaccattttatgcagagtcacattagttcacaccctttctgagagccttttgggagaagcagttttattctctgagtggaacagagttctttttgttgataatttctagtttgctcccttcgttattgccaactttactggcattttatttaatgatagcagattgggaaaatggcaaatttaggttacggaggtaaatgagtatatgaaagcaattacctctaaagccagttaacaattattttgtaggtggggtacactcagcttaaagtaatgcatttttttttcccgtaaaggcagaatccatcttgttgcagatagctatctaaataatctcatatcctcttttgcaaagactacagagaataggctatgacaatcttgttcaagcctttccatttttttccctgataactaagtaatttctttgaacataccaagaagtatgtaaaaagtccatggccttattcatccacaaagtggcatcctaggcccagccttatccctagcagttgtcccagtgctgctaggttgcttatcttgtttatctggaatcactgtggagtgaaattttccacatcatccagaattgccttatttaagaagtaaaacgttttaatttttagcctttttttggtggagttatttaatatgtatatcagaggatatactagatggtaacatttctttctgtgcttggctatctttgtggacttcaggggcttctaaaacagacaggactgtgttgcctttactaaatggtctgagacagctatggttttgaatttttagttttttttttttaacccacttcccctcctggtctcttccctctctgataattaccattcatatgtgagtgttagtgtgcctccttttagcattttcttcttctctttctgattcttcatttctgactgcctaggcaaggaaaccagataaccaaacttactagaacgttctttaaaacacaagtacaaactctgggacaggacccaagacactttcctgtgaagtgctgaaaaagacctcattgtattggcatttgatatcagtttgatgtagcttagagtgcttcctgattcttgctgagtttcaggtagttgagatagagagaagtgagtcatattcatattttcccccttagaataatattttgaaaggtttcattgcttccacttgaatgctgctcttacaaaaactggggttacaagggttactaaattagcatcagtagccagaggcaataccgttgtctggaggacaccagcaaacaacacacaacaaagcaaaacaaaccttgggaaactaaggccatttgttttgttttggtgtcccctttgaagccctgccttctggccttactcctgtacagatatttttgacctataggtgcctttatgagaattgagggtctgacatcctgccccaaggagtagctaaagtaattgctagtgttttcagggattttaacatcagactggaatgaatgaatgaaactttttgtcctttttttttctgtttttttttttctaatgtagtaaggactaaggaaaacctttggtgaagacaatcatttctctctgttgatgtggatacttttcacaccgtttatttaaatgctttctcaataggtccagagccagtgttcttgttcaacctgaaagtaatggctctgggttgggccagacagttgcactctctagtttgccctctgccacaaatttgatgtgtgacctttgggcaagtcatttatcttctctgggccttagttgcctcatctgtaaaatgagggagttggagtagattaattattccagctctgaaattctaagtgaccttggctaccttgcagcagttttggatttcttccttatctttgttctgctgtttgagggggctttttacttatttccatgttattcaaaggagactaggcttgatattttattactgttcttttatggacaaaaggttacatagtatgcccttaagacttaattttaaccaaaggcctagcaccaccttaggggctgcaataaacacttaacgcgcgtgcgcacgcgcgcgcgcacacacacacacacacacacacacacacacaggtcagagtttaaggctttcgagtcatgacattctagcttttgaattgcgtgcacacacacacgcacgcacacactctggtcagagtttattaaggctttcgagtcatgacattatagcttttgagttggtgtgtgtgacaccaccctcctaagtggtgtgtgcttgtaattttttttttcagtgaaaatggattgaaaacctgttgttaatgcttagtgatattatgctcaaaacaaggaaattcccttgaaccgtgtcaattaaactggtttatatgactcaagaaaacaataccagtagatgattattaactttattcttggctctttttaggtccattttgattaagtgacttttggctggatcattcagagctctcttctagcctacccttggatgagtacaattaatgaaattcatattttcaaggacctgggagccttccttggggctgggttgagggtggggggttggggagtcctggtagaggccagctttgtggtagctggagaggaagggatgaaaccagctgctgttgcaaaggctgcttgtcattgatagaaggactcacgggcttggattgattaagactaaacatggagttggcaaactttcttcaagtattgagttctgttcaatgcattggacatgtgatttaagggaaaagtgtgaatgcttatagatgatgaaaacctggtgggctgcagagcccagtttagaagaagtgagttgggggttggggacagatttggtggtggtatttcccaactgtttcctcccctaaattcagaggaatgcagctatgccagaagccagagaagagccactcgtagcttctgctttggggacaactggtcagttgaaagtcccaggagttcctttgtggctttctgtatacttttgcctggttaaagtctgtggctaaaaaatagtcgaacctttcttgagaactctgtaacaaagtatgtttttgattaaaagagaaagccaactaaaaaaaaaaaaaaaaaaaa

SEQ ID NO: 576 - DNA, 7012 bp, Homo sapiens
ccgggtcctgggcgagcgggcgccgtgcgcgtgtcccgcggccgagctgctaataaagttgcagcgaggagaagcgcagcgacggcgtcgggagagcgcgcctagccggctcgcgaaaaggaagctgttgaagttattgaagtacctgttgctatattctaagaaattaaaatgtccagaaatctgcctctgacttgacccaatgaaagaagcatatggcacttgtgaagataaatgttactcctccctttttaattggaacttctgcttaggacctgtgtatgacgtttcacctgtgatctgttctttcggtagccactgactttgagttacaggaaggtctccgaagatttgtgtcaaatgacgtcaatggccagcttgttttcttttactagtccagcagtaaagcgattgttgggctggaaacaaggtgatgaggaggagaaatgggcagaaaaggcagttgatgctttggtgaagaaactaaaaaagaaaaagggtgccatggaggaactggagaaagccttgagcagtccaggacagccgagtaaatgtgtcactattcccagatctttagatggacgcctgcaggtttctcacagaaaaggcttaccccatgttatatattgtcgtgtttggcgctggccggatttgcagagtcatcatgagctaaagccgttggatatttgtgaatttccttttggatctaagcaaaaagaagtttgtatcaacccataccactataagagagtggagagtccagtcttacctccagtattagtgcctcgtcataatgaattcaatccacaacacagccttctggttcagtttaggaacctgagccacaatgaaccacacatgccacaaaatgccacgtttccagattctttccaccagcccaacaacactccttttcccttatctccaaacagcccttatcccccttctcctgctagcagcacatatcccaactccccagcaagttctggaccaggaagtccatttcagctcccagctgatacgcctcctcctgcctatatgccacctgatgatcagatgggtcaagataattcccagcctatggatacaagcaataatatgattcctcagattatgcccagtatatccagcagggatgttcagcctgttgcctatgaagagcctaaacattggtgttcaatagtctactatgaattaaacaatcgtgttggagaagcttttcatgcatcttctactagtgtgttagtagatggattcacagatccttcaaataacaaaagtagattctgcttgggtttgttgtcaaatgttaatcgtaattcgacaattgaaaacactaggcgacatattggaaaaggtgttcatctgtactatgttggtggagaggtgtatgcggaatgcctcagtgacagcagcatatttgtacagagtaggaactgcaactttcatcatggctttcatcccaccactgtctgtaagattcccagcagctgcagcctcaaaatttttaacaatcaggagtttgctcagcttctggctcaatctgtcaaccatgggtttgaggcagtatatgagctcaccaaaatgtgtaccattcggatgagttttgtcaagggttggggagcagaatatcaccggcaggatgtaaccagcaccccatgttggattgagattcatcttcatgggcctcttcagtggctggataaagtccttactcagatgggctcccctctgaaccccatatcttctgtttcataatgcagaagtattcttttcaattatattgttagtggacttgttttaattttagagaaactttgagtacagatactgtgagcttacattgaaaacagatattacagcttatttttttctacataattgtgaccaatacatttgtattttgtgatgaatctacatttgtttgtattcatgttcatgtgattaactcttagaagtgttgtaaaagatgcagagtaagtattatgccccagttcagaaatttggcattgatcttaaactggaacatgcttttactttattgccctaacaattttttattaaatttatttgaaaatgcatcacatgatgaaaaattatagtagcttataagagggcatatacagtgaagagtaagttttccctcctactctcgatcttccagaagctgtacttttaccagtttctttgtcccaccaacttaaaaaaaaaaagtacaattcattgttttgcaaaagtgtatggtaggggcttaaaagaaactataaagttttatttgaatgaacactatgcactgctgtaactggtagtgttcagtaaaagcaaaatgatagttttctagatgacataaaatttacatttaatacagataagtgttcttcagtgtaatgtgacttcatgctatatatcttttgtaagacatttccttttttaaaaaaatttttgcaaataactgatctcaagtatatgtcatttactcaaaatctgtcataagcattactttatagctagtgacagtgcatgcacagccttgttcaactatgtttgctgcttttggacaatgttgcaagaactctatttttgacatgcattaatcttttattttgcacttttatgggtgacagtttttagcataacctttgataaaatacactcaagtgacttggacttagatgcttatccttacgtccttggtaccttttttgtattaacaaacactgcaatttatagattacatttgtaggaagttatgcttttttctggtttttgttttactttcaacctaggttataagactgttattctatagctccaacttaaggtgcctttttaattccctacagttttatgggtgttatcagtgctggagaatcatgtagttaatcccattgctcttacaagtgtcagcttacttgtatcagcctccctacgcaaggacctatgcactggagccgtaggaggctcttcagttgggccccaaggataaggctactgatttgatactaaatgaatcagcagtggatgtagggatagctgattttaaaacactcggctgggcacagtggctcacacctgtaatcccagcactttgggaggctgaggcaggcagatcatgatgtcaggagtttgagaccagcctggccaatatggtgaaaccctgtctctacaaaaaatacaaaaattagctgggcatggtggtgcgtgcctgaagtcccagctactcgggaagctgaggcagaagaatcacttgaacctgggaggcggaggttgtggtgagccgagatcgcaccactgcactccagcctgggcgacagagcgagactctgcctcaaaaaacaaaacaaaacaaaacactcacccatcaacgaatatagactcttctctcatttatcgatgatcctctttttccattttttaagtacttatgtggaagctagtctcccaaaacacaatctttagagagaaaagacatgaacgaactccaaaatatccatttaatcaatcatgtttttggctttggataaagaactttgaaccagtttttttctcaggagctgtcaaatggacacttaattatgacatgagaatgaagaaattattttggaaaaaaaaaatgacctaatttacctatcagtgaaagctttattttctggtgccttttgaaagtatatggagtcatatcattcttctgtttaaaatgttagtttggtttgactttccactttgtcctttctgctcttgtgaagaaaaaaaaaagcattttcgaggaaagaattatgcaatttcttttgttttctgtgtcattatttattgctttttcaatgtgcagccagtggatggttttagttctttcagatgaactgccatttgtgtttcagctcacagttctttgctgggtaaaagaaatactttctgacagtcacctgagccttaaatgtaagtattacatgacatgcattctgtttcttccagagttctgtctgccacacgaaagagaatatttgcttacttgatagaactttggcattttcatcattcttttacttaaccaggcttatggcatgatctctggaacaaatttgtaggaaaaaattactccaattgaatgactgatgtatgtaatcaacttcattgggctgcagtaaactagtggaaattagagagttgttttattggtgttttctactgtgagttaattaaaaattgtttttatttggggtcattatgtcacagtcttgagttaacaagatcttacgtgattggccttttctttgttttctcttaggagttgtgtctcatgaatgacagtactaaagctattaacaactaagagtttgacagagaactataagcctgttgtatctcctaaaagttgtcaactccccacccttggactttaaatgaaaattttattcagtccagctattcttacagtccctaaggattttcatatatctatgtataggagataaaatttgctagtaagatttttaaaaactggctagtgaaaggaaagtacctctgaaagaaaccattttagcaaattatggttatatgttttaatttaatctacagaatgttttatagtaaaattctagcaccactagaataatcacatagcatgtacaatatatttatgctggctgaaaagacagaatctgggaataataaaattgcaaccagtttggtaatgcaaacagcagaatagaatgaaatctcagtaatgaattaaagcaacaaaaagatattgattggcaaaaagcaagatataagagattcatttgcttaacatttctacataatatttatggtctggtcagtattggtctggtcagtattgcctggctgacgtgaaatgtaaactagtaggcgtgttattgatctgctaaaactaaccctctttttaagaggagatttaaggaagacgtcaatcaaaatgtcaaatatgtgtgtcagaatataaataatttttcacattgtattgttgctatataaaaaaaataatagaattggttgggtttctgaggtgaaatccagagtaagagtactagacagttcaacaagccacatctaatggcacagatagaggatgtagctattttatacctttcataacatttgagagtaagatatccttcaggatgtgaagtgattattaagtactcatacctgaaatctgttgtcaagattagaactggggttcatgttaaaaaccttccatattacctgagggtacctgtggggaacagttccttcccctgtgtggtagtattttgttggaagagaatgtttatacaaaaaatgaaattcttccaacagcagagaaactctaaaaagtttgatagtacctatcaaagtgctgtacttctgtgatagagaacatctgatgtaccaatttagatctatttctttatactttttctaatcaattgcttaatagtactttggatgattatcacctttgccacttaaaatatataaatatcctttttacttcatgaggaaggaagaattttttgataattactgagttcagccttttgtgatgacttatattttggacttacattttaactttaaagaatgtcagatcccttctttgtcttactagttaaatcctcacctaatctcttgggtatgaatataaatgtgtgtcatcgttatattgttcagctagatgagcaagtatcttagggtagtaggtagcctggtggttttagaagtgtttggtgatttttatggagagagttttcctaagtggtggtttataggtggtatcagatattattagggcagctttttggggagtaatctcaggtctcccagagcagcagcatttttctcattgatataagtaagattcttaggagcttttcttatcacacaagatgcctgaatcgaatgtgagaattgaaggcatttcttctgcataaacaaagaattctacctgctggacagaaacctggaaagttctttggaattcgctgaattacagtttagtatgtcctgattacagagtgacaatatttatcaagcctttgttatattggattatcttctctcttaaaatacaactgtattataattgaaatgacagcccaaaattggatggtttaccaaaaccaatgaaagggatttcacacatcaatttttatttctgttttgaagagcacatgctatataataattgctagtagcaactgcagtaaaacaggtgataagttattttctctgaaaagatccagtcctagagcaggattcttcgatcattcatggcagagtgaaaaaggtttgtatggttcttgtccaaataactcagttcttaaaattcttaaaatgatcgtaaaccattatcctttaaaggtttatttgaagatgctgttaaagtacagaattttgtgtacaggtagatttttccgtccctcattaatagtgccttcttaattaatacagactggtgttagctataacaaaactccagtaaggccaaagaatcccaagttctttgtggaaaaaaaaaaaaaatcttttagggtcagattttcccttctaatatcattgaagatgatgttgcattgatttattcataaagtattttaactataggaactctagaagataatggttaggcaagtgattttttttttaaatatggttggcgtaagttgtattttgaaattcacttattttaaaatcgaagaggattgtaatcatggaaatagaatgtttgtatctacctgcccacattttcttaaaaagatatttcatatacagataatgaagaccaagctagtggctgcactgtaggtctgctgcttatttgtatttgttgtgcttctgtttatgttgtagaagctgaaattctagcaacatgcttcaattctgttattttgatacttatgaaaatgtattaggttttactatattgtgcttttgaaagccataactcttaagaactttgtttttgcatattgtttgctaattctttactttaataaacctcaaaacctgc

SEQ ID NO: 577 - DNA, 2886 bp, Homo sapiens
cgatcgagggagctgagccgagagaaagagccgccgggcgctgcctcgccagacctcgctgggaccccggggccaccgggaggcacttttgtggaggggggagggggggcgacctcggcagcctcggcgcacgaagcgtccgagggcagcgtggggcgggctgcgacctctgcatcggtggactgcatttttaattaaggattcccagcagctctttgggatttttacagcttccactcatgtgttgacacccgcgtccaggagaaactcgctccaagtgcatctagcgcctgggacctgagacggcgttggcctttcgtgcatgcaaatccagggatttaggttttgtttgggatttccttttctttctttccttttttttttctttttgcagggagtaagaagggagctgggggtatcaacaagcctgcctttcggatcctgcgggaaaagcccatgtagttaagcgctttggtttaaaaaaaaggcaaggtaaaggcagggctttccagacacatttaggggttcgcgcgagcgctttgtgctcatggaccagccgcacaacttttgaaggctcgccggcccatgtggggtctttctggcggcgcgccgcctgcagcccccctaaagcgcgggggctggagttgttgagcagccccgccgctgtggtccatgtagccgctggccgcgcgcggactgcggctcggcgtgcgcgtgttcccggccgtcccgcctcggcgagctccctcatgttgtcgccctgcggcgccccttcgacgacaggctgtgcgcggtctgcacggcgctccgcggcggagcttcatgtggggctgcgacccgcgcagccggcgcctcgctgagggaacggacccccggtaaccggagaccgcctcccccccacccctggcgccaaaggatatcgtatgttcaggtccaaacgctcggggctggtgcggcgactttggcgaagtcgtgtggtccccgaccgggaggaaggcggcagcggcggcggcggtggcggcgacgaggatgggagcttgggcagccgagctgagccggccccgcgggcaagagagggcggaggctgcggccgctccgaagtccgcccggtagccccgcggcggccccgggacgcagtgggacagcgaggcgcccagggcgcggggaggcgccggcgcgcagggggccccccgaggcccatgtcggagccaggggccggcgctgggagctccctgctggacgtggcggagccgggaggcccgggctggctgcccgagagtgactgcgagacggtgacctgctgtctcttttcggagcgggacgccgccggcgcgccccgggacgccagcgaccccctggccggggcggccctggagccggcgggcggcgggcggagtcgcgaagcgcgctcgcggctgctgctgctggagcaggaactcaaaaccgtcacgtactcgctgctgaagcggctcaaggagcgctcgctggacacgctgctggaggcggtggagtcccgcggcggcgtgccgggcggctgcgtgctggtgccgcgcgccgacctccgcctgggcggccagcccgcgccgccgcagctgctgctcggccgcctctttcgctggcccgacctgcagcacgccgtggagctgaagcccctgtgcggctgccacagcttcgccgccgccgccgacggccctaccgtgtgctgcaacccctaccacttcagccggctctgcgggcccgaatctccgccacctccctactctcggctgtctcctcgcgacgagtacaagccactggatctgtccgattccacattgtcttacactgaaacggaggctaccaactccctcatcactgctccgggtgaattctcagacgccagcatgtctccggacgccaccaagccgagccactggtgcagcgtggcgtactgggagcaccggacgcgcgtgggccgcctctatgcggtgtacgaccaggccgtcagcatcttctacgacctacctcagggcagcggcttctgcctgggccagctcaacctggagcagcgcagcgagtcggtgcggcgaacgcgcagcaagatcggcttcggcatcctgctcagcaaggagcccgacggcgtgtgggcctacaaccgcggcgagcaccccatcttcgtcaactccccgacgctggacgcgcccggcggccgcgccctggtcgtgcgcaaggtgccccccggctactccatcaaggtgttcgacttcgagcgctcgggcctgcagcacgcgcccgagcccgacgccgccgacggcccctacgaccccaacagcgtccgcatcagcttcgccaagggctgggggccctgctactcccggcagttcatcacctcctgcccctgctggctggagatcctcctcaacaaccccagatagtggcggccccggcgggaggggcgggtgggaggccgcggccaccgccacctgccggcctcgagaggggccgatgcccagagacacagcccccacggacaaaaccccccagatatcatctacctagatttaatataaagttttatatattatatggaaatatatattatacttgtaattatggagtcatttttacaatgtaattatttatgtatggtgcaatgtgtgtatatggacaaaacaagaaagacgcactttggcttataattctttcaatacagatatattttctttctcttcctccttcctcttccttactttttatatatatatataaagaaaatgatacagcagagctaggtggaaaagcctgggtttggtgtatggtttttgagatattaatgcccagacaaaaagctaataccagtcactcgataataaagtattcgcattatagttttttttaaaaaaaaaa

SEQ ID NO: 578 - DNA, 3103 bp, Homo sapiens
cggagagccgcgcagggcgcgggccgcgcggggtggggcagccggagcgcaggcccccgatccccggcgggcgcccccgggcccccgcgcgcgccccggcctccgggagactggcgcatgccacggagcgcccctcgggccgccgccgctcctgcccgggcccctgctgctgctgctgtcgcctgcgcctgctgccccaactcggcgcccgacttcttcatggtgtgcggaggtcatgttcgctccttagcaggcaaacgacttttctcctcgcctcctcgccccgcatgttcaggaccaaacgatctgcgctcgtccggcgtctctggaggagccgtgcgcccggcggcgaggacgaggaggagggcgcagggggaggtggaggaggaggcgagctgcggggagaaggggcgacggacagccgagcgcatggggccggtggcggcggcccgggcagggctggatgctgcctgggcaaggcggtgcgaggtgccaaaggtcaccaccatccccacccgccagccgcgggcgccggcgcggccgggggcgccgaggcggatctgaaggcgctcacgcactcggtgctcaagaaactgaaggagcggcagctggagctgctgctccaggccgtggagtcccgcggcgggacgcgcaccgcgtgcctcctgctgcccggccgcctggactgcaggctgggcccgggggcgcccgccggcgcgcagcctgcgcagccgccctcgtcctactcgctccccctcctgctgtgcaaagtgttcaggtggccggatctcaggcattcctcggaagtcaagaggctgtgttgctgtgaatcttacgggaagatcaaccccgagctggtgtgctgcaacccccatcaccttagccgactctgcgaactagagtctcccccccctccttactccagatacccgatggattttctcaaaccaactgcagactgtccagatgctgtgccttcctccgctgaaacagggggaacgaattatctggcccctggggggctttcagattcccaacttcttctggagcctggggatcggtcacactggtgcgtggtggcatactgggaggagaagacgagagtggggaggctctactgtgtccaggagccctctctggatatcttctatgatctacctcaggggaatggcttttgcctcggacagctcaattcggacaacaagagtcagctggtgcagaaggtgcggagcaaaatcggctgcggcatccagctgacgcgggaggtggatggtgtgtgggtgtacaaccgcagcagttaccccatcttcatcaagtccgccacactggacaacccggactccaggacgctgttggtacacaaggtgttccccggtttctccatcaaggctttcgactacgagaaggcgtacagcctgcagcggcccaatgaccacgagtttatgcagcagccgtggacgggctttaccgtgcagatcagctttgtgaagggctggggtcagtgctacacccgccagttcatcagcagctgcccgtgctggctagaggtcatcttcaacagccggtagccgcgtgcggaggggacagagcgtgagctgagcaggccacacttcaaactactttgctgctaatattttcctcctgagtgcttgcttttcatgcaaactctttggtcgttttttttttgtttgttggttggttttcttcttctcgtcctcgtttgtgttctgttttgtttcgctctttgagaaatagcttatgaaaagaattgttgggggtttttttggaagaaggggcaggtatgatcggcaggacaccctgataggaagaggggaagcagaaatccaagcaccaccaaacacagtgtatgaaggggggcggtcatcatttcacttgtcaggagtgtgtgtgagtgtgagtgtgcggctgtgtgtgcacgcgtgtgcaggagcggcagatggggagacaacgtgctctttgttttgtgtctcttatggatgtccccagcagagaggtttgcagtcccaagcggtgtctctcctgccccttggacacgctcagtggggcagaggcagtacctgggcaagctggcggctggggtcccagcagctgccaggagcacggctctgtccccagcctgggaaagcccctgcccctcctctccctcatcaaggacacgggcctgtccacaggcttctgagcagcgagcctgctagtggccgaaccagaaccaattattttcatccttgtcttattcccttcctgccagcccctgccattgtagcgtctttcttttttggccatctgctcctggatctccctgagatgggcttcccaagggctgccggggcagccccctcacagtattgctcacccagtgccctctcccctcagcctctcccctgcctgccctggtgacatcaggtttttcccggacttagaaaaccagctcagcactgcctgctcccatcctgtgtgttaagctctgctattaggccagcaagcggggatgtccctgggagggacatgcttagcagtccccttccctccaagaaggatttggtccgtcataacccaaggtaccatcctaggctgacacctaactcttctttcatttcttctacaactcatacactcgtatgatacttcgacactgttcttagctcaatgagcatgtttagactttaacataagctatttttctaactacaaaggtttaaatgaacaagagaagcattctcattggaaatttagcattgtagtgctttgagagagaaaggactcctgaaaaaaaacctgagatttattaaagaaaaaaatgtattttatgttatatataaatatattattacttgtaaatataaagacgttttataagcatcattatttatgtattgtgcaatgtgtataaacaagaaaaataaagaaaagatgcactttgctttaatataaatgcaaataacaaatgccaaattaaaaaagataaacacaagattggtgttttttcctatgggtgttatcacctagctgaatgtttttctaaaggagtttatgttccattaaacgatttttaaaatgtacacttgaaaaaaaaaaaaaaaaa

SEQ ID NO: 579 - DNA, 5481 bp, Homo sapiens
cgcactaatacgggcgatgaggcttcgcggctccagtctgactgacgccggctggggccgccgccgccgccgccgccgccgccgctgctgcagccgctgtctcggtccccgccgccgccgccgggccctgcaggcgctgggcgcgcgcagccaggcaagttggccaccctgttcaagggcttaggagaaagtcaacacacttcgcaacttgaattggtcccagctgctcccagaagaacgggcgggttggtccctatgccacccctggagagctactcgccgcccactttgccgtgaagggctgtgcggttcccgtgcgcgccggagcctgctgtggcctcttatgcactccaccacccccatcagctccctcttctccttcaccagccccgcagtgaagagactgctaggctggaagcaaggagatgaagaggaaaagtgggcagagaaggcagtggactctctagtgaagaagttaaagaagaagaagggagccatggacgagctggagagggctctcagctgcccggggcagcccagcaaatgcgtcacgattccccgctccctggacgggcggctgcaggtgtcccaccgcaagggcctgccccatgtgatttactgtcgcgtgtggcgctggccggatctgcagtcccaccacgagctgaagccgctggagtgctgtgagttcccatttggctccaagcagaaagaagtgtgcattaacccttaccactaccgccgggtggagactccagtactgcctcctgtgctcgtgccaagacacagtgaatataacccccagctcagcctcctggccaagttccgcagcgcctccctgcacagtgagccactcatgccacacaacgccacctatcctgactctttccagcagcctccgtgctctgcactccctccctcacccagccacgcgttctcccagtccccgtgcacggccagctaccctcactccccaggaagtccttctgagccagagagtccctatcaacactcagactttcgaccagtttgttacgaggagccccagcactggtgctcggtcgcctactatgaactgaacaaccgagttggggagacattccaggcttcctcccgaagtgtgctcatagatgggttcaccgacccttcaaataacaggaacagattctgtcttggacttctttctaatgtaaacagaaactcaacgatagaaaataccaggagacatataggaaagggtgtgcacttgtactacgtcgggggagaggtgtatgccgagtgcgtgagtgacagcagcatctttgtgcagagccggaactgcaactatcaacacggcttccacccagctaccgtctgcaagatccccagcggctgcagcctcaaggtcttcaacaaccagctcttcgctcagctcctggcccagtcagttcaccacggctttgaagtcgtgtatgaactgaccaagatgtgtactatccggatgagttttgttaagggttggggtgctgagtatcatcgccaggatgtcaccagcaccccctgctggattgagattcatcttcatgggccactgcagtggctggacaaagttctgactcagatgggctctccacataaccccatttcttcagtgtcttaacagtcatgtcttaagctgcatttccataggatagaggctattgcagggagtggcttgtatcatttcagatttgcaactgaagtttctaaaaacatgtgtaaatacatagaatgtatactgttcttattttttttaatcaccgtttgttttgtgctttctagttaacctgatgccagtacagtgcaattggaaaagcaggactttggtgcctgtgctataagcagcagattttgtgggaggaaacacttgagaggcgatattgtcaacagtatttgaagggtgttagcagaataaaagacagctttagtcagccgtgtcattataaagcatgttgtgtggcctcacagaaacattgaaactgtttatacagcaaaagtcaggtattagcagcactaaagcaaatatcactcagatgaaacaaagcagtgaaacccctacagtttaaatgatgtcacttttagtgctgttggcaagaaaaaaaaaacaacaaacttgtacaatgaattaatgagataggccatagaaactttatttctaaggttgacatacctatagctgggctcctgtgctcatattcagtggtacattttaaacaaactgtgatcggaaaagaaaaaaaactgtgaagccaaaagtcatgttccctcagtctaccactgtaaaaacagagtctaatatgggaaaataaatatgaaaatagcatgaaatgctgtttcccagattgcaagataagaccagaacttggtccaagagccagccacccagggagactcctgctttccacagaggagaccaggttcctgtcgtgctggttgttcgtgtcaggcagtcctgcaaactttgagtctgcgcagcgtgccagaatagcttgtgtttcagtcctgtgtcaagaagcaggtgaaaccaaaggttggagaaaagcatcacacgtcgacttacactttctcatttcccacgttccagtctcctgggaagggcactctttcgccacgttttcctgcctcttggcaaatattaactctttgcagatcactaaagcaacagtaaagactttgagaaaatctagacacattattggatcaatgagttatttaacctagtgtctagtgattatctaacctggaaataaattcccaaggaaagtgataataatttcataatcatctgcaatttctggggaacagtggtactgaataataagacatcttttaaaaatatacacaatattaaaaacctgttcttattttactttagatgagggaggaaaatcccccaaatttctaggtactttcatatatatacttgccatgcactaaacactgcattgcttggaaaaatatttcacaccctctttaaaaatgtacaatttaagatggcagttatgcttgtaacagacagcacttcagtaatccaagaagtttcttcatttatacattttatctcaactctttctagcattagtgcacatggtagtttttctaattaaattgtattcaaggtagaaatgatcatgtgagaaagatatatgattgagctactactgtcacctcttacagttactagtgttagctaatagaaactttcatatatacacatagaaaagaattattacattttacattgaaaaatgtaatatatggcccatgtagtgtatagaaaaatctgtagtttattggttcatcaactatgtattgtgcacctacctatgggtgtcaggtacaatgttaggtactgtagaatcaaatgtaaataagagacagtcccagccctcagggagccgagaacctaatagtgaatctgtttgtacagacatcttcatgtttcagaacttttaaaacaaaacaaaataatgtaatctatcatcttttgcttgaaagaatgtgattgatttcttatctctgttttgaaattatttccttactcttctgcaaagtcaggtaatggattccttgtataaatgctacttttcttccatgtctcaaagttgttttttttcctcccctttcttccctgttttccaataattctccatgtccccttttcttagaaaaggcattaatatggtgaatcttgtatgggaaccattccatgggagaacttcaacacagtttttgctccagagatcaaacatagctttcgtgatctctctaccagctatctaacttatcctctggtaatctttttttttttttttttttttttgagatggagtctcgctgtgtcaccaggccagagtgcagtggcgtgatcttggctcactgcaacctctgcctcccgggttcgagtgattctcctgcctcagcctcccaagtagttgggactacaggctaccacgcccagctaatttttatatttttagtagagacggggtttcaccatggtagccagaatggtctctatctcttgaccttgtgatccgcccgcctcagcctcccaaagtgctgggattacaggcgtgagccactgcgcccggcttcctctggtaatcttacacctttacagaattaatctaaactggtggctcataaatgacattaaaaacaaaaaaaaaatctggatgcagtggctcattcctatagtcccagcactttgggaggccaaggcgggaggatcatctgagcccaggagtttggggctgtagtgaactatgatcatacaacttcattctagcctgggtgacaaagtgacaccctgtctctaaacaaaaatcaagaaacaaaaaacttgtatttccctgcagctttgggaagccagaacacaatattgcagtgaatctgaattttctgtgacaaataaattattaaattggcacatatgatcatcaccagtcatgtctcatcaaaagcctttattatgatgcttgtacattttgaagaatttagaattaatgagaagttaaccctttagtcattgtaacacaatcatattttaatcagctttttcttttgctaccaagagtttcaaaaaataaatgcagtatttgatttcaggctgctaaatgggctcatttagcattcattccttgatgtagacattaaaaaaaaaactgaatagcattctttccaggataactaataaagcagacatgctaagcctataaatacatcagcactgcagcacacgtttaaggttgccacggacaaggatcacacaatagagaacactgtagtaacatttcggtctgctcacaagacccagaacattgatcagtttttgttgttggtttattatttttctgttaaaaaattgtgaaaagtttgttttagctagatgatattttaatagctgcgagtgctttggaactataaagatgtcactacttaacacatataccttatgttttgttttgttttgttttacactcagtataaatcaggagaagttagccaaccatctagcatttagaatcctcttttttattgtcttctaaggatatggatgttcccataacagcaacaaaacagcaacaaaaacatttcataaatatcacttgatagactgtaagcacctgcttaactttgtgtcccaaatatttagtgtgtatatatatatatatatatacacacacacacacatatatattcaacaaataaagcaaaatataacatgcatttcacattttgtctttccctgttacgattttaatagcagaactgtatgacaagtttaggtgatcctagcatatgttaaattcaaattaatgtaaaacagattaacaacaacaaagaaactgtctatttgagtgaagtcatgctttctattataataacttggcttcggttatccatcaaatgcacacttatactgttatctgattgtttataataaagaatactgtacttata

SEQ ID NO: 580 - DNA, 2656 bp, Homo sapiens
gaggctttaaaatcttttttcatcttctagctgtagctcgggctgcttgtcggcttggcctccccctcccccctttgctctctgcctcgtctttccccaggacttcgctattttgcttttttaaaaaaaggcaagaaagaactaaactcccccctccctctcctccagtcgggctgcacctctgccttgcactttgcacagaggtagagagcgcgcgagggagagagaggaaagaaaaaaaataataaagagagccaagcagaagaggaggcgagaagcatgaagtgttaactcccccgtgccaaggcccgcgccgcccggacagacgcccgccgcgcctccagccccgagcggacgccgcgcgcgccctgcctgcagcccgggccggcgaggcgagcccttccttatgcaaagcgcgcagcggagcggcgagcgggggacgccgcgcaccgggccgggctcctccagcttcgccgccgcagccaccaccgccgccaccgcagctcgcggaggatcttcccgagcctgaagccgccggctcggcgcgcaaggaggcgagcgagcaaggaggggccggggcgagcgagggagcacattggcgtgagcaggggggagggagggcgggcgcggggggcgcgggcagggcgggggggtgtgtgtgtgagcgcgctcggaggtttcgggccagccaccgccgcgcaagctagaagcgccccagcccggcaagctggctcacccgctggccacccagcacagcccgctggcccctctcctgcagcccatctggcggagcggcggcggcggcggcggcggcggcaggagaatggcatcagaactggcaatgagcaactccgacctgcccaccagtcccctggccatggaatatgttaatgacttcgatctgatgaagtttgaagtgaaaaaggaaccggtggagaccgaccgcatcatcagccagtgcggccgtctcatcgccgggggctcgctgtcctccacccccatgagcacgccgtgcagctcggtgcccccttcccccagcttctcggcgcccagcccgggctcgggcagcgagcagaaggcgcacctggaagactactactggatgaccggctacccgcagcagctgaaccccgaggcgctgggcttcagccccgaggacgcggtcgaggcgctcatcagcaacagccaccagctccagggcggcttcgatggctacgcgcgcggggcgcagcagctggccgcggcggccggggccggtgccggcgcctccttgggcggcagcggcgaggagatgggccccgccgccgccgtggtgtccgccgtgatcgccgcggccgccgcgcagagcggcgcgggcccgcactaccaccaccaccaccaccacgccgccggccaccaccaccacccgacggccggcgcgcccggcgccgcgggcagcgcggccgcctcggccggtggcgctgggggcgcgggcggcggtggcccggccagcgctgggggcggcggcggcggcggcggcggcggaggcggcgggggcgcggcgggggcggggggcgccctgcacccgcaccacgccgccggcggcctgcacttcgacgaccgcttctccgacgagcagctggtgaccatgtctgtgcgcgagctgaaccggcagctgcgcggggtcagcaaggaggaggtgatccggctgaagcagaagaggcggaccctgaaaaaccgcggctatgcccagtcctgccgcttcaagagggtgcagcagagacacgtcctggagtcggagaagaaccagctgctgcagcaagtcgaccacctcaagcaggagatctccaggctggtgcgcgagagggacgcgtacaaggagaaatacgagaagttggtgagcagcggcttccgagaaaacggctcgagcagcgacaacccgtcctctcccgagtttttcataactgagcccactcgcaagttggagccatcagtgggatacgccacattttggaagccccagcatcgtgtacttaccagtgtgttcacaaaatgaaatttgtgtgagagctgtacattaaaaaaaatcatcattattattattatttgcagtcatggagaaccacctacccctgacttctgtttagtctcctttttaaataaaaattactgtgttagagaagaaggctattaaatgtagtagttaactatgcctcttgtctgggggtttcatagagaccggtaggaaagcgcactcctgcttttcgatttatggtgtgtgcaagtaaacaggtgcattgctttcaacctgccatactagttttaaaaattcactgaaattacaaagatacatatatatgcatatatataatggaaagtttcccggaatgcaacaattagcattttaaaatcatatataggcatgcacattctaaatagtactttttcatgcttcattgtttctctggcagataattttactaagaagaaaaatagatattcgactccccttccctaaacaaatccacgggcagaggctccagcggagccgagccccctggttttctcgtaggccctagacggtgttgcatttatcagtgatgtcaaacgtgctcatttgtcagacatagctgtaaatgaaaacaatgtgtggcaaaatacaaagttaaaaaaaaaa

SEQ ID NO: 581 - DNA, 3378 bp, Homo sapiens
acagctgcaccgccgagctgcgagcggctgcgagcgagagagcgtaagagcaagagagctagagagcgagcaacgggcactcgccccacgcctcccctcagccccaccgcgcgctccgcttgcctctccaccccgcccgactctacccggcccggtccctgcgcgggcacagcccagagctctggggcggtgcaggcagcctcgggactctccggcgcgccgccgcgtccccagacaaaggcttggccggcggccccggcccgctgcgccctcgctccccgcctccccagctcttctccgctcttcccccccgcgcttggctcggcgcgctccggccggccgcaaagtttcccgggcggcagcggcggctgcgcctcgcttcagcgatggccgcggagctgagcatggggccagagctgcccaccagcccgctggccatggagtatgtcaacgacttcgacctgctcaagttcgacgtgaagaaggagccactggggcgcgcggagcgtccgggcaggccctgcacacgcctgcagccagccggctcggtgtcctccacaccgctcagcactccgtgtagctccgtgccctcgtcgcccagcttcagcccgaccgaacagaagacacacctcgaggatctgtactggatggcgagcaactaccagcagatgaaccccgaggcgctcaacctgacgcccgaggacgcggtggaagcgctcatcggctcgcacccagtgccacagccgctgcaaagcttcgacagctttcgcggcgctcaccaccaccaccatcaccaccaccctcacccgcaccacgcgtacccgggcgccggcgtggcccacgacgagctgggcccgcacgctcacccgcaccatcaccatcatcaccaagcgtcgccgccgccgtccagcgccgctagcccggcgcaacagctgcccactagccaccccgggcccgggccgcacgcgacggcctcggcgacggcggcgggcggcaacggcagcgtggaggaccgcttctccgacgaccagctcgtgtccatgtccgtgcgcgagctgaaccgccacctgcggggcttcaccaaggacgaggtgatccgcctgaagcagaagcggcggaccctgaagaaccggggctacgcccagtcttgcaggtataaacgcgtccagcagaagcaccacctggagaatgagaagacgcagctcattcagcaggtggagcagcttaagcaggaggtgtcccggctggcccgcgagagagacgcctacaaggtcaagtgcgagaaactcgccaactccggcttcagggaggcgggctccaccagcgacagcccctcctctcccgagttctttctgtgagtcgtggccggtcctggcccccgcccttgccccggcccggactccctgtcccacgtccctagtcccagactaccccggaccctgtccctgccgcggccccagccttgacctgtttgacttgagcgagagggaggaagggcgcgcgggccgcgggcgacgggcgggtgcgcgggcgggcaggggaccttggctaaggcgagagtagcgcacgccagcgccgcctcctagactcgagcagagccggagagagagacgagagggtgggaggtcccggagtaacttctctccaggctgaagggcggcgaggcatagtcccgagaagtcaccaaggccatctggagactcctggctttctgaactttgcgcgttaagccgggacagctgctttgctgcccggagagtagtccgcgccaggaagagagcaacgaggaaaggagagggactctggcgtcccggcaggcgagaggcgaggctgagcgaaagaaggaaggacagacggacctgtctgtcagagttcggagaacactggctctcagccctgagacacaggcctcagttaggacgctcggcgcccaaatctcatcagttttattgcctgctcgattatatagaaaaatacaaaaaatctgcattaaaaatattaatcctgcatgctggacatgtatggtaataatttctattttgtaccattttcttgtttaactttagcatgttgttgatcatggatcatactccccttgtttctttgggtgagaagggatcgcagtttggaaactccggcggctgcgtgcggggtttcagtcccagctgtaggcttgtaaatacccgccccgccaaaccgcatagagaacgtggcagcaagctgagggtctttgtttgggtttattattacggtatttttgtttgtaagttaaaaagaaaaaaaaaaagaaaaagttccgggcattttgcatcagaaaacaactttgtcttggggcacacttggaagttgcatgttttctttccttcccttatccccattcggtcctctttttcctctctcgctttagttttcaaccttgttggtgctgagagagagaaccgagaggtcccagtacaagggcagggcagggcagggaagctgccaagctccgcaccccagaggagtgttctggactacagccttgtcttatggtcaaattgatacccttaataagaaaggaaaggaaaggaaaacagatcctcccctctgctttttattgtaaccagaatcaccctgaggtcccttctgaaccctctgggcctgcgctaattgtaggagccacagcgctcctagggtgagaggcttagccatccctgaccctggcagtgcactggtaagcagacactgcactgaaccaactgctatgctcagaatgtaccagaaacccaaacattggcaagtaattttgcaactttcaagtgcgttctttagaccaatgcattgcgtttctttccctgcttttgagatagtaggaagagttcttggtggtgtccccccccttcaattcttcagttgtatagtagttatagggaagatatgggtgtttttctttattattacttttttttttctgcaggtcagtaaaaggatttaagttgcactgacaaaaataccaaaataaaagtgtatttttaagttcccatttgaaattgctggcgctgctggccggatgcatttttgagtttgtattagttgataaattaacagtaataacaagattgtatgaaccgcatggtgcttgcagttttaaatattgtggatatttgtcctgcatcagaaacgagctttggtttttacagattcaactgtgttgaaatcaaacctgccgcaacagaaattgtttttatttcatgtaaaataagggatcaatttcaaaccctgcttatgatatgaaaatattaaaacctagtctattgtagttttattcagactggtttctgttttttggttattaaaatggtttcctattttgcttattaaaaaaaaaaaaaaaaaaaa

SEQ ID NO: 582 - DNA, 2450 bp, Homo sapiens
cgggtcggtgacgtcaccgcatgactgggtttttatgaatgaaaggaatcctgtgagtgagtaattccgggaagctcgccttacaactccgcgcggcctcggccccctgcgccgcccgccccacaacaaaactcagcgcagcgctcccgggcgcccggttcagagcgacctgcggctcagagcggaggggagactgaccggagcgcggatcgggacagcggccgggacagcggcgagacgcgcgtgtgtgagcgcgccggaccaagcgggcccagaagcgggtctgcagcccagagggcaccttctgcaaacatgtctgtggatcccctatccagcaaagctctaaagatcaagcgagagctgagcgagaacacgccgcacctgtcggacgaggcgctgatggggctgtcggtgcgcgagctgaaccggcatctgcgcgggctctccgccgaggaggtgacacggctcaagcagcggcgccgcacactcaaaaaccgtggctacgccgccagctgccgcgtgaagcgcgtgtgccagaaggaggagctgcagaagcagaagtcggagctggagcgcgaggtggacaagctggcgcgcgagaacgccgccatgcgcctggagctcgacgcgctgcgcggcaagtgcgaggcgctgcagggcttcgcgcgctccgtggccgccgcccgcgggcccgccacgctcgtggcgccggccagcgtcatcaccatcgtcaagtccaccccgggctcggggtctggccccgcccacggcccggaccccgcccacggcccggcctcctgctcctagtgcccgcccccgccatgcctcagccacgcccctccggcctcagctccctccccaaagtgcctgagcgccgcctctgtgcccaggtcccatttctctgcagcactggccccttggtgcacacacattcccttcgtgggccctgtcttcctcttgcagccccccaaactgggaccgaatgaccctgggaaggggaacttgggtaggttggggatggggcagaggtctggatctgggatcgcccttggctgaaagtttagcctttttagattgagagatacagagccggcttagagaacagctgttgggggagaagagggcacccctcatcttggaaactgctcttattgtgccaatatgccctccaaaccctcccaggattcaaagctaggtttggctgtctgtgacttacgggaccgtcctgctgagaaattgcactgaagagatgcccccacctctggttgggcctgggggtgcctggccttccgaaactaaaagagtgggtgggaagactagtgaaacccagttcacggatggggaaacaggcctgaggtcacatttcacttagtggttgtgttgggaccaaaacctgggtgtcctcactgctgccctgagtccagccatggttttcagggggacagtggacagggactcagaaatgtggtgggagggcctccctggcttgggagaccgctctctgcaagggagggggagagaagcagagggagagagaaggtgacacggatggaagagtgggaaggagctggcctggctcagccctaggctgtccctgcagccagggtgtccgggggctggccagtcagagaaagggggccatggactgctgtggcaaatagggagacaaggagacagaccctgcagtcctactacagtctggagtggggtcctaagaagaagggtcccacctcaacccctgtcagtgtccactgtggggtgggggctgacccctgcctttgattgtcattctcctgggaagcccagtctcagtccctcccccaacactgtccacactgcccctccccactgtttatttattgcacggatctaagttattctccccagccagagcccgagctcctgctccctgggaaaagtggcgtatggccctgagctgggctttatattttatatctgcaaataaatcacattttatcttatatttagggaaagccggagagcaacaacaaaaaatgtttaagccgggcgcggtggctcacatctgtaatcccagcactttgggagtccaaggagggggatcgcttgagtccaggagtttgagaccagcctggacaacatggtgaaaccccatctctacaaaaaatacaaaaattagccatgcatggtggctcatgcctgtagtcccagctacttgggaggctgaggcaggaggatcacttaagcccagaaggcagaggttgtagtgagctgagatcgcaccactgcactccagcctgggcaacatagcaaaatcctgtctcaaaaaaaaagttaaaaaatattgcccggctcctagaatttatttatttcctgacttacagcaagcgagttatcgtcttctgtattttgtagactttctaaataaagtcaaattctttctttttccacagagaataaaaaaaaaaaaa

SEQ ID NO: 583 - DNA, 5043 bp, Homo sapiens
cggcggcggcggatcccgagcctggtccggcccggccttcccagtgcgctcggcccggcccgcgcaggcggcgagtcctccgagccccgggcccggacccctcgcgccggtccctgccccgcgcggcctcggagcgcgcgcggccccgccccgccccggcctcggcccgccgggcccgcagtgtgagagcgcctgctcgctgtgcccccgggttatgacgacccccaataaaggaaacaaggccttgaaggtgaagcgggagccgggtgagaatggcaccagcctgacggatgaggagctggtgaccatgtcggtgcgggagctgaaccagcacctgcggggcctgtccaaggaggagatcgtccagctgaagcagcgccggcgcacgctcaagaaccgcggctacgctgccagctgccgcgtgaagcgggtgacgcagaaggaggagctggagaagcagaaggcggagctgcagcaggaggtggagaagctggcctcagagaacgccagcatgaagctggagctcgacgcgctgcgctccaagtacgaggcgctgcagaccttcgcccggacggtggcccgcagccccgtggcgccagcccggggcccccttgccgccggcctggggcccctcgtcccaggcaaggtggccgccaccagcgtcatcacaatagtaaagtccaagacggatgcccgatcgtagggacgcgcgtctgcccaggcgggtctttgcggggccactaggcacatggcgaatttggctgccctgtccctctgtttccttctcttctctttcctccctctcttccccacccttctctcttccctgcaaagcacaacctgtaccccaggggcgccgggctgagcccctttgatctcgtcattgtcgtcgtgtgttttgtatgttgggattggtcagttcggcggtgacgtggggtcgccccaaccccttttgtaccagggccatgcaggcttggagtccagagttggtgctgtgggaacggactagagagagttgcgggagagagaaggagcaggcacgctgggcctcgcgtgtccccgagcagtgagggtcccagtgttccctccactcccgagtggccacaggctcgcgggctgggaaggattcactctctttagccccaggggagcagctcagcttagcccagcatgaagagatgggctctgctctgagagtagggcgggcttgaaggccctgatgggtggaccaccagcctgggcgcagtggtgctgggggcgtgcagctgggcccaggggctgtgcactcaggcctgacccgttgcactgaacaagaccaaatcgctggttgtgcgcttaacgtgagggtgggtccagtgtgccctgcgatgggtcccgtgtcactgtttacatgacctatttgtgtggttatatagccctttatttaaaagagagaagttccttttacaaagttattaaattaattatatgtttaaaagttaaagaaaaaagagctgcagagtatttataaaactgtcttttagaaaaaaaacaagcaagaagaccatttgaccatatgaatggaaaagggaagaaagtataatagaaactttgctagttaaaaaaaaaagaaaaaaaaagaaaaaaaatccctttcttgtaaacttacggacacctctttgtggctgttggagtttagtttttatatacacagagttatcagacattatttataaaacttagtttaaaaaaaagacaaaaaaaaaaaagccaagccgtgagccgaccagaaggccgtcctctttgatatcttttgcaattgtaccgaaagtgacttactcctctgcccttcctgcttccgtctcttgccggtgccgtggtgtcgtccgtgcctggtgaggttttgtgcagcggtaaagtgctggtgcttctggtgacctttgacctgtgggtgtcacttcttgtgtctgttttcccgtgttcgttttttgggtttagttgtgcttttgcttctgctggcttgctggacctgggctggggtgccaagtggcgcctgctgcgtcagagctcaaggaatctgtgcccaccaccagctcctggtccgtaggaggtgagacatggggttctgtcatgcccccctccactgagccttggctacatctgtgtctagggcttgggctgatctagtggcggggtaggtgaaactggggtcccttggggcgccccacgctgcttccacacccaccacctctggccttgggtggtggcattacagggatgagggagtcactgtgggtggccacagggctatggccaagcgttccctggccgtcttcctctggcctcagctttgttcctataggctgcccgcgccgtgggctgcaggtctcgccgcccgcttgatccctgaggtgtttccatgctgcgggtggtgcttccaggcagagtgggtgggggcccaccgggcaccgccctttcttccttgtccctgcctcactctgagagccttgggggtctccaccagtgcagacaagggctacagtctccagggccgggtcttgtccctcttctccgctggtccacgctggcagctcttggcttcgggcctgccttctgcctccctttgggatctgtgtcttccagggatcagctgcttggcttctgctggaggtgcctccctgtgggggcgcagcctgcctcctgctctcagttcctcgccagaggctgctgcccttcctggctgggctcaggaggctccttgtaggcatatgatggggagggggtgcccctacccacctccaagaggctacagccctgtgtctggccatgtgagccctggcctttcaccgggttgctggtttcttttctgtggggcccagacttctgtaaagcacacagatgtgggtaagatgaaaaactgtggcccaacagggcttaaccctatggatggtgggatttttatccaatagtttggcctggtgtgcccacaggatgggaacagggaggcaccatcaacacttgtcatgttaatgagcttttctttgctcgaggtgttcagagacaagtcctgtgtctacctgcgtcagcctgaaaatggaaatattggctgttgactcttgtcatttagtgacttcatccccctcccctcagtctgatcttgtctaagtagaatccaggcgttagttggaatcatatcataagtatccatgaagaaaacgtcatgatctgcctcggagtggggagaaacaggccctccttgtccttgtgcagcccccacttttgtcctggctgtgggtggccatccattttgagcacctctgccaggctgcagacctggaggcgaagggagtgtggaagaggagggtgtaagggtcgacgcgtgctgaatgggaggtgcaggtcctcggtgcgttggcagaagaggcttctggagtttcgaggccatacctcctttcaagagctttggatttggggcgacttccctgggtctaggggagtgttcctgtcccctgtcaggtcagccctgcggagccactccacccctcttccccttcccctggatttcctgacatagatggtgtgttcatgtgcaggtgtgagtgtgctgtccttctgatctctgttgatcccgctttcctactgagagggtggtggagagggtggtggtctcttctcacctcagtttttctgacacagcgaatcgagggctttggccaaggccaggtctctcaaacttgtccgccaagtaaaccatgatatatgtcttcccttccaccttaactttgccccaactcctcttttatcctaacatggacgctcagatttcagaggaatacccagcagggacaggtcagctctcaccaggagagtgaggcccctggctgctgctcggggtggcactggtgttgctggctcagctcttggtgcatgtttcagatatgtgtgtacacttctgactggtgatcagggcccggcccacggccctgagcggctgcagcctgctttgggacgatggtcaggtcccatgttgtccctgctgcctccctctggagtggccacttggccaaagcgcccatccacatctggaaagtcggagccgcagcctgctgcaccgtttccgctctgggatcttgtgagttacttttttaggctgtggtttggtgaaaggaaccaacacattaacgatttttcccccagaagccactgaataattctttttggtgtatttttgccttcctgttggctgtctggccttggagcaggtcgggagagtagagtacataatcagtgccacacagaggcagggcgtgtctgagagactaatgcctgtcctgcctctggcctgtgtcctgggtgtgtaccatacctgctgggccagtcccacacatttccaccctgcccctggagcagcagctttgataccatgggtgtcccttgagtctgagctagagtgtgtccccgataaactgtgagacctccctgttcttggtgaccccagttgggctttggcccctccagcaaccttgtgtcccagccctgcccttcttcccaccccctcaatctgctagtccctgaagcctttaaccaaacgggagtgggcacagaaagccttctcctggcaacaggacaagggctgcccgcgtgtccagccctgttgctctcctggcgctgagaggtgggtccaagcagagttgatcagtccctgcctgccctgcctaggtctagccaggggaggttgtgtgtgtgggagaagaccccgggatctgctggggtgggatggaggttattaaagatctaagtgaggaggggctggggtttggatgcggggtgaggcccgagcgctcacacttcgtgtagggcgggcaggggcctgacctcttgcagggcagtggccttggtgccctacccctgccctgcgcagtatttattgctaaattattgtccaggaggggcagcactgggcctggccccccgggtatttattgctgtacatagtgtatgtttgtgatatataaggttttctttattttgtatatgatcaataaaccttttaaagagaaaaaa

SEQ ID NO: 584 - DNA, 2470 bp, Homo sapiens
ggcggctgtagccgagggggcggccggaaagcagcggcggcgtctggggcgctttcgcaacattcagacctcggttgcagcccggtgccgtgagctgaagaggtttcacatcttactccgccccacaccctgggcgttgcggcgctgggctcgttgctgcagccggaccctgctcgatgggcacgactgggctggagagtctgagtctgggggaccgcggagctgcccccaccgtcacctctagtgagcgcctagtcccagacccgccgaatgacctccgcaaagaagatgttgctatggaattggaaagagtgggagaagatgaggaacaaatgatgataaaaagaagcagtgaatgtaatcccttgctacaagaacccatcgcttctgctcagtttggtgctactgcaggaacagaatgccgtaagtctgtcccatgtggatgggaaagagttgtgaagcaaaggttatttgggaagacagcaggaagatttgatgtgtactttatcagcccacaaggactgaagttcagatccaaaagttcacttgctaattatcttcacaaaaatggagagacttctcttaagccagaagattttgattttactgtactttctaaaaggggtatcaagtcaagatataaagactgcagcatggcagccctgacatcccatctacaaaaccaaagtaacaattcaaactggaacctcaggacccgaagcaagtgcaaaaaggatgtgtttatgccgccaagtagtagttcagagttgcaggagagcagaggactctctaactttacttccactcatttgcttttgaaagaagatgagggtgttgatgatgttaacttcagaaaggttagaaagcccaaaggaaaggtgactattttgaaaggaatcccaattaagaaaactaaaaaaggatgtaggaagagctgttcaggttttgttcaaagtgatagcaaaagagaatctgtgtgtaataaagcagatgctgaaagtgaacctgttgcacaaaaaagtcagcttgatagaactgtctgcatttctgatgctggagcatgtggtgagaccctcagtgtgaccagtgaagaaaacagccttgtaaaaaaaaaagaaagatcattgagttcaggatcaaatttttgttctgaacaaaaaacttctggcatcataaacaaattttgttcagccaaagactcagaacacaacgagaagtatgaggatacctttttagaatctgaagaaatcggaacaaaagtagaagttgtggaaaggaaagaacatttgcatactgacattttaaaacgtggctctgaaatggacaacaactgctcaccaaccaggaaagacttcactggtgagaaaatatttcaagaagataccatcccacgaacacagatagaaagaaggaaaacaagcctgtatttttccagcaaatataacaaagaagctcttagccccccacgacgtaaagcctttaagaaatggacacctcctcggtcaccttttaatctcgttcaagaaacactttttcatgatccatggaagcttctcatcgctactatatttctcaatcggacctcaggcaaaatggcaatacctgtgctttggaagtttctggagaagtatccttcagctgaggtagcaagaaccgcagactggagagatgtgtcagaacttcttaaacctcttggtctctacgatcttcgggcaaaaaccattgtcaagttctcagatgaatacctgacaaagcagtggaagtatccaattgagcttcatgggattggtaaatatggcaacgactcttaccgaattttttgtgtcaatgagtggaagcaggtgcaccctgaagaccacaaattaaataaatatcatgactggctttgggaaaatcatgaaaaattaagtctatcttaaactctgcagctttcaagctcatctgttatgcatagctttgcacttcaaaaaagcttaattaagtacaaccaaccacctttccagccatagagattttaattagcccaactagaagcctagtgtgtgtgctttcttaatgtgtgtgccaatggtggatctttgctactgaatgtgtttgaacatgttttgagatttttttaaaataaattattatttgacaacaatccaaaaaaaatacggcttttccaatgatgaaatataatcagaagatgaaaaatagttttaaactatcaataatacaaagcaaatttctatcagccttgctaaagctaggggcccactaaatatttttatcggctaggcgtggtggtgcatgcctgtaatctcggaaggctgaggcaggaggatcatttgagctcatgagggcccaggaggtcaaggcttcagtgagccatgatcatgccactgcactccagtctggatgacagagagagaccctgtctcaaaaaatatatatttaaaaaataaaaataaaagctgaccccaaagac

SEQ ID NO: 585 - DNA, 4748 bp, Homo sapiens
agcaacagagtttagactgtctttgcttcatcatctgaaggtaaaattttccagatacggcagacggctttcagagtacaataaacagggaatgagaactatttacatggaagtttctttctcatgatgcggtggagaagcctcggccacttggttctgccagatgttcctggggttactgtaaatgggaaggacaggcagagctaaacaaggtttatcatttaaaagtgcctgtgtgaagtcacttttgctggaaaactgcagcttgggagctttctttgtattcacatcccactcttctgtcaagtacactttaccctgaccttatgagtggatgaagatacctcagttgtctgactttgccaattgcttaatttcagaatttaaaaaggggaaagaaaaacatcctgctaaaatatgaacatctgagtgtcttattttccaacatcgtcaatagctgtgagcgtcagcattaaatattctcccaaggagtgccatgatattgaagtcactttattaataacagctgtatctgcaaaacagtcaagagactcggacgttgaaagccagagatgacactgagcatgcttttattgcggcctaccatctttaagtgggacatattgattgatgagtgattgcctgtccatacactctctcatcatcctgttccttggattggacttcactaagcaatttatcactcaccttcagacttacatgtgggagttttcacaacagtagttttggaatcattagaacttggattgatttcatcatttaacagaaacaaacagcccaaattactttatcaccatggctttgaacgttgccccagtcagagatacaaaatggctgacattagaagtctgcagacagtttcaaagaggaacatgctcacgctctgatgaagaatgcaaatttgctcatccccccaaaagttgtcaggttgaaaatggaagagtaattgcctgctttgattccctaaagggccgttgttcgagagagaactgcaagtatcttcaccctccgacacacttaaaaactcaactagaaattaatggaaggaacaatttgattcagcaaaaaactgcagcagcaatgcttgcccagcagatgcaatttatgtttccaggaacaccacttcatccagtgcccactttccctgtaggtcccgcgatagggacaaatacggctattagctttgctccttacctagcacctgtaacccctggagttgggttggtcccaacggaaattctgcccaccacgcctgttattgttcccggaagtccaccggtcactgtcccgggctcaactgcaactcagaaacttctcaggactgacaaactggaggtatgcagggagttccagcgaggaaactgtgcccggggagagaccgactgccgctttgcacaccccgcagacagcaccatgatcgacacaagtgacaacaccgtaaccgtttgtatggattacataaaggggcgttgcatgagggagaaatgcaaatattttcaccctcctgcacacttgcaggccaaaatcaaagctgcgcagccgcggccgcggccacagtcatgactcagtcgactgccaaagcaatgaagcgacctctcgaagcaactgtagacctggcctttccccctggtgctcttcatcctttaccaaagagacaagcacttgaaaaaagcaatggtaccagcgcggtctttaaccccagcgtcttgcactaccagcaggctctcaccagcgcacagttgcagcaacacgccgcgttcattccaacagggtcagttttgtgcatgacacccgctaccagtattgtacccatgatgcacagcgctacgtccgccactgtctctgcagcaacaactcctgcaacaagtgtccccttcgcagcaacagccacagccaatcagataattctgaaataatcagcagaaacggaatggaatgccaagaatctgcattgagaataactaaacattgttactgtacatactatcctgtttcctcctcaatagaattgccacaaactgcatgctaaataaagatgtagttcttctggacagaccacaactctaagaagctagtgctgctatctcatatatgagtattaaatatggtatgcttagtatattccaacctaagatagttaactacctgagaccagctgtgatgtttaaagacataaaggataaagtttacttttaaagggtttctaaacatagtttctgtcctaggaatattgtcttatctccataactatagctgatgcagaaagtccagccagtttactcatttcgattcagaatatttcaaatttagcaataaacaattagcattagttaaaaaagaaacatattccaagggcaggttcgattctagctctaattactgtcatgtcatttacccactggatcaaagggtatgtttcacttcttgacaatataaatgctgcagcaaagatgagaggtgaagtaaaaccgatacctgtcctgcaggtctaaaatttgaatggaaattcaagcacaagtactggggacacatcaaagtgtggtgtttggtttgcctggagatgccacgttgaatcatgtgattctagattaacattaaatagattgaaaaagaaactttgcacggtatgagcttcataccccaccaaacaaagtcttgaaggtattattttacaagtatatttttaaagttgttttataagagagactttgtagaagtgcctagattttgccagacttcatccagcttgacaagattgagaggcccatgccaacagtctaatctaagagattagtctttcaaactcaccatccagttgcctgttacagaataactcttcttaactaaaaacctagtcaaacaaggaagctgtaggtgaggagatctgtataatattctaatttaagtaagtttgagtttagtcactgcaaatttgactgtgactttaatctaaattactatgtaaacaaaaagtagatagtttcactttttaaaaaatccattactgttttgcatttcaaaagttggattaaagggttgtaactgactacagcatggaaaaaaatagttcttttaattctttcaccttaaagcatattttatgtctcaaaagtataaaaaactttaatacaagtacatacatattatatatacacatacatatatatactatatatggatgaaacatattttaatgttgtttacttttttaaatacttggttgatcttcaaggtaatagcgatacaattaaattttgttcagaaagtttgttttaaagtttattttaagcactatcgtaccaaatatttcatatttcacattttatatgttgcacatagcctatacagtacctacatagtttttaaattattgtttaaaaaacaaaacagctgttataaatgaatattatgtgtaattgtttcaaacatccattttctttgtgaacatattagtgattgaagtattttgacttttgagattgaatgtaaaatattttaaatttgggatcatcgcctgttctgaaaactagatgcaccaaccgtatcattatttgtttgaggaaaaaaagaaatctgcattttaattcatgttggtcaaagtcgaattactatctatttatcttatatcgtagatctgataaccctatctaaaagaaagtcacacgctaaatgtattcttacatagtgcttgtatcgttgcatttgttttaatttgtggaaaagtattgtatctaacttgtattactttggtagtttcatctttatgtattattgatatttgtaattttctcaactataacaatgtagttacgctacaacttgcctaaaacattcaaacttgttttcttttttctgtttttttctttgttaattcatttaaactcattgaaaacatagtatacattactaaaaggtaaattatgggaatcactgaaatatttttgtagattaattgttgtaacattgtctttcttttttttcttttgtttcatgattttgatttttaaaattattagcacacaactattttcagccctttaataatggagcatcaaaaacatcacctgtaaccccaagcaaatatagaagactgtattttttactatgatatccattttccagaattgtgattacaatatgcaaagagtcataaatatgccatttacaataaggaggaggcaaggcaaatgcatagatgtacaaatatatgtacaacagattttgctttttatttatttataatgtaattttatagaataattctgggatttgagaggatctaaaactatttttctgtataaatattatttgccaaaagtttgtttatattcagaagtctgactatgatgaataaatcttaaatgctttgtttaattaaaaaacaaaaatcaccaatatccaagacatgaagatatcagttcaacaaatactgtagttaagagactaactctccacttgtatgggaactacatttcactcttggttttcaggatataacagcacttcaccgaaatattctttcagccataccactggtaacatttctactaaatctttctgtaacacttaaagaattccctcattcattaccttacagtgtaaacaggagtctaatttgtatcaatactatgttttggttgtaatattcagttcactcacccaatgtacaaccaatgaaataaaagaagcatttaaaaggaaaaaaaaaaaaaaaaaaaaaaaaaaaa

SEQ ID NO: 586 - DNA, 877 bp, Homo sapiens
gcacttccgccctctcttaacatggagccggcggaaggggtggtgtagggccgggcgataatggcggcgtcgaggctggagctaaacctggtgcggctgctatcccgctgcgaggcgatggcagcggagaaacgggacccggacgagtggcgcctggagaagtacgtgggagccctagaggacatgttgcaggccctgaaggtccacgcgagcaaaccggcctctgaggtgatcaatgaatattcctggaaggtggattttctgaaggggatgctgcaagccgagaagctgacctcctcctcagagaaagcactggccaaccagttcctggcccctggccgtgtgccaaccacagccagagagcgagtgcccgccacaaagacggtgcatctgcagtcacgggcgcggtacaccagcgagatgcggagtgagctactaggcacggactctgcagagcctgagatggacgtaaggaagagaactggagtggcagggtcccagccagtgagtgagaagcagtcggcagctgagctagacctcgtcctgcagcgacatcagaacctccaggaaaagctggcggaagagatgctaggactggcccggagcctcaagaccaataccctggccgcccagagtgtcatcaagaaggacaaccagaccctgtcacactcactgaaaatggcggaccagaacctggagaaactgaagacggagtcagagcgtctggagcagcacacgcagaagtcagtcaactggctgctctgggccatgctcattatcgtctgcttcatcttcattagcatgatcctcttcattcgaatcatgcctaaactcaaataaagacccccgcccacctaaaaaaaaaaaaaaaaaaaaa

SEQ ID NO: 587 - DNA, 5533 bp, Homo sapiens
gattgccatctgacaagatctccaaatcaaagtgataaatcgctccaaactttttttggcggcgctgagatgttggaggggcgtctagcgcgcatgtgcgaaggtgtccaaactgacaatgctggagagatagcgagtgtggattgagagaaagggagagagggagggagagagagtgaaagaagaaaatacagagagtgagtgtgtggaagagagagagaaacaggagagaaacaggagggagggagagagagagagagagagagagagagagagagagagagagagagagagagagagacaggagagagagggagggagcgagagggagagcaaaagaaggaaaggatccaagaaaaaaaagccccaaccacacaccagcggctgcaggactgggcacagcatgagatccaaaggcagggcaaggaaactggccacaaataatgagtgtgtatatggcaactaccctgaaatacctttggaagaaatgccagatgcagatggagtagccagcactccctccctcaatattcaagagccatgctctcctgccacatccagtgaagcattcactccaaaggagggttctccttacaaagcccccatctacatccctgatgatatccccattcctgctgagtttgaacttcgagagtcaaatatgcctggggcaggactaggaatatggaccaaaaggaagatcgaagtaggtgaaaagtttgggccttatgtgggagagcagaggtcaaacctgaaagaccccagttatggatgggagatcttagacgaattttacaatgtgaagttctgcatagatgccagtcaaccagatgttggaagctggctcaagtacattagattcgctggctgttatgatcagcacaaccttgttgcatgccagataaatgatcagatattctatagagtagttgcagacattgcgccgggagaggagcttctgctgttcatgaagagcgaagactatccccatgaaactatggcgccggatatccacgaagaacggcaatatcgctgcgaagactgtgaccagctctttgaatctaaggctgaactagcagatcaccaaaagtttccatgcagtactcctcactcagcattttcaatggttgaagaggactttcagcaaaaactcgaaagcgagaatgatctccaagagatacacacgatccaggagtgtaaggaatgtgaccaagtttttcctgatttgcaaagcctggagaaacacatgctgtcacatactgaagagagggaatacaagtgtgatcagtgtcccaaggcatttaactggaagtccaatttaattcgccaccagatgtcacatgacagtggaaagcactatgaatgtgaaaactgtgccaaggttttcacggaccctagcaaccttcagcggcacattcgctctcagcatgtcggtgcccgggcccatgcatgcccggagtgtggcaaaacgtttgccacttcgtcgggcctcaaacaacacaagcacatccacagcagtgtgaagccctttatctgtgaggtctgccataaatcctatactcagttttcaaacctttgccgtcataagcgcatgcatgctgattgcagaacccaaatcaagtgcaaagactgtggacaaatgttcagcactacgtcttccttaaataaacacaggaggttttgtgagggcaagaaccattttgcggcaggtggattttttggccaaggcatttcacttcctggaaccccagctatggataaaacgtccatggttaatatgagtcatgccaacccgggccttgctgactattttggcgccaataggcatcctgctggtcttacctttccaacagctcctggattttcttttagcttccctggtctgtttccttccggcttgtaccacaggcctcctttgatacctgctagttctcctgttaaaggactatcaagtactgaacagacaaacaaaagtcaaagtcccctcatgacacatcctcagatactgccagctacacaggatattttgaaggcactatctaaacacccatctgtaggggacaataagccagtggagctccagcccgagaggtcctctgaagagaggccctttgagaaaatcagtgaccagtcagagagtagtgaccttgatgatgtcagtacaccaagtggcagtgacctggaaacaacctcgggctctgatctggaaagtgacattgaaagtgataaagagaaatttaaagaaaatggtaaaatgttcaaagacaaagtaagccctcttcagaatctggcttcaataaataataagaaagaatacagcaatcattccattttctcaccatctttagaggagcagactgcggtgtcaggagctgtgaatgattctataaaggctattgcttctattgctgaaaaatactttggttcaacaggactggtggggctgcaagacaaaaaagttggagctttaccttacccttccatgtttcccctcccattttttccagcattctctcaatcaatgtacccatttcctgatagagacttgagatcgttacctttgaaaatggaaccccaatcaccaggtgaagtaaagaaactgcagaagggcagctctgagtccccctttgatctcaccactaagcgaaaggatgagaagcccttgactccagtcccctccaagcctccagtgacacctgccacaagccaagaccagcccctggatctaagtatgggcagtaggagtagagccagtgggacaaagctgactgagcctcgaaaaaaccacgtgtttgggggaaaaaaaggaagcaacgtcgaatcaagacctgcttcagatggttccttgcagcatgcaagacccactcctttctttatggaccctatttacagagtagagaaaagaaaactaactgacccacttgaagctttaaaagagaaatacttgaggccttctccaggattcttgtttcacccacaattccaactgcctgatcagagaacttggatgtcagctattgaaaacatggcagaaaagctagagagcttcagtgccctgaaacctgaggccagtgagctcttacagtcagtgccctctatgttcaacttcagggcgcctcccaatgccctgccagagaaccttctgcggaagggaaaggagcgctatacctgcagatactgtggcaagatttttccaaggtctgcaaacctaacacggcacttgagaacccacacaggagagcagccttacagatgcaaatactgtgacagatcatttagcatatcttctaacttgcaaaggcatgttcgcaacatccacaataaagagaagccatttaagtgtcacttatgtgataggtgttttggtcaacaaaccaatttagacagacacctaaagaaacatgagaatgggaacatgtccggtacagcaacatcgtcgcctcattctgaactggaaagtacaggtgcgattctggatgacaaagaagatgcttacttcacagaaattcgaaatttcattgggaacagcaaccatggcagccaatctcccaggaatgtggaggagagaatgaatggcagtcattttaaagatgaaaaggctttggtgaccagtcaaaattcagacttgctggatgatgaagaagttgaagatgaggtgttgttagatgaggaggatgaagacaatgatattactggaaaaacaggaaaggaaccagtgacaagtaatttacatgaaggaaaccctgaggatgactatgaagaaaccagtgccctggagatgagttgcaagacatccccagtgaggtataaagaggaagaatataaaagtggactttctgctctagatcatataaggcacttcacagatagcctcaaaatgaggaaaatggaagataatcaatattctgaagctgagctgtcttcttttagtacttcccatgtgccagaggaacttaagcagccgttacacagaaagtccaaatcgcaggcatatgctatgatgctgtcactgtctgacaaggagtccctccattctacatcccacagttcttccaacgtgtggcacagtatggccagggctgcggcggaatccagtgctatccagtccataagccacgtatgacgttatcaaggttgaccagagtgggaccaagtccaacagtagcatggctctttcatataggactatttacaagactgctgagcagaatgccttataaacctgcagggtcactcatctaaagtctagtgaccttaaactgaatgatttaaaaaagaaaagaaagaaaaaagaaactatttattctcgatattttgttttgcacagcaaaggcagctgctgacttctggaagatcaatcaatgcgacttaaagtgattcagtgaaaacaaaaaacttggtgggctgaaggcatcttccagtttaccccaccttagggtatgggtgggtgagaagggcagttgagatggcagcattgatatgaatgaacactccatagaaactgaattctcttttgtacaagatcacctgacatgattgggaacagttgcttttaattacagatttaatttttttcttcgttaaagttttatgtaatttaaccctttgaagacagaagtagttggatgaaatgcacagtcaattattatagaaactgataacagggagtacttgttcccccttttgccttcttaagtacattgtttaaaactagggaaaaagggtatgtgtatattgtaaactatggatgttaacactcaaagaggttaagtcagtgaagtaacctattcatcaccagtaccgctgtaccactaataaattgtttgccaaatccttgtaataacatcttaattttagacaatcatgtcactgtttttaatgtttatttttttgtgtgtgttgcgtgtatcatgtatttatttgttggcaaactattgtttgttgattaaaatagcactgttccagtcagccactactttatgacgtctgaggcacacccctttccgaatttcaaggaccaaggtgacccgacctgtgtatgagagtgccaaatggtgtttggcttttcttaacattcctttttgtttgtttgttttgttttccttcttaatgaactaaatacgaatagatgcaacttagtttttgtaatactgaaatcgattcaattgtataaacgattataatttctttcatggaagcatgattcttctgattaaaaactgtactccatattttatgctggttgtctgcaagcttgtgcgatgttatgttcatgttaatcctatttgtaaaatgaagtgttcccaaccttatgttaaaagagagaagtaaataacagactgtattcagttattttgccctttattgaggaaccagatttgttttctttttgtttgtaatctcattttgaaataatcagcaagttgaggtactttcttcaaatgctttgtacaatataaactgttatgcctttcagtgcattactatgggaggagcaactaaaaaataaagacttacaaaaaggagtattttt

SEQ ID NO: 588 - DNA, 10241 bp, Homo sapiens
ccggcgtcggcggcgcgcgcgctccctcctctcggagagagggctgtggtaaaagccgtccggaaaatggccgccgccgccgccgccgcgccgagcggaggaggaggaggaggcgaggaggagagactgctccataaaaatacagactcaccagttcctgctttgatgtgacatgtgactccccagaatacaccttgcttctgtagaccagctccaacaggattccatggtagctgggatgttagggctcagggaagaaaagtcagaagaccaggacctccagggcctcaaggacaaacccctcaagtttaaaaaggtgaagaaagataagaaagaagagaaagagggcaagcatgagcccgtgcagccatcagcccaccactctgctgagcccgcagaggcaggcaaagcagagacatcagaagggtcaggctccgccccggctgtgccggaagcttctgcctcccccaaacagcggcgctccatcatccgtgaccggggacccatgtatgatgaccccaccctgcctgaaggctggacacggaagcttaagcaaaggaaatctggccgctctgctgggaagtatgatgtgtatttgatcaatccccagggaaaagcctttcgctctaaagtggagttgattgcgtacttcgaaaaggtaggcgacacatccctggaccctaatgattttgacttcacggtaactgggagagggagcccctcccggcgagagcagaaaccacctaagaagcccaaatctcccaaagctccaggaactggcagaggccggggacgccccaaagggagcggcaccacgagacccaaggcggccacgtcagagggtgtgcaggtgaaaagggtcctggagaaaagtcctgggaagctccttgtcaagatgccttttcaaacttcgccagggggcaaggctgaggggggtggggccaccacatccacccaggtcatggtgatcaaacgccccggcaggaagcgaaaagctgaggccgaccctcaggccattcccaagaaacggggccgaaagccggggagtgtggtggcagccgctgccgccgaggccaaaaagaaagccgtgaaggagtcttctatccgatctgtgcaggagaccgtactccccatcaagaagcgcaagacccgggagacggtcagcatcgaggtcaaggaagtggtgaagcccctgctggtgtccaccctcggtgagaagagcgggaaaggactgaagacctgtaagagccctgggcggaaaagcaaggagagcagccccaaggggcgcagcagcagcgcctcctcaccccccaagaaggagcaccaccaccatcaccaccactcagagtccccaaaggcccccgtgccactgctcccacccctgcccccacctccacctgagcccgagagctccgaggaccccaccagcccccctgagccccaggacttgagcagcagcgtctgcaaagaggagaagatgcccagaggaggctcactggagagcgacggctgccccaaggagccagctaagactcagcccgcggttgccaccgccgccacggccgcagaaaagtacaaacaccgaggggagggagagcgcaaagacattgtttcatcctccatgccaaggccaaacagagaggagcctgtggacagccggacgcccgtgaccgagagagttagctgactttacacggagcggattgcaaagcaaaccaacaagaataaaggcagctgttgtctcttctccttatgggtagggctctgacaaagcttcccgattaactgaaataaaaaatatttttttttctttcagtaaacttagagtttcgtggcttcagggtgggagtagttggagcattggggatgtttttcttaccgacaagcacagtcaggttgaagacctaaccagggccagaagtagctttgcacttttctaaactaggctccttcaacaaggcttgctgcagatactactgaccagacaagctgttgaccaggcacctcccctcccgcccaaacctttcccccatgtggtcgttagagacagagcgacagagcagttgagaggacactcccgttttcggtgccatcagtgccccgtctacagctcccccagctccccccacctcccccactcccaaccacgttgggacagggaggtgtgaggcaggagagacagttggattctttagagaagatggatatgaccagtggctatggcctgtgcgatcccacccgtggtggctcaagtctggccccacaccagccccaatccaaaactggcaaggacgcttcacaggacaggaaagtggcacctgtctgctccagctctggcatggctaggaggggggagtcccttgaactactgggtgtagactggcctgaaccacaggagaggatggcccagggtgaggtggcatggtccattctcaagggacgtcctccaacgggtggcgctagaggccatggaggcagtaggacaaggtgcaggcaggctggcctggggtcaggccgggcagagcacagcggggtgagagggattcctaatcactcagagcagtctgtgacttagtggacaggggagggggcaaagggggaggagaagaaaatgttcttccagttactttccaattctcctttagggacagcttagaattatttgcactattgagtcttcatgttcccacttcaaaacaaacagatgctctgagagcaaactggcttgaattggtgacatttagtccctcaagccaccagatgtgacagtgttgagaactacctggatttgtatatatacctgcgcttgttttaaagtgggctcagcacatagggttcccacgaagctccgaaactctaagtgtttgctgcaattttataaggacttcctgattggtttctcttctccccttccatttctgccttttgttcatttcatcctttcacttctttcccttcctccgtcctcctccttcctagttcatcccttctcttccaggcagccgcggtgcccaaccacacttgtcggctccagtccccagaactctgcctgccctttgtcctcctgctgccagtaccagccccaccctgttttgagccctgaggaggccttgggctctgctgagtccgacctggcctgtctgtgaagagcaagagagcagcaaggtcttgctctcctaggtagccccctcttccctggtaagaaaaagcaaaaggcatttcccaccctgaacaacgagccttttcacccttctactctagagaagtggactggaggagctgggcccgatttggtagttgaggaaagcacagaggcctcctgtggcctgccagtcatcgagtggcccaacaggggctccatgccagccgaccttgacctcactcagaagtccagagtctagcgtagtgcagcagggcagtagcggtaccaatgcagaactcccaagacccgagctgggaccagtacctgggtccccagcccttcctctgctcccccttttccctcggagttcttcttgaatggcaatgttttgcttttgctcgatgcagacagggggccagaacaccacacatttcactgtctgtctggtccatagctgtggtgtaggggcttagaggcatgggcttgctgtgggtttttaattgatcagttttcatgtgggatcccatctttttaacctctgttcaggaagtccttatctagctgcatatcttcatcatattggtatatccttttctgtgtttacagagatgtctcttatatctaaatctgtccaactgagaagtaccttatcaaagtagcaaatgagacagcagtcttatgcttccagaaacacccacaggcatgtcccatgtgagctgctgccatgaactgtcaagtgtgtgttgtcttgtgtatttcagttattgtccctggcttccttactatggtgtaatcatgaaggagtgaaacatcatagaaactgtctagcacttccttgccagtctttagtgatcaggaaccatagttgacagttccaatcagtagcttaagaaaaaaccgtgtttgtctcttctggaatggttagaagtgagggagtttgccccgttctgtttgtagagtctcatagttggactttctagcatatatgtgtccatttccttatgctgtaaaagcaagtcctgcaaccaaactcccatcagcccaatccctgatccctgatcccttccacctgctctgctgatgacccccccagcttcacttctgactcttccccaggaagggaaggggggtcagaagagagggtgagtcctccagaactcttcctccaaggacagaaggctcctgcccccatagtggcctcgaactcctggcactaccaaaggacacttatccacgagagcgcagcatccgaccaggttgtcactgagaagatgtttattttggtcagttgggtttttatgtattatacttagtcaaatgtaatgtggcttctggaatcattgtccagagctgcttccccgtcacctgggcgtcatctggtcctggtaagaggagtgcgtggcccaccaggcccccctgtcacccatgacagttcattcagggccgatggggcagtcgtggttgggaacacagcatttcaagcgtcactttatttcattcgggccccacctgcagctccctcaaagaggcagttgcccagcctctttcccttccagtttattccagagctgccagtggggcctgaggctccttagggttttctctctatttccccctttcttcctcattccctcgtctttcccaaaggcatcacgagtcagtcgcctttcagcaggcagccttggcggtttatcgccctggcaggcaggggccctgcagctctcatgctgcccctgccttggggtcaggttgacaggaggttggagggaaagccttaagctgcaggattctcaccagctgtgtccggcccagttttggggtgtgacctcaatttcaattttgtctgtacttgaacattatgaagatgggggcctctttcagtgaatttgtgaacagcagaattgaccgacagctttccagtacccatggggctaggtcattaaggccacatccacagtctcccccacccttgttccagttgttagttactacctcctctcctgacaatactgtatgtcgtcgagctccccccaggtctacccctcccggccctgcctgctggtgggcttgtcatagccagtgggattgccggtcttgacagctcagtgagctggagatacttggtcacagccaggcgctagcacagctcccttctgttgatgctgtattcccatatcaaaagacacaggggacacccagaaacgccacatcccccaatccatcagtgccaaactagccaacggccccagcttctcagctcgctggatggcggaagctgctactcgtgagcgccagtgcgggtgcagacaatcttctgttgggtggcatcattccaggcccgaagcatgaacagtgcacctgggacagggagcagccccaaattgtcacctgcttctctgcccagcttttcattgctgtgacagtgatggcgaaagagggtaataaccagacacaaactgccaagttgggtggagaaaggagtttctttagctgacagaatctctgaattttaaatcacttagtaagcggctcaagcccaggagggagcagagggatacgagcggagtcccctgcgcgggaccatctggaattggtttagcccaagtggagcctgacagccagaactctgtgtcccccgtctaaccacagctccttttccagagcattccagtcaggctctctgggctgactgggccaggggaggttacaggtaccagttctttaagaagatctttgggcatatacatttttagcctgtgtcattgccccaaatggattcctgtttcaagttcacacctgcagattctaggacctgtgtcctagacttcagggagtcagctgtttctagagttcctaccatggagtgggtctggaggacctgcccggtgggggggcagagccctgctccctccgggtcttcctactcttctctctgctctgacgggatttgttgattctctccattttggtgtctttctcttttagatattgtatcaatctttagaaaaggcatagtctacttgttataaatcgttaggatactgcctcccccagggtctaaaattacatattagaggggaaaagctgaacactgaagtcagttctcaacaatttagaaggaaaacctagaaaacatttggcagaaaattacatttcgatgtttttgaatgaatacgagcaagcttttacaacagtgctgatctaaaaatacttagcacttggcctgagatgcctggtgagcattacaggcaaggggaatctggaggtagccgacctgaggacatggcttctgaacctgtcttttgggagtggtatggaaggtggagcgttcaccagtgacctggaaggcccagcaccaccctccttcccactcttctcatcttgacagagcctgccccagcgctgacgtgtcaggaaaacacccagggaactaggaaggcacttctgcctgaggggcagcctgccttgcccactcctgctctgctcgcctcggatcagctgagccttctgagctggcctctcactgcctccccaaggccccctgcctgccctgtcaggaggcagaaggaagcaggtgtgagggcagtgcaaggagggagcacaacccccagctcccgctccgggctccgacttgtgcacaggcagagcccagaccctggaggaaatcctacctttgaattcaagaacatttggggaatttggaaatctctttgcccccaaacccccattctgtcctacctttaatcaggtcctgctcagcagtgagagcagatgaggtgaaaaggccaagaggtttggctcctgcccactgatagcccctctccccgcagtgtttgtgtgtcaagtggcaaagctgttcttcctggtgaccctgattatatccagtaacacatagactgtgcgcataggcctgctttgtctcctctatcctgggcttttgttttgctttttagttttgcttttagtttttctgtcccttttatttaacgcaccgactagacacacaaagcagttgaatttttatatatatatctgtatattgcacaattataaactcattttgcttgtggctccacacacacaaaaaaagacctgttaaaattatacctgttgcttaattacaatatttctgataaccatagcataggacaagggaaaataaaaaaagaaaaaaaagaaaaaaaaacgacaaatctgtctgctggtcacttcttctgtccaagcagattcgtggtcttttcctcgcttctttcaagggctttcctgtgccaggtgaaggaggctccaggcagcacccaggttttgcactcttgtttctcccgtgcttgtgaaagaggtcccaaggttctgggtgcaggagcgctcccttgacctgctgaagtccggaacgtagtcggcacagcctggtcgccttccacctctgggagctggagtccactggggtggcctgactcccccagtccccttcccgtgacctggtcagggtgagcccatgtggagtcagcctcgcaggcctccctgccagtagggtccgagtgtgtttcatccttcccactctgtcgagcctgggggctggagcggagacgggaggcctggcctgtctcggaacctgtgagctgcaccaggtagaacgccagggaccccagaatcatgtgcgtcagtccaaggggtcccctccaggagtagtgaagactccagaaatgtccctttcttctcccccatcctacgagtaattgcatttgcttttgtaattcttaatgagcaatatctgctagagagtttagctgtaacagttctttttgatcatctttttttaataattagaaacaccaaaaaaatccagaaacttgttcttccaaagcagagagcattataatcaccagggccaaaagcttccctccctgctgtcattgcttcttctgaggcctgaatccaaaagaaaaacagccataggccctttcagtggccgggctacccgtgagcccttcggaggaccagggctggggcagcctctgggcccacatccggggccagctccggcgtgtgttcagtgttagcagtgggtcatgatgctctttcccacccagcctgggataggggcagaggaggcgaggaggccgttgccgctgatgtttggccgtgaacaggtgggtgtctgcgtgcgtccacgtgcgtgttttctgactgacatgaaatcgacgcccgagttagcctcacccggtgacctctagccctgcccggatggagcggggcccacccggttcagtgtttctggggagctggacagtggagtgcaaaaggcttgcagaacttgaagcctgctccttcccttgctaccacggcctcctttccgtttgatttgtcactgcttcaatcaataacagccgctccagagtcagtagtcaatgaatatatgaccaaatatcaccaggactgttactcaatgtgtgccgagcccttgcccatgctgggctcccgtgtatctggacactgtaacgtgtgctgtgtttgctccccttccccttccttctttgccctttacttgtctttctggggtttttctgtttgggtttggtttggtttttatttctccttttgtgttccaaacatgaggttctctctactggtcctcttaactgtggtgttgaggcttatatttgtgtaatttttggtgggtgaaaggaattttgctaagtaaatctcttctgtgtttgaactgaagtctgtattgtaactatgtttaaagtaattgttccagagacaaatatttctagacactttttctttacaaacaaaagcattcggagggagggggatggtgactgagatgagaggggagagctgaacagatgacccctgcccagatcagccagaagccacccaaagcagtggagcccaggagtcccactccaagccagcaagccgaatagctgatgtgttgccactttccaagtcactgcaaaaccaggttttgttccgcccagtggattcttgttttgcttcccctccccccgagattattaccaccatcccgtgcttttaaggaaaggcaagattgatgtttccttgaggggagccaggaggggatgtgtgtgtgcagagctgaagagctggggagaatggggctgggcccacccaagcaggaggctgggacgctctgctgtgggcacaggtcaggctaatgttggcagatgcagctcttcctggacaggccaggtggtgggcattctctctccaaggtgtgccccgtgggcattactgtttaagacacttccgtcacatcccaccccatcctccagggctcaacactgtgacatctctattccccaccctccccttcccagggcaataaaatgaccatggagggggcttgcactctcttggctgtcacccgatcgccagcaaaacttagatgtgagaaaaccccttcccattccatggcgaaaacatctccttagaaaagccattaccctcattaggcatggttttgggctcccaaaacacctgacagcccctccctcctctgagaggcggagagtgctgactgtagtgaccattgcatgccgggtgcagcatctggaagagctaggcagggtgtctgccccctcctgagttgaagtcatgctcccctgtgccagcccagaggccgagagctatggacagcattgccagtaacacaggccaccctgtgcagaagggagctggctccagcctggaaacctgtctgaggttgggagaggtgcacttggggcacagggagaggccgggacacacttagctggagatgtctctaaaagccctgtatcgtattcaccttcagtttttgtgttttgggacaattactttagaaaataagtaggtcgttttaaaaacaaaaattattgattgcttttttgtagtgttcagaaaaaaggttctttgtgtatagccaaatgactgaaagcactgatatatttaaaaacaaaaggcaatttattaaggaaatttgtaccatttcagtaaacctgtctgaatgtacctgtatacgtttcaaaaacaccccccccccactgaatccctgtaacctatttattatataaagagtttgccttataaattt

SEQ ID NO: 589 - DNA, 1344 bp, Homo sapiens
gaaagagaacctgtaaacgctctcggaattatggcggcggtggatatccgagacaatctgctgggaatttcttgggttgacagctcttggatccctattttgaacagtggtagtgtcctggattacttttcagaaagaagtaatcctttttatgacagaacatgtaataatgaagtggtcaaaatgcagaggctaacattagaacacttgaatcagatggttggaatcgagtacatccttttgcatgctcaagagcccattcttttcatcattcggaagcaacagcggcagtcccctgcccaagttatcccactagctgattactatatcattgctggagtgatctatcaggcaccagacttgggatcagttataaactctagagtgcttactgcagtgcatggtattcagtcagcttttgatgaagctatgtcatactgtcgatatcatccttccaaagggtattggtggcacttcaaagatcatgaagagcaagataaagtcagacctaaagccaaaaggaaagaagaaccaagctctatttttcagagacaacgtgtggatgctttacttttagacctcagacaaaaatttccacccaaatttgtgcagctaaagcctggagaaaagcctgttccagtggatcaaacaaagaaagaggcagaacctataccagaaactgtaaaacctgaggagaaggagaccacaaagaatgtacaacagacagtgagtgctaaaggcccccctgaaaaacggatgagacttcagtgagtactggacaaaagagaagcctggaagactcctcatgctagttatcatacctcagtactgtggctcttgagctttgaagtactttattgtaaccttcttatttgtatggaatgcgcttattttttgaaaggatattaggccggatgtggtggctcacgcctgtaatcccagcactttgggaggccatggcgggtggatcacttgaggtcagaagttcaagaccagcctgaccaatatggtgaaaccccgtctctactaaaaatacaaaaattagccgggcgtggtggcgggcgcccatagtcccagctactcgggaggctgagacaggagacttgcttgaacccgggaggtggaggttgccctgagctgattatcatgctgttgcactccagcttgggcgacagagcgagactttgtctcaaaaaagaagaaaagatattattcccatcatgatttcttgtgaatatttgttatatgtcttctgtaacctttcctctcccggacttgagcaacctacacactcacatgtttactggtagatatgtttaaaagcaaaataaaggtatttgtata

SEQ ID NO: 590 - DNA, 5569 bp, Homo sapiens
agaacgagttccggtctggccgaggcttgtctcctaaaaatagccccggtgtggggatccgtgcgcggatgtcccggcgagtcccgggctgaaagaggcggctccgggcggcgcgaagcgctggtggcgggcccgggctgcggcgtgtgcgcgcccgccagctgctccggagatacggaattgcattttgtgaaaaaagaacaagaattttctgcaaggatcatatctaagtgcactttttgctgatacttcatttctaatcttgtagaaaatttcagctgtagcccttggactagaagctgaaataacagaagctgtgtacgatgcattagggtattgaagaaaattaacttttgaattaaatatttggaatataaggaaataaggaaagttgactgaaaatggggcggaagaaaatacaaatcacacgcataatggatgaaaggaaccgacaggtcacttttacaaagagaaagtttggattaatgaagaaagcctatgaacttagtgtgctctgtgactgtgaaatagcactcatcattttcaacagctctaacaaactgtttcaatatgctagcactgatatggacaaagttcttctcaagtatacagaatataatgaacctcatgaaagcagaaccaactcggatattgttgaggctctgaacaagaaggaacacagagggtgcgacagcccagaccctgatacttcatatgtgctaactccacatacagaagaaaaatataaaaaaattaatgaggaatttgataatatgatgcggaatcataaaatcgcacctggtctgccacctcagaacttttcaatgtctgtcacagttccagtgaccagccccaatgctttgtcctacactaacccagggagttcactggtgtccccatctttggcagccagctcaacgttaacagattcaagcatgctctctccacctcaaaccacattacatagaaatgtgtctcctggagctcctcagagaccaccaagtactggcaatgcaggtgggatgttgagcactacagacctcacagtgccaaatggagctggaagcagtccagtggggaatggatttgtaaactcaagagcttctccaaatttgattggagctactggtgcaaatagcttaggcaaagtcatgcctacaaagtctccccctccaccaggtggtggtaatcttggaatgaacagtaggaaaccagatcttcgagttgtcatccccccttcaagcaagggcatgatgcctccactaaatacccaaaggatcagtagttctcaagccactcaacctcttgctaccccagtcgtgtctgtgacaaccccaagcttgcctccgcaaggacttgtgtactcagcaatgccgactgcctacaacactgattattcactgaccagcgctgacctgtcagcccttcaaggcttcaactcgccaggaatgctgtcgctgggacaggtgtcggcctggcagcagcaccacctaggacaagcagccctcagctctcttgttgctggagggcagttatctcagggttccaatttatccattaataccaaccaaaacatcagcatcaagtccgaaccgatttcacctcctcgggatcgtatgaccccatcgggcttccagcagcagcagcagcagcagcagcagcagcagccgccgccaccaccgcagccccagccacaacccccgcagccccagccccgacaggaaatggggcgctcccctgtggacagtctgagcagctctagtagctcctatgatggcagtgatcgggaggatccacggggcgacttccattctccaattgtgcttggccgacccccaaacactgaggacagagaaagcccttctgtaaagcgaatgaggatggacgcgtgggtgacctaaggcttccaagctgatgtttgtacttttgtgttactgcagtgacctgccctacatatctaaatcggtaaataaggacatgagttaaatatatttatatgtacatacatatatatatccctttacatatatatgtatgtgggtgtgagtgtgtatgtgtgggtgtgtgttacatacacagaatcaggcacttacctgcaaactccttgtaggtctgcagatgtgtgtcccatggcagacaaagcaccctgtaggcacagacaagtctggcacttccttggactacttgtttcgtaaagataaccagtttttgcagagaaacgtgtacccatatataattctcccacactagcttgcagaaacctagagggccccctacttgttttatttaactgtgcagtgactgtagttacttaagagaaaatgctttgtagaacagagcagtagaaaagcaggaaccaagaaagcaatactgtacataaaatgtcatttatattttccaacctggcatgggtgtctgttgcaaaggggtgcatgggaaagggctgttgatattaaaaacaaacaaaacaaaaaagccccacacataactgttttgcacgtgcaaaaatgtattgggtcaagaagtgatctttagctaataaagaaagagaatagaaaacacgcatgagatattcagaaaatactagcctagaaatatagagcattaacaaagtaaaattaatatattaagttataattggaatatgtcagaagtttctttttacattcatatcttaaaaattaaagaaactgattttagctcatgtatattttatatgaaagaaaacacccttatgaattgatgactatatataaaattatattcactacttttgaacacattctgctatgaattatttatataagccaaagctatatgttgtaacttttttttagagaatagctttatcttggtttaactctttagttttattttaagaggggaaaacaaaaatatcttgcaagcagaaccttggaaaaaaaaagccatgaacacttattctaaatgtaaattaaaagttgagccaaactctttgtgtatatagcatcttaaatatattatcacctttgatgtaagtacctatgtattgtatggtcaccagattaaaaagtatatttttgtggattgccgccaatctggggggaaaaggcgaggtcctttattaagtattcactgtttaatatttactattttgttaaatatactgtactttggattttaattattagcccagttttttcagaggattgtataaaggggtttctcccctcactggtggtgaatgtgtgatgttacattgtaatctttgtgctgtatgggttgagcatcattatatattttgtatgtgtacataaatagcaaagtggcaaaaaaaattggtgttaagttcatcctgcataagtataaaatgtgttgtaacagattttgtaaggcattatttaaaacttgccttttgtgaggaaaaaatgtagtagaaaaagctgacctaatttaattaatattagagaaaatggcaaaatagtagatgagcacaaaggttttataagtggtaaatgattaggggaaaataatcatggggaaagggatcttttttccttgaccctctgaaaacagaacgatgcagctggttacaaaatcctaccgttatcagctcttctgcacattgcagtgatgctttggtatgcggggagaaacactcttagggtgctggtccttggcatgactcttgccattctaattggaattagtgccaccctcagcttggattttgaacaaggccttattctttcaggaagacaactaatggatgatagcaagttcatccacttactgggcttgtgccatgagcaaaattcaaagtcctgtatatctttcattgtagatttttaaatactccttttcctaaaaaactcaagggtttaaaaattgctattttatattttaaatgatattgagcagctacctacaatttctatgtacattttgttcccccccccccaccccccccccaaattacgttccttttgacattttcctcatctgctgtttgtgacaagtcatcagccagatttcctgactgacacataggtatgatcagtgcaggagagacctgcgcaccacaggctgcaaactggaggttctgttctcatggcagtttgggcagtaacttttgagagaggccaaaaaaaggaggatgacatgctgtctcctctcttcagtatagacattaggctcttattcagaaaggatttttctttaaaaatgtacttactttactgaactacttacaggcacatttcttcataaggccacacctaatccaaacaagacagtctcccaacactgaagttccaaaataatccttaccactttgtaaaccatttatagctttgaaagtgttaagtgattccttcgttattatttatgcatgttcatgaacttctgctgtacattggaataggagttaacacattcacatttactgtctattttcttgtgtgccttatgagatggcttttctgactgtatctcaatagtctttctttctatgcaggtttataatcagtacaactactgttttctaaaatactactactcaaggctcggagtttgtatttaaattacactgaccaagtaacaatgtattccatttcaggaactgaatatttgactgttaacctttttcccatacgtccagtgtggcatggagcatatggacttgacagacatctctcacccagacgcccacgtgtgaacacacccacatccacatctctgggtggaaaccagcctagagaggggacgacgctaatggtgttgctttagaaccgtcttttcttacccttttagactcgtgttttgtatgagacaccattgcaagaaaattttatccctccagaagtattttattactaaagaacaaaagcaaaaaaagcttaaattgcactggttaaagtacagtttccaacagctgtccttcctcagtactctaatggccactccaccgcgagtggaagtcactgttgtgtgtacacaggtggtcccaatcaaaactccatcttttgagcccaattatgtccattttgttatagactaaatcaggggtttgttctacaagaacaatacatgttttaccctttcctttaactagaaggataactagtaatgcatcaacataatttctgtattaaccatcatgcgcacaagaaatacatagtaaataaggaagctgaaaactcctggcattggatcttaagctagatgattagaatgtgaaaaagattttacaaatgtaaaacttctatttctctgtagaaactttcttcactttgctgtgcaagaagacactgctttgctatatttaaaatggcttttttaaaagagatttatgtatttggtaaatgtttgtagtcaacagttcacacaagaagctgtacacggtttgatcatgtaaaaccgtttggcggcacaagctggactttgttgccatccttgagatgaaccttttaagaaaaataagttaatctcaatttttccctgaatgtgttgtttttcttcattatacaataaatataatagtgaactttttatcaaatggtgaagacaatgctaaaaaaaaaaaaaaaaa

SEQ ID NO: 591 - DNA, 1978 bp, Homo sapiens
gtacgcggggcgtctggaacttaaaggggcagcgtaccttggccgtcccgttccacaacaaggtcccttctgcggtctcaaaggcttataagcaagggcgggggcagagggctaaagaagggagtttttgcggcccgagtgggtaatgcgtggaggactcccccaactcgtctctcaaggaaaagggggttcagaaagggagagagttcttccccctctcctgcctgggtgtcgctccaccagcctcctggccgtcgcgccccctcctcactgcgccacccccgggtgtgcctccttccctgcgtctcacacagcccctttcttgtccgcaaagactgaggagcggggagggcgggccctctgacaccggaacaggagccgtgcggcgtccggtttcagcagggaaggcttaggcgggcgtcccaacctccgggcttccggtgccgtttcccggttcgctcggccgcggtcgctatggaggagccggagatgcagctcaaggggaagaaagcgccgtgaagaacctggtggacagcagcgtctacttccgcagcgtggagggtctgctcaaacaggccatcagcatccgggaccatatgaatgccagtgcccagggccacagcccggaggaaccacccccgccctcctcagcctgatcctggaagagactcggggccccccagcctccgccaacccagacaaagatcattccactcagcctgggacgatggggaggaaaaaaatccagatctcccgcatcctggaccaaaggaatcggcaggtgacgttcaccaagcggaagttcgggctgatgaagaaggcctatgagctgagcgtgctctgtgactgtgagatagccctcatcatcttcaacagcgccaaccgcctcttccagtatgccagcacggacatggaccgtgtgctgctgaagtacacagagtacagcgagccccacgagagccgcaccaacactgacatcctcgagacgctgaagcggaggggcattggcctcgatgggccagagctggagccggatgaagggcctgaggagccaggagagaagtttcggaggctggcaggcgaagggggtgatccggccttgccccgaccccggctgtatcctgcagctcctgctatgcccagcccagatgtggtatacggggccttaccgccaccaggctgtgaccccagtgggcttggggaagcactgcccgcccagagccgcccatctcccttccgaccagcagcccccaaagccgggcccccaggcctggtgcaccctctcttctcaccaagccacctcaccagcaagacaccacccccactgtacctgccgacggaagggcggaggtcagacctgcctggtggcctggctgggccccgagggggactaaacacctccagaagcctctacagtggcctgcagaacccctgctccactgcaactcccggacccccactggggagcttccccttcctccccggaggccccccagtgggggccgaagcctgggcgaggagggtcccccaacccgcggcgcctccccgccgacccccccagtcagcatcaagtctgagcgcctctctccggcccccgggggccccggcgactttcctaagaccttcccctatcccttgctcctcgcccggtccctggcagagcctctgcggcctgggcccgccctgcgccggctgcccttggccgacggctggccccggtaggagatcacccggtggcaccagcccagagcgctcgccaggtacggcgagggcacgtggggaccccacctccctccaggcctcttcagagaagacccaacagtgacgcccccctccgcggtgggggcttggaggtgggcggctggactcaatccaccctggggggctcctttccttcttcctatttgtgtgtatatccacaaataaaacgcgcgtggcgtccgtggaccagaaaaaaaaaaaaaaaaaaaaaaaaaaa

SEQ ID NO: 592 - DNA, 6458 bp, Homo sapiens
gcgatgtttcaaacgctgtgagctgttctccttttcccattcgtcttctgtcacttccttcctggacgcagttttctggacgagtctggttacttttaatccgaccggccgctgagagccactttctcctcctcctcctcctcctccttctcttcctcctccttcttcctcctcctcctcctcttccgagcggcctcggcgcgcgcgaatgcgcggccccgcgccccccccctcgcgcgcgctcccctcgcgcgcgcgcacacacgcacacatcgtctccagctctctgctcgctctgctcgcagtcacagacacttgagcacacgcgtacacccagacatcttcgggctgctattggattgactttgaaggttctgtgtgggtcgccgtggctgcatgtttgaatcaggtggagaagcacttcaacgctggacgaagtaaagattattgttgttattttttttttctctctctctctctcttaagaaaggaaaatatcccaaggactaatctgatcgggtcttccttcatcaggaacgaatgcaggaatttgggaactgagctgtgcaagtgctgaagaaggagatttgtttggaggaaacaggaaagagaaagaaaaggaaggaaaaaatacataatttcagggacgagagagagaagaaaaacggggactatggggagaaaaaagattcagattacgaggattatggatgaacgtaacagacaggtgacatttacaaagaggaaatttgggttgatgaagaaggcttatgagctgagcgtgctgtgtgactgtgagattgcgctgatcatcttcaacagcaccaacaagctgttccagtatgccagcaccgacatggacaaagtgcttctcaagtacacggagtacaacgagccgcatgagagccggacaaactcagacatcgtggagacgttgagaaagaagggccttaatggctgtgacagcccagaccccgatgcggacgattccgtaggtcacagccctgagtctgaggacaagtacaggaaaattaacgaagatattgatctaatgatcagcaggcaaagattgtgtgctgttccacctcccaacttcgagatgccagtctccatcccagtgtccagccacaacagtttggtgtacagcaaccctgtcagctcactgggaaaccccaacctattgccactggctcacccttctctgcagaggaatagtatgtctcctggtgtaacacatcgacctccaagtgcaggtaacacaggtggtctgatgggtggagacctcacgtctggtgcaggcaccagtgcagggaacgggtatggcaatccccgaaactcaccaggtctgctggtctcacctggtaacttgaacaagaatatgcaagcaaaatctcctcccccaatgaatttaggaatgaataaccgtaaaccagatctccgagttcttattccaccaggcagcaagaatacgatgccatcagtgtctgaggatgtcgacctgcttttgaatcaaaggataaataactcccagtcggctcagtcattggctaccccagtggtttccgtagcaactcctactttaccaggacaaggaatgggaggatatccatcagccatttcaacaacatatggtaccgagtactctctgagtagtgcagacctgtcatctctgtctgggtttaacaccgccagcgctcttcaccttggttcagtaactggctggcaacagcaacacctacataacatgccaccatctgccctcagtcagttgggagcttgcactagcactcatttatctcagagttcaaatctctccctgccttctactcaaagcctcaacatcaagtcagaacctgtttctcctcctagagaccgtaccaccaccccttcgagatacccacaacacacgcgccacgaggcggggagatctcctgttgacagcttgagcagctgtagcagttcgtacgacgggagcgaccgagaggatcaccggaacgaattccactcccccattggactcaccagaccttcgccggacgaaagggaaagtccctcagtcaagcgcatgcgactttctgaaggatgggcaacatgatcagattattacttactagtttttttttttttcttgcagtgtgtgtgtgtgctataccttaatggggaaggggggtcgatatgcattatatgtgccgtgtgtggaaaaaaaaaaagtcaggtactctgttttgtaaaagtacttttaaattgcctcagtgatacagtataaagataaacagaaatgctgagataagcttagcacttgagttgtacaacagaacacttgtacaaaatagattttaaggctaacttcttttcactgttgtgctcctttgcaaaatgtatgttacaatagatagtgtcatgttgcaggttcaacgttatttacatgtaaatagacaaaaggaaacatttgccaaaagcggcagatctttactgaaagagagagcagctgttatgcaacatatagaaaaatgtatagatgcttggacagacccggtaatgggtggccattggtaaatgttaggaacacaccaggtcacctgacatcccaagaatgctcacaaacctgcaggcatatcattggcgtatggcactcattaaaaaggatcagagaccattaaaagaggaccatacctattaaaaaaaaatgtggagttggagggctaacatatttaattaaataaataaataaatctgggtctgcatctcttattaaataaaaatataaaaatatgtacattacattttgcttattttcatataaaaggtaagacagagtttgcaaagcatttgtggctttttgtagtttacttaagccaaaatgtgtttttttccccttgatagcttcgctaatattttaaacagtcctgtaaaaaaccaaaaaggactttttgtatagaaagcactaccctaagccatgaagaactccatgctttgctaaccaagataactgttttctctttgtagaagttttgtttttgaaatgtgtatttctaattatataaaatattaagaatcttttaaaaaaatctgtgaaattaacatgcttgtgtatagctttctaatatatataatattatggtaatagcagaagttttgttatcttaatagcgggaggggggtatatttgtgcagttgcacatttgagtaactattttctttctgttttcttttactctgcttacattttataagtttaaggtcagctgtcaaaaggataacctgtggggttagaacatatcacattgcaacaccctaaattgtttttaatacattagcaatctattgggtcaactgacatccattgtatatactagtttctttcatgctatttttattttgttttttgcatttttatcaaatgcagggcccctttctgatctcaccatttcaccatgcatcttggaattcagtaagtgcatatcctaacttgcccatattctaaatcatctggttggttttcagcctagaatttgatacgctttttagaaatatgcccagaatagaaaagctatgttggggcacatgtcctgcaaatatggccctagaaacaagtgatatggaatttacttggtgaataagttataaattcccacagaagaaaaatgtgaaagactgggtgctagacaagaaggaagcaggtaaagggatagttgctttgtcatccgtttttaattattttaactgacccttgacaatcttgtcagcaatataggactgttgaacaatcccggtgtgtcaggacccccaaatgtcacttctgcataaagcatgtatgtcatctattttttcttcaataaagagatttaatagccatttcaagaaatcccataaagaacctctctatgtccctttttttaatttaaaaaaaatgactcttgtctaatattcgtctataagggattaattttcagaccctttaataagtgagtgccataagaaagtcaatatatattgtttaaaagatatttcagtctaggaaagattttccttctcttggaatgtgaagatctgtcgattcatctccaatcatatgcattgacatacacagcaaagaagatataggcagtaatatcaacactgctatatcatgtgtaggacatttcttatccattttttctcttttacttgcatagttgctatgtgtttctcattgtaaaaggctgccgctgggtggcagaagccaagagaccttattaactaggctatatttttcttaacttgatctgaaatccacaattagaccacaatgcacctttggttgtatccataaaggatgctagcctgccttgtactaatgttttatatattaaaaaaaaaaaatctatcaaccatttcatatatatcccactactcaaggtatccatggaacatgaaagaataacatttatgcagaggaaaaacaaaaacatccctgaaaatatacacactcatacacacacacgcacaggggaataaaataagaaaatcattttcctcaccatagacttgatcccatccttacaacccatccttctaacttgatgtgtataaaatatgcaaacatttcacaaatgttctttgtcatttcaaaatactttagtatatcaatatcagtagataccagtgggtgggaaagggtcattacatgaaaatatgaagaaatagccatattagttttttaacctgcaatttgcctcagcaacaaagaaaaagtgaatttttaatgctgaagataaagtaagctaaagtaccagcagaagccttggctatttatagcagttctgacaatagttttataagaacatgaagagaacagaatcacttgaaaatggatgccagtcatctcttgttcccactactgaattcttataaagtggtggcaagatagggaagggataatctgagaatttttaaaagatgatttaatgagaagaagcacaattttgattttgatgagtcactttctgtaaacaatcttggtctatctttacccttataccttatctgtaatttaccatttattgtatttgcaaagctagtatggtttttaatcacagtaaatcctttgtattccagactttagggcagagccctgagggagtattattttacataacccgtcctagagtaacattttaggcaacattcttcattgcaagtaaaagatccataagtggcattttacacggctgcgagtattgttatatctaatcctattttaaaagatttttggtaatatgaagcttgaatactggtaacagtgatgcaatatacgcaagctgcacaacctgtatattgtatgcattgctgcgtggaggctgtttatttcaacctttttaaaaattgtgttttttagtaaaatggcttattttttcccaaaggtggaatttagcattttgtaatgatgaatataaaaatacctgtcatccccagatcatttaaaagttaactaaagtgagaatgaaaaaacaaaattccaagacactttttaaaagaatgtctgccctcacacacttttatggatttgtttttcttacatacccatcttttaacttagagatagcattttttgccctctttattttgttgtttgtttctccagagagtaaacgctttgtagttctttctttaaaaaacattttttttaaagaagaagaagccacttgaaccctcaataaaggctgttgcctaagcatggcatacttcatctgttctcatttgtgccatctgccgtgatgtcgtcacttttatggcgttaatttcctgccactacagatcttttgaagattgctggaatactggtgtctgttagaatgcttcagactacagatgtaattaaaggcttttcttaatatgttttaaccaaagatgtggagcaatccaagccacatatcttctacatcaaatttttccattttggttattttcataatctggtattgcattttgccttccctgttcatacctcaaattgattcatacctcagtttaattcagagaggtcagttaagtgacggattctgttgtggtttgaatgcagtaccagtgttctcttcgagcaaagtagacctgggtcactgtaggcataggacttggattgcttcagatggtttgctgtatcatttttcttctttttcttttcctggggacttgtttccattaaatgagagtaattaaaatcgcttgtaaatgagggcatacaagcatttgcaacaaatattcaaatagaggctcacagcggcataagctggactttgtcgccactagatgacaagatgttataactaagttaaaccacatctgtgtatctcaagggacttaattcagctgtctgtagtgaataaaagtgggaaattttcaaaagtttctcctgctggaaataaggtataatttgtattttgcagacaattcagtaaagttactggctttcttagtga

SEQ ID NO: 593 - DNA, 5888 bp, Homo sapiens
atatcaacaacagccgaggcggctcaggcgctcggccccggttccccgcttgcctgccgcccgcctgctggcccccgcgcccacgacgggggcccaggcctcacggcgccgcccagggcccgcgcggacgccggcctcatttattattctccccgcccggagctgcggcttcccggtgttgaagatcccccggaccaggggcgagggctacccgctctttgccgtgacaacaccgttcccccagccgggctggaggctgtgcagaaggtatcctgcagaccatgaactgagcactgttcccagaccgttcatgagcacagtgtaaggtgtgccgagacccaccacccagcgagcccctcccctccgtagcactgaggacccccggagaagatggggaggaaaaagattcagatccagcgaatcaccgacgagcggaaccgacaggtgactttcaccaagcggaagtttggcctgatgaagaaggcgtatgagctgagcgtgctatgtgactgcgagatcgcactcatcatcttcaaccactccaacaagctgttccagtacgccagcaccgacatggacaaggtgctgctcaagtacacggagtacaatgagccacacgagagccgcaccaacgccgacatcatcgagaccctgaggaagaagggcttcaatggctgcgacagccccgagcccgacggggaggactcgctggaacagagccccctgctggaggacaagtaccgacgcgccagcgaggagctcgacgggctcttccggcgctatgggtcaactgtcccggcccccaactttgccatgcctgtcacggtgcccgtgtccaatcagagctcactgcagttcagcaatcccagcggctccctggtcaccccttccctggtgacatcatccctcacggacccgcggctcctgtccccccagcagccagcactacagaggaacagtgtgtctcctggcctgccccagcggccagctagtgcgggggccatgctggggggtgacctgaacagtgctaacggagcctgccccagccctgttgggaatggctacgtcagtgctcgggcttcccctggcctcctccctgtggccaatggcaacagcctaaacaaggtcatccctgccaagtctccgcccccacctacccacagcacccagcttggagcccccagccgcaagcccgacctgcgagtcatcacttcccaggcaggaaaggggttaatgcatcacttgactgaggaccatttagatctgaacaatgcccagcgccttggggtctcccagtctactcattcgctcaccaccccagtggtttctgtggcaacgccgagtttactcagccagggcctccccttctcttccatgcccactgcctacaacacagattaccagttgaccagtgcagagctctcctccttaccagcctttagttcacctggggggctgtcgctaggcaatgtcactgcctggcaacagccacagcagccccagcagccgcagcagccacagcctccacagcagcagccaccgcagccacagcagccacagccacagcagcctcagcagccgcaacagccacctcagcaacagtcccacctggtccctgtatctctcagcaacctcatcccgggcagccccctgccccacgtgggtgctgccctcacagtcaccacccacccccacatcagcatcaagtcagaaccggtgtccccaagccgtgagcgcagccctgcgcctccccctccagctgtgttcccagctgcccgccctgagcctggcgatggtctcagcagcccagccgggggatcctatgagacgggagaccgggatgacggacggggggacttcgggcccacactgggcctgctgcgcccagccccagagcctgaggctgagggctcagctgtgaagaggatgcggcttgatacctggacattaaagtgacgattcccactcccctcctctcagcctccctgatgaagagttgacaatctcaccgcccgcccttccctgccccgggctcctcccgctcgacccccacttcctttcttgtgcttcgtgtcctgttgacggttacatttgtgtataattattatattattattattattattatattttttttaatttggattctcgctttggagagggggatgctctcatcccctctttctgtaccccccaccattttcactggctggggggctctctttttcgcgggaaggggggacactttgcacgttgtacacatatgctgcaggaagggggtggggggcccaataaggcctttgggaaaggacaggtgccgagccctgcatgtggagccctcccaccccacccccagatagagggaaataaccaaaaaactaccaaacaacagaaacccacactctagactgaaaccccaaagtgggcttgatgggtgggtttgtgtttcaaggggaaagtgaggcagaggttctgaaaagggtctctgtttttgtgttcatgtagccataggcacatggagcagaatacttaagcctggcccccaaatgcccctgcacacacacgtgccacacctgcgctgattcttgtgtgtgctgcacccccaaggtgtgtgggtgctggctgagctttgggccgggaaggcagcctgggaatctgaggctggagacaggggtttgaggtgggggcctctctggaagcacatttggagggaaagacaagagagccatgaggagagggctgaggagggcagaagggctaggcagggggcaaattgagcccctcccttccccagtttttctctaagatatacagtgcaatagctccccacccctcagttgacgccagccctgtaaagctggccacagtgtgcagggagaatggggagagggtcttcagtgaggtggctggggcgagagtcggcctggacttccctggggtgctccaggccagagctctttcattggggcgagtgtggtgaggggacgtccttggtcttgcacgcacactacctgggggagtcaacactgggatggtctgtggggtgggagggcctacggatgggtccgtagaggtcccacctccctcattcctccttggcccctctccctagcttctcctgttagctccttctgctcctgaccccacctccttgctcttggcgcccctattgtctctggctacctccttgtcccaccacctccaggctgcatcccaccttccctcttggctactgtaattgtaaatagcgacctttggaaaacgttagcggtgtaacagtccaggaaactgtttttttttgttgttgttgtattgatatgaaatgagattctatttttgtcaaagtatattgtaataataatgactcaaacggcccgtactgtacagacgagattcttctgctgttgttcttgctcccctcccctcctctgagtccgcccctccctgctgcctcctcagtggggcagtgggcaaggggcccaggggcagccgaagcacggggtcctgagacctcaggcaggattggagatcaaaccagagggggcaggcccccagcctgctctctaggatcaccccccgccctaaggggcctggcctggggtgacgtggccaggcagactgtctgccccactccttcacacaagcccagctcctctgcccaaggggtgcggcgcccccttggggtttcctcccagttggagagtagagttaagacaaggcccagttttgtgttagtcgaccgtctttgcccacctctatgacccagcctcttgcagtattcccatacttgatgcagggaaggaaccagaagcagaggggcctctacgcaggtacacacgtgtacctgagtgtgttcatgagggcatctggtgtttatgtgtctgagtgtagctttgtatttatgtgtgtgtgtgtgtgtatgtctgattgcacgggtgtacttttgtatttatgtgtgtgtgtggttgcacgggtgtgcctctgtgtgtctctgaccctggctgggtgtgtgtgcaaatctgtgtgactggagctctaggggcatctctgtgtctgagtgtgcctggtgtgtgtttacaaagggagagttggctgctccagctccacagccctgggaccccaactcctgtcttccctgctcctttccctgtgttcaccctcagctctgacacattgaactgcagttggggggattggcagttagccctctgtgcttctccctgcagccctacctctgccaaggtctctccctccagggacctctgcttccacccacatatgtccacttagtcacccacacttgacacagttcctggagtaccctcttcccccaaccccagacctgctttcagagcaaaactcaagtccctcttcctccgtgaagcttctccctcagctgagcagtgatcacttactcactcttaaccccaatccgctgactgggtggggacagcacgtccagccttcccacctctcctgcaggcttctagacggagtttcaaaaactgatgagcctcgatccagggcttgaaagaagccagggtgtaatcttgttcatgcatgcgtccccagagcctcgcccagtgcctggcacatagtaggcactcaataaatgctgaatgggtgaatagttgaatgataggtgctcaataaatgaatgaatggccttcccttctcaggctattcccaacattagtctgcccacctttctaggctgggcttggccaccattaaacacggggtgggggtgagggcccctgcaattcacggtgcaatattcaccagttttgccctctgcctcataaaggcaaacctggcttttgattaccatgtgtggatgtttcagtgtcctttcttctctgtccctggggatggggtggtctgtgaatatgtgacatttctgcagttcagtatccgaaggtttctcttgggggtaggggctcctgggcggccagatgaatgggtccctgggaacccagacctcagatgaggacttaatgtcttcttcctctcaagccaaattcgcctccacccactccctctgaagaactgggcatttgccaaagtaaccactggagtcatctaatggccctccccctccccaggtttcccacagctttcagggacagtgggcaagaggacacccccccccaccacctcagtggaacacaccattctccccccctcaacagcacactcagtgcagcaagactgacccctgaccccctcccagccctccctaccttggacaggaaggaagtaatgcaccttctcttgctgattatttatttgtttggagagacagaaatgtaaaagtgtatctagaaatatctatatctctatatatttttaactgactctttggaatcccctggggtggggtgaggggtaagtttaggctttcgcggaggggaggagacatggagcctgggaactccttgttctcccctctgctgcctctccccaccccttaaagcagttggtagaaggaatggtatttgtatggggggagggaggctggaatggagaatctggattctctcctcttccccattctccagagggagggaggtggtgaggaagaggaagggaggggcaggatgggccatggaggtgccccacccccacacctgacaatcacccacactcctggggctcttcctgggtcctggggcagggcgagtccaagtgtgaggctgttgatttgttttcaatatttcttttcgtgctgtatggtgatgctttcttagtattctacacaataagaaaagacaaagtcctcgagattcttatgagttttgtttgaaaactctttcactatatttgttgtaaagaggtttactattaaaagaaaaagaatacacgtttctgataaaaaaaaaaaaaaa

SEQ ID NO: 594 - DNA, 3507 bp, Homo sapiens
gaagccagacagctggctcgagcctctcctgctcagcaccatggctaagacccctagtgaccatctgctgtccaccctggaggagctggtgccctatgacttcgagaagttcaagttcaagctgcagaacaccagtgtgcagaaggagcactccaggatcccccggagccagatccagagagccaggccggtgaagatggccactctgctggtcacctactatggggaagagtacgccgtgcagctcaccctgcaggtcctgcgggccatcaaccagcgcctgctggccgaggagctccacagggcagccattcaggaatattccacacaagaaaacggcacagatgattccgcagcgtccagctccctgggggagaacaagcccaggagcctgaagactccagaccaccccgaggggaacgaggggaacggccctcggccgtacgggggcggagctgccagcctgcggtgcagccagcccgaggccgggagggggctgtcgaggaagcccctgagcaaacgcagagagaaggcctcggagggcctggacgcgcagggcaagcctcggacccggagcccggccctgccgggcgggagaagccccggcccctgcagggcgctagaggggggccaggccgaggtccggctgcgcagaaacgccagctccgcggggaggctgcaggggctggcggggggcgccccggggcagaaggagtgcaggcccttcgaagtgtacctgccctcgggaaagatgcgacctagaagccttgaggtcaccatttctacaggggagaaggcgcccgcaaatccagaaattctcctgactctagaggaaaagacagctgcgaatctggactcggcaacagaaccccgggcaaggcccactccggatggaggggcatctgcggacctgaaggaaggccctggaaatccagaacattcggtcaccggaaggccaccagacacggctgcgagtccccgctgccacgcccaggaaggagacccagttgacggtacctgtgtgcgtgattcctgcagcttccccgaggcagtttctgggcacccccaggcctcaggcagccgctcacctggctgcccccggtgccaggactcccatgaaaggaagagcccgggaagcctaagcccccagcccctgccacagtgtaagcgccacctgaagcaggtccagctgctcttctgtgaggatcacgatgagcccatctgcctcatctgcagtctgagtcaggagcaccaaggccaccgggtgcgccccattgaggaggtcgccctggaacacaagaagaaaattcagaagcagctggagcatctgaagaagctgagaaaatcaggggaggagcagcgatcctatggggaggagaaggcagtgagctttctgaaacaaactgaagcgctgaagcagcgggtgcagaggaagctggagcaggtgtactacttcctggagcagcaagagcatttctttgtggcctcactggaggacgtgggccagatggttgggcagatcaggaaggcatatgacacccgcgtatcccaggacatcgccctgctcgatgcgctgattggggaactggaggccaaggagtgccagtcagaatgggaacttctgcaggacattggagacatcttgcacagggctaagacagtgcctgtccctgaaaagtggaccactcctcaagagataaaacaaaagatccaactcctccaccagaagtcagagtttgtggagaagagcacaaagtacttctcagaaaccctgcgttcagaaatggaaatgttcaatgttccagagctgattggcgctcaggcacatgctgttaatgtgattctggatgcagaaaccgcttaccccaacctcatcttctctgatgatctgaagagtgttagacttggaaacaagtgggagaggctgcctgatggcccgcaaagatttgacagctgtatcattgttctgggctctccgagtttcctctctggccgccgttactgggaggtggaggttggagacaagacagcatggatcctgggagcctgcaagacatccataagcaggaaagggaacatgactctgtcgccagagaatggctactgggtggtgataatgatgaaggaaaatgagtaccaggcgtccagcgttcccccgacccgcctgctaataaaggagcctcccaagcgtgtgggcatcttcgtggactacagagttggaagcatctccttttacaatgtgacagccagatcccacatctatacattcgccagctgctctttctctgggccccttcaacctatcttcagccctgggacacgtgatggagggaagaacacagctcctctgactatctgtccagtgggtggtcaggggcctgactgaatgcccaacactgcatctctcttcctgcttctggccttgtatcttgcattcacactcaatagtcacggaatgccgactaggtgctagctgctatgggaaatgcaaaaataacaaaatagttactgtgcccacggagcctacccgattatagcagaggtaagttaggaacgaacatgttagtcaatccgggtgaagacatgtactgatgacacaccatggatttcagaggaggaagtacggagtcgttgcataatccgcccctggtgggtggcactctcaggtgctcctgaacagaagatttggccctcattttccctcagaaccccacggcaaggatatatgtccccttgttctctctgcttctgtcttgaggatatgggaagcctagagaaacgcaagcagactggattgggatagaagtatttgtgtacctggattaatgaactatgattttttttttttttttttgagaccaaatcttgctctgtggcccaggctggagtgcagtggcacgatctcagctcactgcaacctccacctcccaggttcaagcgattctcctgcctcagcctcctgagcagctgggattacaggtgcgtgccaccacaccaggctggttttcttgtatttttagtagagacgggggtttcaccatgttagccaggctggtctcgaactcctgacctcaggtgatccacccgcctcagcctcccaaagtgctgggattacaggcatgagccactgtgcccggcctatgattcttttttttttttttttttgagacaaagttttgctcttgtcacccaggctggagtgcagtggtgcaatcttggctcgcaacctccgcctcccaggttcaagagattctcctgcctcagcctccgaagtagctgggattacaggcgcccgccaccatgcccggctaattttttgcatttttagtagacatgaggtttcatcatgttggccaggccggtctcaaactcctgacctcaggtgatgcacccacctcagcctcccaaagtgcagggattacaggcatgagccaccatgccgggccatgattcttaagagaattgactgggcctcatgaataaaaaaattagaaaatctaaaaaaaa

SEQ ID NO: 595 - DNA, 3198 bp, Homo sapiens
atttgaggtgttctgaccagaagaagacagagcggatgatcattcattcaccacgttgacaacctcgcctgtgattgacagctggagtggcagaaagccatgagatttggtagttgggtctgaggggcgctcttttttttccttttctttctttctttctttttttttttttaaactgatttttgggggagagaagatctgcttttttttgcccccgctgctgtcttggaaacggagcgcttttatgctcagtgactcgggcgctttgcttcaggtcccgtagaccgaagatctgggaccagtagctcacgttgctggagacgttaagggatttttcgtcgtgcttttttttttttttttttttttttccgggggagtttgaatatttgtttcttttcacactggccttaaagaggatatattagaagttgaagtaggaagggagccagagaggccgatggcgcaaaggtacgacgatctaccccattacgggggcatggatggagtaggcatcccctccacgatgtatggggacccgcatgcagccaggtccatgcagccggtccaccacctgaaccacgggcctcctctgcactcgcatcagtacccgcacacagctcataccaacgccatggcccccagcatgggctcctctgtcaatgacgctttaaagagagataaagatgccatttatggacaccccctcttccctctcttagcactgatttttgagaaatgtgaattagctacttgtaccccccgcgagccgggggtggcgggcggggacgtctgctcgtcagagtcattcaatgaagatatagccgtgttcgccaaacagattcgcgcagaaaaacctctattttcttctaatccagaactggataacttgatgattcaagccatacaagtattaaggtttcatctattggaattagagaaggtacacgaattatgtgacaatttctgccaccggtatattagctgtttgaaagggaaaatgcctatcgatttggtgatagacgatagagaaggaggatcaaaatcagacagtgaagatataacaagatcagcaaatctaactgaccagccctcttggaacagagatcatgatgacacggcatctactcgttcaggaggaaccccaggcccttccagcggtggccacacgtcacacagtggggacaacagcagtgagcaaggtgatggcttggacaacagtgtagcttcccccagcacaggtgacgatgatgaccctgataaggacaaaaagcgtcacaaaaagcgtggcatctttcccaaagtagccacaaatatcatgagggcgtggctgttccagcatctaacacacccttacccttctgaagaacagaaaaagcagttggcacaagacacgggactcaccatccttcaagtgaacaattggtttattaatgcccggagaagaatagtgcagcccatgatagaccagtccaaccgagcagtaagtcaaggaacaccttataatcctgatggacagcccatgggaggtttcgtaatggacggtcagcaacatatgggaattagagcaccaggacctatgagtggaatgggcatgaatatgggcatggaggggcagtggcactacatgtaaccttcatctagttaaccaatcgcaaagcaagggggaaggctgcaaagtatgccaggggagtatgtagcccggggtggtccaatgggtgtgagtatgggacagccaagttatacccaaccccagatgcccccccatcctgctcagctgcgtcatgggccccccatgcatacgtacattcctggacaccctcaccacccaacagtgatgatgcatggaggaccgccccaccctggaatgccaatgtcagcatcaagccccacagttcttaatacaggagacccaacaatgagtggacaagtcatggacattcatgctcagtagcttaagggaatatgcattgtctgcaatggtgactgatttcaaatcatgttttttctgcaatgactgtggagttccattcttggcatctactctggaccaaggagcatccctaattcttcatagggacctttaaaaagcaggaaataccaactgaagtcaatttgggggacatgctaaataactatataagacattaagagaacaaagagtgaaatattgtaaatgctattatactgttatccatattacgttgtttcttatagattttttaaaaaaaatgtgaaatttttccacactatgtgtgttgtttccatagctcttcacttcctccagaagcctccttacattaaaaagccttacagttatcctgcaagggacaggaaggtctgatttgcaggatttttagagcattaaaataactatcaggcagaagaatctttcttctcgcctaggatttcagccatgcgcgcgctctctctctttctctctcttttcctctctctccctctttctagcctggggcttgaatttgcatgtctaattcatttactcaccatatttgaattggcctgaacagatgtaaatcgggaaggatgggaaaaactgcagtcatcaacaatgattaatcagctgttgcaggcagtgtcttaaggagactggtaggaggaggcatggaaaccaaaaggccgtgtgtttagaagcctaattgtcacatcaagcatcattgtccccatgcaacaaccaccaccttatacatcacttcctgttttaagcagctctaaaacatagactgaagatttatttttaatatgttgactttatttctgagcaaagcatcggtcatgtgtgtattttttcatagtcccaccttggagcatttatgtagacattgtaaataaattttgtgcaaaaaggactggaaaaatgaactgtattattgcaatttttttttgtaaaagtagcagtttggtatgagttggcatgcatacaagatttactaagtgggataagctaattatactttttgttgtggataaacaaatgcttgttgatagcctttttctatcaagaaaccaaggagctaattattaataacaatcattgcacactgagtcttagcgtttctgatggaaacagtttggattgtataataacgccaagcccagttgtagtcgtttgagtgcagtaatgaaatctgaatctaaaataaaaacaagattatttttgtcaaaaaaaaaaaaaaaaaa

SEQ ID NO: 596 - DNA, 3623 bp, Homo sapiens
tcccgctccccactcccgggatgtgtctccgccgtacgacgggctatggccaccacgacttccgggttccgtcatttcgttctcccgccgccgacccgcgccgccaaactgaggctcttcaataagccaggcagcagccaacctgccaacacctactgacactcactcatctcccagagagagaaagagagcgagagagagcgagcgcgagagagcgagcgcgagtgagagcgagcgagcgagcgagaaagagagagagggagagacaaaatacctaccaggaaagggggggaggaagtccaatttttgcaaactattcatttttttttcttgatttttctcactgctttctttgaacaatactttaaagagagaggatcgtattatagataccgcgggggcaaagctaaaaaaggggggaggggggaggaaaaaattcaagaagcagaaacccctcgcggagttttactggaagaaaaaaacgggtctgaaagattcctcctcttcatcatcatcaaccatcattcattcactaccttgacattccgggctttgattgacagctggagtggcaaaaagccatgaaacacgacagttcggttacatgtgggctgctgacgggccgctcgtaaccttcagttcgggggcttgacaatttttttcttctttttcttctttttcttttctttctttttttttccaactgaggggaagagaagagaaagagggggaaaggaggaccgaagaggaggaggaggggaggggggaggaggaggaggtggaggaggaggaggaagatcaggaggaggaggaagaagaggaaaaaagagaaaaagaagaaatatcacagaaaaaaaaattcttcgttgtctagactgggctttttttcccccctaaaaaatagcatattggagaattgggagaagtctctttggtttggaaaaaaaaaaaaggaatcttcagcctagatcactttcttatccggactgggatattaaatatacgacacatccaggagtttattggagcgcagactgatggcgcaaaggtacgatgagctgccccattacggcgggatggacggagtaggggttcccgcttccatgtacggagaccctcacgcgccgcggccgatccccccggttcaccacctgaaccacgggccgccgctccacgccacacagcactacggcgcgcacgccccgcaccccaatgtcatgccggccagtatgggatccgctgtcaacgacgccttgaagcgggacaaggacgcgatctatgggcacccgttgtttcctctgttagctctggtctttgagaagtgcgagctggcgacctgcactccccgggaacctggagtggctggcggagacgtctgctcctccgactccttcaacgaggacatcgcggtcttcgccaagcaggttcgcgccgaaaagccacttttttcctcaaatccagagctggacaatttgatgatacaagcaatacaagtactaaggtttcatcttttggagttagaaaaggtccacgaactgtgcgataacttctgccaccgatacattagctgtttgaaggggaaaatgcccatcgacctcgtcattgatgaaagagacggcagctccaagtcagatcatgaagaactttcaggctcctccacaaatctcgctgaccataacccttcttcttggcgagaccacgatgatgcaacctcaacccactcagcaggcaccccagggccctccagtgggggccatgcttcccagagcggagacaacagcagtgagcaaggggatggtttagacaacagtgtagcttcacctggtacaggtgacgatgatgatccggataaggacaaaaaacgccagaagaaaagaggcattttccccaaagtagcaacaaatatcatgagagcatggctcttccagcatctcacagtttattaatgccagaagaagaatagtacagcccatgattgaccagtcaaatcgagcagtgagccaaggagcagcatatagtccagagggtcagcccatggggagctttgtgttggatggtcagcaacacatggggatccggcctgcaggacctatgagtggaatgggcatgaatatgggcatggatgggcaatggcactacatgtaaccttcatcatgtaaagcaatcgcaaagcaagggggaagtttgcagagcatgccaggggactacgtttctcagggtggtcctatgggaatgagtatggcacagccaagttacactcctccccagatgaccccacaccctactcaattaagacatggacccccaatgcattcatatttgccaagccatccccaccacccagccatgatgatgcacggaggaccccctacccaccctggaatgactatgtcagcacagagccccacaatgttaaattctgtagatcccaatgttggcggacaggttatggacattcatgcccaatagtataagggaactcaagggaaaaggaaacacacgcaaaaactattttaagactttctgaactttgaccagatgttgacacttaatatgaaattccagacagctgtgattattttttacttttgtcatttttcatcaagcaacagaggaccaatgcaacaagaacacaaatgtgaaatcatgggctgactgagacaattctgtccatgtaaagatcctctggaaaaagactccgagagttataactactgtagtataaatataggaactaagttaaacttgtacatttctgttgatcacgccgttatgttgcctcaaatagttttagaagagaaaaaaaaatatatccttgttttccacactatgtgtgttgttcccaaaagaatgactgttttggttcatcagtgaattcaccatccaggagagactgtggtatatattttaaacctgttgggccaatgagaaaagaaccacactggagatcatgatgaacttttggctgaacctcatcactcgaactccagcttcaagaatgtgttttcatgcccggcctttgttcctccataaatgtgtcctttagtttcaaacagatctttatagttcgtgcttcataagccaattcttattattatttttgggggactcttcttcaaagagcttgccaatgaagatttaaagacagagcaggagcttcttccaggagttctgagccttggttgtggacaaaacaatcttaagttgggcagctttcctcaacacaaaaaaaagttattaatggtcattgaaccataactaggactttatcagaaactcaaagcttgggggataaaaaggagcaagagaatactgtaacaaacttcgtacagagttcggtctattaattgtttcatgttagatattctatgtgtttacctcaattgaaaaaaaaaagaatgtttttgctagtatcagatctgctgtggaattggtattgtatgtccatgaattcttcttttctcagcacgtgttcctcactagaagaaaatgctgttacctttaagctttgtcaaatttacattaaaatacttgtatgaggactgtgacgttatgttaaaaaaaaaaaggtgttaagtcacaaaaagcggtaataaatatttcatttttgaaaaaaaaaaaaa

SEQ ID NO: 597 - DNA, 1668 bp, Homo sapiens
gcggccgcccatcgacctggtcatcgaggatcgggatggcggctgcagggaggacttcgaggactacccagcctcctgccccagcctcccagaccagaataatatatggattcgagaccatgaggatagcgggtctgtacatttggggaccccaggtccatccagcggggggctggcctcccagagtggggacaactccagtgaccaaggagtcgggctggacaccagcgtggcctctcccagttctggtggagaagatgaggacttggaccaggagccacggcgaaacaagaagagggggatcttccccaaggtggccaccaacatcatgcgagcctggttgttccagcacctctcacacccgtacccctcggaggagcagaagaaacagctggcgcaggacacggggcttaccatcctgcaagtcaacaactggttcattaatgcccggagacgcatcgtgcaacctatgatcgatcaatccaaccgcacagggcagggtgcagccttcagcccagagggccagcccatcgggggctataccgagacagagccacacgtggccttccgggctccagcatcagtgggggatgagtttggaactcggaaggaggaatggcattatctatagaggctgatgcgggagagacccagcctccggctgtgacccccagcctcacacctggctctggttcccgcctggtcctctggcttcaggatcccacctccaaaggcctctccgctcaacgcctacctccctagggccctgctgggacatgggggcctgagtgcccacccaaggggctctcaaggacaccggcaaggcctccaggctctgagccccgcttctgccttcacctctgcctgggacccgagctgggctcctgggccttggtccccagaagatggcagctagggcctcgccgcgaggacagagaagggacagggtggctgggcagtcagggaaggagggtcgcccggatccgacattttggagagattctttcaccctcctgtcccccccacctcccttctctaatttcttctttttttaatgataaagtcttaaaacacagaaaaaaaaaagacttcagagaattaggtagatgaagcactttatacagtatatatcttcagcttaaatttgttttgagtattttttttatttttaagtaggcaaagatttaaaattttttatttttagtaaatgtttgaagcaaactaaaaagacgtgggcaatatttaccacaaccaaacagaacccacaaaattgtacatcttgatcttagcaaatatccttattgtagagacacttaataaagagatggtattttaatatctccagttctgaggtagggtgtaacttagttctacattgtgatttaggaatttttaaacctttcttcttcaggggagaagtgacccaggcctcgagtttagtgctaaagccactagtgtacttatgctgtcacctaaccaccacatgcgacatggaggcagaggctaaatataggggctttcttaagaaagtgagaggaaattagcaagcattattagtgtttgactactgctatcaagtgaattcaaaggaaacaggtttttatgtcatatttaagttacagaaaccaggcatgcttagaatagtttctaaggtgacagagcggccgc

SEQ ID NO: 598 - DNA, 2330 bp, Homo sapiens
aaaggaccgaggcgtgcagcggacagcagatggatcccgcggccagcagctgcatgaggagcctccagcccccagcccctgtctggggctgccttcgaaacccccactcggaaggcaatggggcctcagggctaccccactacccgcccaccccgttctccttccaccagaaaccagacttcctggcgacagcgacggcagcgtaccctgacttctcagcctcctgcctggcagccaccccacacagcctgccccaggaggagcacatcttcactgagcagcaccccgctttcccacagtcccccaactggcacttccctgtctcagacgcccggcgcaggcccaactcaggcccggcagggggttccaaggaaatggggaccagcagcctgggcctggtggacaccacaggaggcccaggcgatgactacggggtgcttgggagcactgccaatgagacagagaagaaatcatccaggcggagaaaggagagttcagacaaccaggagaacagagggaagccggagggcagcagcaaagcccgcaaggagaggacggccttcaccaaggagcagctgcgagagctggaggcagagtttgcccatcataactacctgactcggctccgcagatatgagattgcggtaaacctggacctctctgagcgccaggtcaaagtgtggttccagaaccgaaggatgaagtggaagcgtgtgaagggaggtcagcccatctcccccaatgggcaggaccctgaggatggggactccacagcctctccaagttcagagtgagattctgcatggaggaaaaatgactaaggactgagccccctacccaactacccccaccccaatcccaccttcaccctcttccttccccagccagggcagcctctccacatctttccctgactcttggatatgaaactgcccagcattcctgggagtcttaggattttctaggaagttctgtccagcctcttagcagcctcttccctagggcctttgctcccacactctcatggaatcagacagagatcctaccgggccggatgaatctggaaacagcttcagagatactgcttctcagcgtctcttggctgccacccatgcctcctcctaccgctgttctcctaggtcagccaggcctcctcctggtctggacaccacctggcctggtgggagaggagctttggaaccagctggcgactcggaaagtaaatgcttcaaaaggaaggaaatgacagagacacacgcccttgcccaccttcctctgtaggctgcacatctgaggctttggggccccttagttgtcccgaaaccccaagaaaaatcagaatgaggagagtcaaggacagcaactcagctgctgcaagccagaaacacatccctgtctccaaatttgttggctaagtggagacacttctgagaactgactagagaagacagaaaaatagcccgatgtaggtttcggtgtccccatataggcccgtccacacaggcttgactgggtggacaagaatgaacccatgacagcacctgctgcttcaaaatcaaaatcaatttagggatacagcaggggctgttgggctgtgctccagagaaaaggagcagctactccttttaaatccacgatttctggattgaaaacctgtccagatgctgagttgttgggctgaacaactaggagctgaaaacaacgtagaggctggaaagtgtcccctgcattctggaggggaggggagataataaggagggctgctgggtgagggcctggagatgtggaaccctggagtggaaggttctccagtgacagtgtcctgtgactgcaaaaggggacaagaaaatccctcttcctccatgggatggatttaagctcttgctgtgtgttctacaaatgctgttattgtgggaggaaatgctaggtttttgtgtgtggactgcccagacctcagccaggtcttctggagatgacatttgaggactgatggccaaagagcatgggggactgaagccctggctgcctcagcgctctgtctcccaacaccagctggtgttgcagagggaggtcaacgtgagtttggatctcttgtacgcagatgtaatcattcacatgtaaaaataaccccacctccccaccccaaaaagggcaagagctgtggaaaatgattgccaaatgagatggctggttagagcatgattttttctaaagcatacttcatatattttcttaagattacatcaagctaattgtgcgagctcaattcactttgtaagaaaactctcggagaaataaaatcaataaaaagcaaaaaaaaaaaaaaaaaa

SEQ ID NO: 599 - DNA, 2383 bp, Homo sapiens
gaaagcagttctctgggaccaccttcttttggcttcaacctctcccactcttgacatctgagtagctcagggaagctcttccaggtccgactgttcatatgtaaaggagactggccgctggggctcaggaccgggattatccgagctctgcagaagtgcaccgctattgctttgggaggttaaaaaaaaaatcacacggtttccagtgaaaaagtgacagagggtggtggcctttggaaccgccgtgaagtcttctgcctggaacccgaaacttgcatgctatggaacacccgctctttggctgcctgcgcagccctcacgccacggcgcaaggcttgcacccgttctcccaatcctctctcgccctccatggaagatctgaccatatgtcttaccccgagctctctacttcttcctcatcttgcataatcgcgggataccccaacgaagagggcatgtttgccagccagcatcacagggggcaccaccaccaccaccaccaccaccaccatcaccaccatcagcagcagcagcaccaggctctgcaaaccaactggcacctcccgcagatgtcttccccaccgagtgcggctcggcacagcctctgcctccagcccgactctggagggcccccagagttggggagcagcccgcccgtcctgtgctccaactcttccagcttgggctccagcaccccgactggggccgcgtgcgcgccgggggactacggccgccaggcactgtcacctgcggaggcggagaagcgaagcggcggcaagaggaaaagcgacagctcagactcccaggaaggaaattacaagtcagaagtcaacagcaaacccaggaaagaaaggacagcatttaccaaagagcaaatcagagaacttgaagcagaatttgcccatcataattatctcaccagactgaggcgatacgagatagcagtgaatctggatctcactgaaagacaggtgaaagtctggttccaaaacaggcggatgaagtggaagagggtaaagggtggacagcaaggagctgcggctcgggaaaaggaactggtgaatgtgaaaaagggaacacttctcccatcagagctgtcgggaattggtgcagccaccctccagcaaacaggggactctatagcaaatgaagacagtcacgacagtgaccacagctcagagcatgcgcacttatgatataaacagaggaccagctccattctcaggaaagaaatgttgtgatggcaagccttacccaaatatcgtttacacagagagatgactatggcagtgatgtttaatattattaaatccaggcatttcgaatctgtttttcatgatttatagagggtttacacaaagtgccacttattaaagagcttccacagtgaagatggagaaggtgaacttgctttgaatattccagatgtgtttggtcgtgcgtatggcagtgagcaggtatgtgtttgcttttgcttgcactgaaaattaaattgctatcaagagcaaactatgaacggttttttattcaagatgtctccagagtgaagatgccgaggatgaacttgcattgaacattccagatgtgtgagatcatgtgtattacagtgggcaggtatttgcttttgcttgcactgaaaattaaattgctatcaagaataaaccatgaaacattttatcctgaacagccacagtgcctgaattcactcaagtggataaaaagtgtattttaactctgtatatattacccttaagtcattttcctgtcttcactaatttagcaatgcattcatattagctgatgaaaataggcactcacaatgacaaccagagccagtttcttgtcttttttatacattttgtcatcccagagacaatcagtatgtgcttacctgtgttcaagtagagaaaaatacagtagagtctgataggacatattcttgtaccacagacaaaacaaatcttatgttgcatttactatcaactgctgctaatacgttattataaaacttacctagctcctgaattcttcctatcttatagcttaaaacaattaggatcataggcaaatcagttaccttgcagaaagagctttgtatgacagacattgtcttattttatttctgtaaaatattagctgtatgaatatgatttaattaacaagaaaacatttcttcctgattgacaacagtgttagacaaggtgcaaagcgaaactggttgctcaagttgatagaaaacaaaattctgaatatcttcaaattaaattcggtaaaaacacattattttttcatatgtgatgtattcatgcagaacaactatctttgtattttgtttttaaaatgtgtttaataaatgatcctttgtaaataaaaaaaaaaaaaa

SEQ ID NO: 600 - DNA, 1184 bp, Homo sapiens
tggaaggggccacttcacacctcgggctcggcataaagcggccgccggccgccggcccccagacgcgccgccgctgccatggcccagcccctgtgcccgccgctctccgagtcctggatgctctctgcggcctggggcccaactcggcggccgccgccctccgacaaggactgcggccgctccctcgtctcgtccccagactcatggggcagcaccccagccgacagccccgtggcgagccccgcgcggccaggcaccctccgggacccccgcgccccctccgtaggtaggcgcggcgcgcgcagcagccgcctgggcagcgggcagaggcagagcgccagtgagcgggagaaactgcgcatgcgcacgctggcccgcgccctgcacgagctgcgccgctttctaccgccgtccgtggcgcccgcgggccagagcctgaccaagatcgagacgctgcgcctggctatccgctatatcggccacctgtcggccgtgctaggcctcagcgaggagagtctccagcgccggtgccggcagcgcggtgacgcggggtcccctcggggctgcccgctgtgccccgacgactgccccgcgcagatgcagacacggacgcaggctgaggggcaggggcaggggcgcgggctgggcctggtatccgccgtccgcgccggggcgtcctggggatccccgcctgcctgccccggagcccgagctgcacccgagccgcgcgacccgcctgcgctgttcgccgaggcggcgtgccctgaagggcaggcgatggagccaagcccaccgtccccgctccttccgggcgacgtgctggctctgttggagacctggatgcccctctcgcctctggagtggctgcctgaggagcccaagtgacaagggacaactgacgccgtctctgtgagcaccgaggctttttggcctcagcaccttcgaagtggttccttggcagactgcctttcctggaagagggcacgggcgatcccgacgggggcattcctgcgggtgagagccgtccccaccgcggcggcccttctcagcccctccctccatggagggacccatagggctagacactttgaggcaagcaggaggctctgcctaatgtgaatttatttatttgtgaataaactgtactggtgtcagttggcaaaaaaaaaaaaaaaaaaaaaaaa

SEQ ID NO: 601 - DNA, 872 bp, Homo sapiens
gaggaagtgccgcgtcttggtgggtctggagctggctgacaatgcaggagacaaggtctcgccatgttgcctaggatggtctcgaactcctgaactcaagtaatccaccttggcctcccaaagtgctgggattacaggcatgagccaccacgcccggccaaattgtatgggtctctctgtgtctccagagccctgtctgtcgctgggagctccatctctcctgccccacccatcatgccagagactgcagcctcagacccccgggaggtgctggagccacagtgcagaggtggtgcccaactcagaggaccagggaccgggcgccgccttccagctcagtgaagcaagccctccccagagctcaggcctgcggttcagtggctgccctgaactttggcaagaagatctggagggggcccgcctgggcatcttctactaaatggcctcggcttccctctttccatccaggaatcagtcctgtagcttgggtgccgccgttttttttaattagtggcttttcatgttctcctttagccaaggctccttttttccaagtgatgtctttcagggaagcagtgtttgaaatagatagcgggtaccttccctggatggagtcagggcgggggcactgtcctccactgctagacacccccagaatgcctggcgctctgcagagcacagtctgagctgctctaagaaggggtctcctttaccctaaaggcagctgggcagggacaggtgggagaatgggtgtaggaggcaggccccaggctctgcttcttggtgacagttggccagagccctgtatgctttgatttttttgtacttaaaaagaaaaaacacacacacacaacaaaaaaaaaaaaaaaaaa

SEQ ID NO: 602 - DNA, 1975 bp, Homo sapiens
ccgcgtgagaattggctatatcctggagcgagtgctgggaggtgctagtccgccgcgccttattcgagaggtgtcagggctgggagactaggatgtcggacacgtggagctctatccaggcccacaagaagcagctggactctctgcgggagaggctgcagcggaggcggaagcaggactcggggcacttggatctacggaatccagaggcagcattgtctccaaccttccgtagtgacagcccagtgcctactgcacccacctctggtggccctaagcccagcacagcttcagcagttcctgaattagctacagatcctgagttagagaagaagttgctacaccacctctctgatctggccttaacattgcccactgatgctgtgtccatctgtcttgccatctccacgccagatgctcctgccactcaagatggggtagaaagcctcctgcagaagtttgcagctcaggagttgattgaggtaaagcgaggtctcctacaagatgatgcacatcctactcttgtaacctatgctgaccattccaagctctctgccatgatgggtgctgtggcagaaaagaagggccctggggaggtagcagggactgtcacagggcagaagcggcgtgcagaacaggactcgactacagtagctgcctttgccagttcgttagtctctggtctgaactcttcagcatcggaaccagcaaaggagccagccaagaaatcaaggaaacatgctgcctcagatgttgatctggagatagagagccttctgaaccaacagtccactaaggaacaacagagcaagaaggtcagtcaggagatcctagagctattaaatactacaacagccaaggaacaatccattgttgaaaaatttcgctctcgaggtcgggcccaagtgcaagaattctgtgactatggaaccaaggaggagtgcatgaaagccagtgatgctgatcgaccctgtcgcaagctgcacttcagacgaattatcaataaacacactgatgagtctttaggtgactgctctttccttaatacatgtttccacatggatacctgcaagtatgttcactatgaaattgatgcttgcatggattctgaggcccctggcagcaaagaccacacgccaagccaggagcttgctcttacacagagtgtcggaggtgattccagtgcagaccgactcttcccacctcagtggatctgttgtgatatccgctacctggacgtcagtatcttgggcaagtttgcagttgtgatggctgacccaccctgggatattcacatggaactgccctatgggaccctgacagatgatgagatgcgcaggctcaacatacccgtactacaggatgatggctttctcttcctctgggtcacaggcagggccatggagttggggagagaatgtctaaatctctgggggtatgaacgggtagatgaaattatttgggtgaagacaaatcaactgcaacgcatcattcggacaggccgtacaggtcactggttgaaccatgggaaggaacactgcttggttggtgtcaaaggaaatccccaaggcttcaaccagggtctggattgtgatgtgatcgtagctgaggttcgttccaccagtcataaaccagatgaaatctatggcatgattgaaagactatctcctggcactcgcaagattgagttatttggacgaccacacaatgtgcaacccaactggatcacccttggaaaccaactggatgggatccacctactagacccagatgtggttgcacggttcaagcaaaggtacccagatggtatcatctctaaacctaagaatttatagaagcacttccttacagagctaagaatccatagccatggctctgtaagctaaacctgaagagtgatatttgtacaatagctttcttctttatttaaataaacatttgtattgtagttgggaaaaaaaaaaaaaaaaaaaaa

SEQ ID NO: 603 - DNA, 4617 bp, Homo sapiens
aaagaagcagaagcgtttgcttattatcgccggacacacactgccaatgagcggcggcggcgtggtgaaatgagggatctctttgagaaattaaagatcacattgggattacttcattcttccaaggtttccaaaagtctcattcttactcgagccttcagtgaaattcagggactaacagatcaggcagacaaattgataggacagaaaaatctcctgactcgaaaacggaatattctgatacggaaagtatcgtctctttcaggtaagacagaagaagtggtcctgaagaagctagagtatatttatgcaaaacagcaagcactagaggcacaaaaaagaaaaaagaagatgggatcagatgagtttgacatatctcccagaattagcaaacagcaggaaggatcttctgcatcatctgtagatcttggacagatgtttataaataacaggagggggaaacctttgattctttccagaaaaaaagaccaggccacagaaaatacctcacccttgaacactccacacacctctgccaaccttgtgatgactccgcaagggcaattgctcaccctaaaaggtcccctattctcaggaccagtggtagctgtttctcctgatctcttagaatctgatcttaagcctcaagttgccggtagtgctgtggctctaccagaaaatgacgacttatttatgatgccacgaattgttaatgtgacatcattggccacagagggaggtttggtagatatgggtggcagcaaatatcctcatgaagttcctgatagcaagccatctgaccatctgaaagacaccgtcaggaatgaagataattccttagaggataagggtagaatctcttccagaggaaacagagatggcagagtgacgttgggtccaacgcaggtttttctggcaaacaaagattctggttatccacaaatagttgacgtttccaatatgcagaaagcacaagagttcttacctaaaaagatttctggtgatatgagagggattcagtataaatggaaagagagtgaatcaagaggggagagagtgaagtcaaaggattcttcatttcataaattaaagatgaaagatctcaaggactcaagcatagagatggaactgaggaaagtaacatcagctatagaggaagcagctcttgattccagtgaactgctgactaacatggaagatgaggatgatactgatgagacactgacttcactgctcaatgaaattgcctttcttaatcaacaactaaatgatgactctgttggcctggctgaactacccagctctatggatacagagttcccaggggatgctcggcgggcttttattagtaaggttcctcctggaagcagagcaactttccaggttgagcacttgggaactggtttgaaagagttgcctgatgttcaaggggagagtgactctatcagtcccctcctcttgcacttggaagacgatgacttttctgagaatgaaaaacaacttgcagaaccagcctctgagccagatgtccttaagattgttattgactctgaaataaaggattccctcctttccaacaagaaagctattgatggagggaagaatacttctggcctccctgcagagcccgaaagtgtgtcctcaccccccaccctacacatgaagactggcttggagaacagcaacagcacagacactttgtggaggcctatgccaaagttggcccctctaggtttaaaagtagctaatccttccagtgatgcagatggtcagagtctcaaggtgatgccttgtttggcacctatagctgccaaagttgggtcagttggacacaaaatgaacttaacagggaatgaccaggaaggccgggaaagcaaggtgatgcctacattggcacctgttgtggctaaattgggcaactcgggggcctcaccaagttctgcagggaaatgaacttacttgtccttaagcagaagccaggctgtgaggggaaatagatctcacctcctttctctgcaggcatctgtttgtttgtgtcttagaacttggatccttgacttcaatgatgcagtggataatgatgggagaaagggggtagggtgctgaccctggtataagaagtactctgaaattctgatcatgttaaaatgtgttacctcacttgtggtgctgggtcccctcatcctctctaagaagatgtgatccattactgaacatgaggtgcccctcttacccaaggaatttataacatgactctggctccacagtggtttctagttcttcccccacaagcgaaagagctgtttgcaactttggagttgctgtagactgaactgtagcttgtagctgttgaattaagtccaaaatctaaggaatgcgatggacttgtgcaaagggatccagaagagacactttttagttgatgtttcaagaatagggagagagaggatgggtaccatggaataccaaagtgaaggactttgtgtcattcagtaaaattttcttttttcatatcctaagtagctcccattccctcaccttttcaatcagaattaacaaattcaagccttcagtaaagtagggatgcttttaacttttattattaattattttgagatcttaaaaaaatagtagttctcccttattatttttgtgggcattgaaaagctcatttcacagtaccagagatttttactgggagtatatattttggaggtaggcatagagggagccctaccccttccacaaattacgttactcaagagacagctaaaataaaatgcattatctccccagaccagagacagtggccaaaataaaaaatcatggggctggaaatttcccaaatcaaaccagcctcctggtgcttgaaggtttcattcactattacctgcacaggatgtaaagaaaagtcacagtaggcactctttaccagggaaataaggcagtatttgaatcacaagatatattttttatctgcaaccatggatccaatgatctgtagagctttttcactcattaactgtcaggatatgaaggactgacagtctgtaaagatatttatatttttgtatagttgttttcatagatttctcaaaggctgaagttttcaacctagaagatgagatttgtattgagtatagaaatgatgtttcctatctagtttgtaaataatcatggtgcacttgaggggtctcttggaaactcctagggggtcaagaatcactattctgaaactgtatagactgggatttagctgctgcattttgcctttcttaaataattatattttggaatgtaacccctgttctgtcttcattgacaggatttgcttgtgttgttaaaacactaacacaagagcttccagtgcctgggccgtgcctaggtgatgctatttcttctatatctcctgtcttctttatcccaaatcccactcagcatatcttcagacctaggttgtaagaccaactttggattggatctagccagtgaattattatttccatggttggttccctttctgttaactctggtaatcaacagattgaaaacggtggaagaacttcttctgaaaattgcagtgggagcaaattcttgttggttttgtgctgcttgcctttctagatctgctcatcagcacttaaccttccctcctctaaaggttactaaagaagcctgaagtaggtaaagagtgctcctcagcttcttatccttccactctttacccagcagatttcattcaatgccttagccaaggagtccagcacctgtctcccctgctaataattgtccttagagatgctagtactttaatccaggtatagcagtttcccgttattttcttgcttgtcgttcccctacatttcctcctgatttcccaagactctctttgtggcttttgagggtcagccaaggagcaggcaagtgagtgaacaatcctcaggaaaagaaggaccattttagcttaacacttccttttttttttttttttttttaagaagaatataggtaaacaggtaatgattcttgattggagataccatttgactcttgatgagagttgtacgaagatggaaatgagggatgattccaggcgttttagggggaaggctgcagataccattctaacccccaagatactgtgttctcaagacctcttagaactaggtgttgtcagggataatttgaggagggcttagtcttcagaacaatcctgcagtcttgacagaaatctaaaatctccaaaaactcctaccctttaaccttaccctagggggaactgatctatgaatattacatgtgtgattatgaaaggtgaagttgagtgagaggagttgaggaacgtggaagacagtgagctctcaccctaacactataagaagcatgatctcaatagaccaataattcacctttttatacatctgtaaataaatggaatgtttttaagaatataattatgtcagatttagcattttcttttatatattaaatatatatatctttccttttctgctttcgaaaagtgactatttttttagaaatctaagaacagaagtttggtgattgaaaggtagaatatataaacctgaaataaagcagttaaaacaattaaagcag

SEQ ID NO: 604 - DNA, 4654 bp, Homo sapiens
ggttagtgatgaggctagtgatgaggctgtgtgcttctgagctgggcatccgaaggcatccttggggaagctgagggcacgaggaggggctgccagactccgggagctgctgcctggctgggattcctacacaatgcgttgcctggctccacgccctgctgggtcctacctgtcagagccccaaggcagctcacagtgtgccaccatggagttggggcccctagaaggtggctacctggagcttcttaacagcgatgctgaccccctgtgcctctaccacttctatgaccagatggacctggctggagaagaagagattgagctctactcagaacccgacacagacaccatcaactgcgaccagttcagcaggctgttgtgtgacatggaaggtgatgaagagaccagggaggcttatgccaatatcgcggaactggaccagtatgtcttccaggactcccagctggagggcctgagcaaggacattttcaagcacataggaccagatgaagtgatcggtgagagtatggagatgccagcagaagttgggcagaaaagtcagaaaagacccttcccagaggagcttccggcagacctgaagcactggaagccagctgagccccccactgtggtgactggcagtctcctagtgggaccagtgagcgactgctccaccctgccctgcctgccactgcctgcgctgttcaaccaggagccagcctccggccagatgcgcctggagaaaaccgaccagattcccatgcctttctccagttcctcgttgagctgcctgaatctccctgagggacccatccagtttgtccccaccatctccactctgccccatgggctctggcaaatctctgaggctggaacaggggtctccagtatattcatctaccatggtgaggtgccccaggccagccaagtaccccctcccagtggattcactgtccacggcctcccaacatctccagaccggccaggctccaccagccccttcgctccatcagccactgacctgcccagcatgcctgaacctgccctgacctcccgagcaaacatgacagagcacaagacgtcccccacccaatgcccggcagctggagaggtctccaacaagcttccaaaatggcctgagccggtggagcagttctaccgctcactgcaggacacgtatggtgccgagcccgcaggcccggatggcatcctagtggaggtggatctggtgcaggccaggctggagaggagcagcagcaagagcctggagcgggaactggccaccccggactgggcagaacggcagctggcccaaggaggcctggctgaggtgctgttggctgccaaggagcaccggcggccgcgtgagacacgagtgattgctgtgctgggcaaagctggtcagggcaagagctattgggctggggcagtgagccgggcctgggcttgtggccggcttccccagtacgactttgtcttctctgtcccctgccattgcttgaaccgtccgggggatgcctatggcctgcaggatctgctcttctccctgggcccacagccactcgtggcggccgatgaggttttcagccacatcttgaagagacctgaccgcgttctgctcatcctagacggcttcgaggagctggaagcgcaagatggcttcctgcacagcacgtgcggaccggcaccggcggagccctgctccctccgggggctgctggccggccttttccagaagaagctgctccgaggttgcaccctcctcctcacagcccggccccggggccgcctggtccagagcctgagcaaggccgacgccctatttgagctgtccggcttctccatggagcaggcccaggcatacgtgatgcgctactttgagagctcagggatgacagagcaccaagacagagccctgacgctcctccgggaccggccacttcttctcagtcacagccacagccctactttgtgccgggcagtgtgccagctctcagaggccctgctggagcttggggaggacgccaagctgccctccacgctcacgggactctatgtcggcctgctgggccgtgcagccctcgacagcccccccggggccctggcagagctggccaagctggcctgggagctgggccgcagacatcaaagtaccctacaggaggaccagttcccatccgcagacgtgaggacctgggcgatggccaaaggcttagtccaacacccaccgcgggccgcagagtccgagctggccttccccagcttcctcctgcaatgcttcctgggggccctgtggctggctctgagtggcgaaatcaaggacaaggagctcccgcagtacctagcattgaccccaaggaagaagaggccctatgacaactggctggagggcgtgccacgctttctggctgggctgatcttccagcctcccgcccgctgcctgggagccctactcgggccatcggcggctgcctcggtggacaggaagcagaaggtgcttgcgaggtacctgaagcggctgcagccggggacactgcgggcgcggcagctgctggagctgctgcactgcgcccacgaggccgaggaggctggaatttggcagcacgtggtacaggagctccccggccgcctctcttttctgggcacccgcctcacgcctcctgatgcacatgtactgggcaaggccttggaggcggcgggccaagacttctccctggacctccgcagcactggcatttgcccctctggattggggagcctcgtgggactcagctgtgtcacccgtttcagggctgccttgagcgacacggtggcgctgtgggagtccctgcagcagcatggggagaccaagctacttcaggcagcagaggagaagttcaccatcgagcctttcaaagccaagtccctgaaggatgtggaagacctgggaaagcttgtgcagactcagaggacgagaagttcctcggaagacacagctggggagctccctgctgttcgggacctaaagaaactggagtttgcgctgggccctgtctcaggcccccaggctttccccaaactggtgcggatcctcacggccttttcctccctgcagcatctggacctggatgcgctgagtgagaacaagatcggggacgagggtgtctcgcagctctcagccaccttcccccagctgaagtccttggaaaccctcaatctgtcccagaacaacatcactgacctgggtgcctacaaactcgccgaggccctgccttcgctcgctgcatccctgctcaggctaagcttgtacaataactgcatctgcgacgtgggagccgagagcttggctcgtgtgcttccggacatggtgtccctccgggtgatggacgtccagtacaacaagttcacggctgccggggcccagcagctcgctgccagccttcggaggtgtcctcatgtggagacgctggcgatgtggacgcccaccatcccattcagtgtccaggaacacctgcaacaacaggattcacggatcagcctgagatgatcccagctgtgctctggacaggcatgttctctgaggacactaaccacgctggaccttgaactgggtacttgtggacacagctcttctccaggctgtatcccatgagcctcagcatcctggcacccggcccctgctggttcagggttggcccctgcccggctgcggaatgaaccacatcttgctctgctgacagacacaggcccggctccaggctcctttagcgcccagttgggtggatgcctggtggcagctgcggtccacccaggagccccgaggccttctctgaaggacattgcggacagccacggccaggccagagggagtgacagaggcagccccattctgcctgcccaggcccctgccaccctggggagaaagtacttctttttttttatttttagacagagtctcactgttgcccaggctggcgtgcagtggtgcgatctgggttcactgcaacctccgcctcttgggttcaagcgattcttctgcttcagcctcccgagtagctgggactacaggcacccaccatcatgtctggctaatttttcatttttagtagagacagggttttgccatgttggccaggctggtctcaaactcttgacctcaggtgatccacccacctcagcctcccaaagtgctgggattacaagcgtgagccactgcaccgggccacagagaaagtacttctccaccctgctctccgaccagacaccttgacagggcacaccgggcactcagaagacactgatgggcaacccccagcctgctaattccccagattgcaacaggctgggcttcagtggcagctgcttttgtctatgggactcaatgcactgacattgttggccaaagccaaagctaggcctggccagatgcaccagcccttagcagggaaacagctaatgggacactaatggggcggtgagaggggaacagactggaagcacagcttcatttcctgtgtcttttttcactacattataaatgtctctttaatgtcacaggcaggtccagggtttgagttcataccctgttaccattttggggtacccactgctctggttatctaatatgtaacaagccaccccaaatcatagtggcttaaaacaacactcacattta

SEQ ID NO: 605 - DNA, 6217 bp, Homo sapiens
gattggcgaagctcctccgcggcccaagccagccacctacaacgtctctgagaactgatttgaaataagagccaggcggtcctcgcttccctgcgaccgacttttcataggctgggggagaaaaggttgagaaacttgacattgtctcgagcagagtgcgtgtagcaacagatcaaagaaaaagaggacgaaaacgtgctctttgctgcccgtagatttcgccgggttgcttttgtcttgcgggctcctgtcgggttcggtgtttccgctctgaagactgcgacgcgggctccgatgcagctcgctccctgccggatgggtcatgggattctaaacatgaggcagatagctgatcagcttccttgggttttgctgatgacacaagagagctttgcctgaagatggaaacactggagtcagaactgacctgccctatttgtctggagctctttgaggaccctcttctactgccctgcgcacacagcctctgcttcaactgcgcccaccgcatcctagtatcacactgtgccaccaacgagtctgtggagtccatcaccgccttccagtgccccacctgccggcatgtcatcaccctcagccagcgaggtctagacgggctcaagcgcaacgtcaccctacagaacatcatcgacaggttccagaaagcatcagtgagcgggcccaactctcccagcgagacccgtcgggagcgggcctttgacgccaacaccatgacctccgccgagaaggtcctctgccagttttgtgaccaggatcctgcccaggacgctgtgaagacctgtgtcacttgtgaagtatcctactgtgacgagtgcctgaaagccactcacccgaataagaagccctttacaggccatcgtctgattgagccaattccggactctcacatccgggggctgatgtgcttggagcatgaggatgagaaggtgaatatgtactgtgtgaccgatgaccagttaatctgtgccttgtgtaaactggttgggcggcaccgcgatcatcaggtggcagctttgagtgagcgctatgacaaattgaagcaaaacttagagagtaacctcaccaaccttattaagaggaacacagaactggagacccttttggctaaactcatccaaacctgtcaacatgttgaagtcaatgcatcacgtcaagaagccaaattgacagaggagtgtgatcttctcattgagatcattcagcaaagacgacagattattggaaccaagatcaaagaagggaaggtgatgaggcttcgcaaactggctcagcagattgcaaactgcaaacagtgcattgagcggtcagcatcactcatctcccaagcggaacactctctgaaggagaatgatcatgcgcgtttcctacagactgctaagaatatcaccgagagagtctccatggcaactgcatcctcccaggttctaattcctgaaatcaacctcaatgacacatttgacacctttgccttagatttttcccgagagaagaaactgctagaatgtctggattaccttacagctcccaaccctcccacaattagagaagagctctgcacagcttcatatgacaccatcactgtgcattggacctccgatgatgagttcagcgtggtctcctacgagctccagtacaccatattcaccggacaagccaacgtcgttagtctgtgtaattcggctgatagctggatgatagtacccaacatcaagcagaaccactacacggtgcacggtctgcagagcggcaccaagtacatcttcatggtcaaggccatcaaccaggcgggcagccgcagcagtgagcctgggaagttgaagacaaacagccaaccatttaaactggatcccaaatctgctcatcgaaaactgaaggtgtcccatgataacttgacagtagaacgtgatgagtcatcatccaagaagagtcacacacctgaacgcttcaccagccaggggagctatggagtagctggaaatgtgtttattgatagtggccggcattattgggaagtggtcataagtggaagcacatggtatgccattggtcttgcttacaaatcagccccgaagcatgaatggattgggaagaactctgcttcctgggcgctctgccgctgcaacaataactgggtggtgagacacaatagcaaggaaatccccattgagcctgccccccacctccggcgcgtgggcatcctgctggactatgataacggctctatcgccttttatgatgctttgaactccatccacctctacaccttcgacgtcgcatttgcgcagcctgtttgccccaccttcaccgtgtggaacaagtgtctgacgattatcactgggctccctatcccagaccatttggactgcacagagcagctgccgtgagcgtctggccacatggagctgctttctggggaacagtaaggttcaggccactatttaggggactgagaaagcacaggcttcatgagtgtaatgaaatctcaccagaagtgtcccgaaatcggctcagatagggctcaaaacaagagattcctctccttttactgtgtcttgtattaagtacgggctttaataatttctttaatttttttgtatttagaggaaaatctatagattatttataagagaaacataatcaggattacaacttttaggaattacttggttttgcacattaagaggcccataagtttatcagctatttacaaccttcatttcatcacaatctgtgggcttacaaaaaaacaaaaacttttgtagttttgtatgttactcatcttcttacctgatatcccatgatgatcccatggtaggtcttctcacctcgatggtgcataacaggatgtgtttgaacctagtaggggaggaaacaggctttcttactctggtttaatttgaagtgttttaattgtgatgtcaaaaagttgtatcagatcaactaaaatggagagcaagacagagaatgaaaagagttgattttggacctcggaccttgccgtggctaaatctttaccttctcatagctgatgggataatgttggaaagaaaggttctgaatcctttggccacattttgccctgcttctctcagggttaagggttctggaagaacattaagaatgagattgcaattgaaaatagtcattttgaatcctattgattattcaaaaattcaggctgatttgtcttttatcagaggtaggattctgttttatagtatagaatctactttatccttccttttaatagttcctttagacctgtgaaatttcttcactacatttaatagttctcctatttcccgctcccccatatcaattttccttttgtctccggggctgagtaaataaacatgttctgtcacaaatagcagcaccactttggattgattttgctctccaggacatcagcacatggccctgatcagcactaccacatccaaacataagtcactgaaaaacacttaatatttatgagttggtaatgacaagggacattgtataaagtactatttgctagattcatgcctcaaaagttattataaacagacctttattaaacacatcttgaaagatgtagaagtccctctatagtctagtatagtttacaatagagttgtaagaccaaaaaaaaaaaaaaaaaattcaaactcgttattcaggaacctgcttataaaatgtcagctgggattctttgcatgccaatctgatgcgttggaatggtccatgaattaaggctttcttgagcagttcttggcccagaactctggcattggttctagtttgatgaagggcatgacctctataaatggtttcaattgctaaaatatttacctgggatactgggtcagccattttgactgagcagactagtggatttagacattgtttttagttattttgtttttaaccaaatcaaccaactgcctccctgaaataagtcaatgaactcattgtttcagcatcacgtggccaaaggtcatgtgattgcaaatctggatttcaagggaggccaagccagcttcctgggtccttccatcctcttccctagcagacactctcctttttcttaacagatagattctatatatttactatattatttatacccagatgaatattttgatagatacctaagacaatttcacatctaaaagatggacgcctcaatggaaaaaaaacaatctttctctggaaaccttataggtttttctttttattacaatataaaagcaatgtgtgtttgccttctctgagtaaactgaaagggttgtctcagtaatttttacatacattttgggtaactggataatggatattttaatgcactttgtacactaacaggttctaaataaaagggtctaaaactcagcttctgagtttttaaaatcacggtctccaggtaccaataaatgctacagtttgccttatgatgttaacataaaacacttagtagaaggacaatatttccatgaaaataatgtttttcaatattaagaagttactactcaaattttcacagtaagccatttagggtatgtttggctatttttataaggacatgagagattatgtcataattttgttgtggaagtctcactcttggctaacttaaaagcattgtggatagtagcagttactagttccaggttgtcatatttacaggaaaatatgtatatggtgaaaggccaccgtgtttaattactataatgatgtagaaaagattcccgtgtgaattttttttttgaaagtctaaaaaatgtatgctgtaaaaatttgctgcagtgtaattttgcattctctttaaactgattgaggtcacagtattttattatttggggtcctcaccacaggaaacactgcgatacaggggcaaaagagatggcagtgccaattaaattaatacaacaaaatcaatgcagcaccaaccaagactgccaggtctggtgtcatgggtatgcccagagcccaggagttcagaagggccctaagcctgatttaatgctctgctgttgatgtcttgaaattcttaacaatttttgaacaaggggcctgcgttttcacttcgcactgggccttgcaaattacatagcgagtgctcataaaagaactcagaaacgtggtacctctcttcctggtggatacaaataaagaaatctggatccaaagttgaaagttgctggcgatatcattcaagtaggactctaaatagtggattaagatgagggtgggcctgggtgaagattctttccagctttaaaagaaagtgacttcaaaaactgactgcaaatattgacgatggtttctgctggaggaaaagaaacagcttgaatacagacaggcttttttattacggtactgatatattgaccttaaacttgctgaggaactgaactaacgtcctccagtgaccgtggaattccatctcagctccaggaacatgcagatacctgcaaagagacacgcatatatgctggcatacatgtgcatttggtgttgggaagttgaccatctggtctatcttaataaaatggtaaaaagcacaccaagacaatgatgggggcaggaggatgtttttgaaaacagcgcttctcaaccagtgctcgattttgccccccaggagacatttggcaatgcaatggcaacttttggttgtcgcagccggggaagggaagctaccagcatctagtgcgtagaggtcatggacgccgttaaacatcctacagtgcaagcgcagcccccgaccacgaagagttgtcttgctcaaatatcaacagtgctgcagtgtagaaacttgatcgttggttttcttttaatgcaaaactctcataaaaacctttcacttttcctgtcattgattatatgcttgatacacccaaaaagaaaaggggaggggcaccaattcacctacactccagtggctccatcacctttaaaaatatttataaaatagttccaaaaatctgatatctgaaaagcaatccaagcctgtgtaaatgggaatcactgataagtatcatcatctgtatcagcttggcttggacatgaaaaattgattctctttatgtcactccttgcacctggacaaattcaatccccggtacttaagtcacactgccaagccctcggccctgactattgtcttgattgctgttcctttctggttcaaaataaaatcatttttgtggcaccaaga

SEQ ID NO: 606 - DNA, 7345 bp, Homo sapiens
gtttctccggtcactcctgccaggggagaagacatgtaaacgtgcctccagaggaagggctgggggagctgggagtggcgggggcggcggaaggtgagcctgggaaggtggccgagcaccccttcttcttgggcccttcccagtgctcccttggggtgtcagccccagccccgtttgcccccactccgcctcccttttggaagggattgccttttttttcctctgcggcggcggaaatgacagtgtggtgctgccgtggtgtcatggtgctgcccctggactgaggggcgaaaactcttaagtttagctcgggaggcccagctgcggtagcatcgcggccgccgtgctgtcccctgcggggcgcgcgggctggcggatcccggctgctgcgcggcgtcggcgacggtagcggcagcggcggcgaaggcgggcggcggcctacagtggtagcggcggcggcggcgaccggggcccgggagctcgcgccggagcccgagccaacccgctgcggaggcagacgagagcccagcgccctcgagcgagcggaggagatggctggcacctgggaacgctatgggtgaaagcccagcctccgtggttcttaatgcctcaggaggactattttcactaaagatggaaacactggagtctgaattgacctgtccaatctgcctagagttgtttgaagacccccttctgctcccttgtgctcacagcctctgcttcagctgtgcccatcgcattttggtatcaagctgcagctctggtgaatccattgaacccattactgctttccagtgtcctacctgcaggtatgttatctcgctgaaccaccggggcctggatggcctcaagaggaatgtgactctgcagaacattattgatcgcttccagaaggcttcagtcagtgggcccaattcccctagtgagagccgccgggaaaggacttacaggcccaccactgccatgtctagcgagcgaattgcttgccaattctgtgagcaggacccgccaagggatgcagtaaaaacatgcatcacctgtgaggtctcctactgtgaccgttgcctgcgggccacgcaccccaacaagaaacctttcaccagccaccgcctggtggaaccagtgccagacacacatcttcgagggatcacctgcctggaccatgagaatgagaaagtgaacatgtactgtgtatctgatgaccaattgatctgtgccttatgcaaactggtgggtcgtcaccgagaccatcaggtcgcatccctgaatgatcgatttgagaaactcaagcaaactctggagatgaacctcaccaacctggttaagcgcaacagcgaactagaaaatcaaatggccaaactaatacagatctgccagcaggttgaggtgaatactgctatgcatgaggcaaaacttatggaagaatgtgacgagttggtagagatcatccagcagaggaagcaaatgatcgctgtcaaaatcaaagagacaaaggttatgaaactgagaaagttggcacagcaggttgctaattgccgccagtgtcttgaacggtcaacagtcctcatcaaccaagctgagcatatcctgaaagaaaatgaccaggcacggtttctacagtctgcaaaaaatattgctgagagggtcgctatggcaactgcatcttctcaagttctgattccagacatcaattttaatgatgcctttgaaaactttgctttagatttttccagagaaaagaaactgctagaggggttagattatttaacagccccaaacccaccatctatccgagaagaactctgtactgcctcccatgacaccattacagtccactggatctcggatgatgagttcagcatcagctcctatgagcttcagtacaccatattcactggccaggctaacttcatcagtaagtcatggtgtagttggggcctgtggccagagataaggaaatgtaaggaagcagtaagctgctcaagattggccggggcgccacgaggcctgtataattcagtagacagctggatgattgttcccaacattaaacagaaccattacacagtgcatggactccagagcgggactcgctacatcttcatcgttaaagccataaaccaagccggcagccggaacagtgaacctacccgactaaaaacaaacagccaaccctttaaattggatcccaaaatgactcacaagaagttgaagatctccaatgatggattgcagatggagaaggatgaaagctctctaaagaagagccacaccccagagaggtttagtggcacagggtgctatggggcagcaggaaatatattcattgacagtggctgccactattgggaggtggtcatgggttcctcaacatggtatgcaattggcattgcctacaaatcagctccaaagaatgaatggattggcaagaatgcctcctcatgggtcttctctcgctgcaatagtaacttcgtggtgagacacaacaacaaggaaatgctggtggatgtgcccccacacctgaagcgtctgggtgtcctcctggattatgacaacaatatgctgtctttctatgacccagctaactctctccatcttcatacttttgatgtgaccttcattcttccagtttgtccaacatttacaatctggaacaaatccctaatgatcctgtctggcttgcctgccccagattttattgattaccctgagcggcaggaatgcaactgcaggcctcaagaatccccttatgtttctgggatgaaaacctgtcattaagtttcaggagagtatataattcactggctctctagttcagcagttcttcccctcctacacctaagttagcgttcaatatacgagacacaaaataaagtttgtttgaagcatccaaaataactagatattgcagatttaatttttgtgcattaaagcttgtatttgaattaatttattgagtttttcagaacaaattatctgagtagtctgcgttcaagccattggagaaaaatttagaaaatgcctctgttgtcattggagaattaaaaattcccaatgatttaagaatataaattatattggaagcaattagggtaattctagttaaataatgtggaaaggtgccctgaataaggagctagcaagccagagcggggggtggtcagcctttctagtactggccagtttggccatgtagaattttgaacagtgtcaaattatcacatattatattttacttttgatgaaaacctatcatcaagggtttgttaggaaaccatgaatgtgtatatgtaatatataaagtgaacatatatgtactttatatatattcacttgtgtatgtatgtttatgcatattcactttatatattacatatacacaaaaaacttttttttccaaacaccacctcgaactagaacaaaaaactttttaatttgctaatttgagtgagaaatatactggaagggaaaataagttacaccatccatttttgtcccctaaaggaaacatcaaaatcaatcaacatttatttcctccctctatccatcattgccttcctccctcctgtcacgcacacatacacatgcaaccatgacacagataatgggaagagctttattggattagcagagatttacagacaagattgcacaagagatgctgttgctggatagaaaattgatcaggtagaagtgatgctacctacttgaggatggccatctgaattgttaaaaattctgtcatagactattaaaaaaaaagttttactactcccaagtacacacagttatgagaattaggcttttaaaaagttgcacagtgaaggctctttaggaacctactttacttaatcagtaaaaattgagtattattgatgcaccaactattcccatataaatgtacttgctttttcagataaaacacttctgaagtgctcaagaatgtctgaaaacagtttgttttcttaaataggataaataatcattccttttgcaatcttgtttacagtattcattctcttagccaatccctccacgcaaatggagacaaacttcatcccagtcctaaccagtatagttgaagggaatggagccttgtagtctatgatttttttttttaaatttccatcgaagggattggggatgtcagagagccagagctttcccctttccaggagctaagttggcttcggaagtcttctgggatttgtgaaaatattactgttgtaaaattacaaagtggtagccataacaactccctcagattggagacttgaaatgtcaaaactcccctcttcctttcccctagtttggtggatgctcatttattaattcattcaataaactattagatgccaggtaccaaactactgccatgggagtgcacatattaacaaaatgctctacctgctgccaaatggcttactattctgtggaagaaacaaagtatataatcctccccaataacagttatgtattgtttgttcacttaatgtggaaggcaagactgatgcagacacacaaggaaggctcaaaaatataaatctagcagcaatgtcatcttttttgattttaaataccatatgtgcttactgctaatcaggaaatgaacaacctcagtaaaattcatcagtgctggtaaatagtttgctgtagtggaaagctcataacctttggattcaaatgatcctagtttctgtaccatttattagcgttgtgacctaggacaagtacctcacttctctgagcctgtttcctcctctgtaaaataatgtctacttcacaaggctgtttcaaaggttaaaaaagatagcatatgtaaactgtcttagctcagcgcttgacatttcctaagtgtgccataaatattaatctctttccttactcccagctccaatacagcgtaacagtgctttaaaatgtatgtccttcatttctccttcatttctcagtcacctttgtctcttccctagggcatatccccaaattcttaaacaaaaaaaaatgatttttttccccttcatcaaacttttcactggctcccttagcacccagtagaaggtcccaactccttacagagtctgggttttcatgtccctgtttgcttacacagcttaatcttttgccactttccccctcacattgattaaggtagccaagtttaactatttacacaactattcacacaagttattctctgggcctgcagcagaaacatgattaacaattttaatgcccagagtaaacaacagaaatttttcttaaattaaaggaatagtgtgaaaatgctgtaagtacagaaaatgcaacctccattccagtagaacaatttcctttgccttgtccttggctctccaaaactgttcatttattgtggtgtcttttagattttagtgccctgggacaaagatctaatttccccaccctacttttgactctatcctggactacctttcctcacctctatctctctcaaccagactaactctttattccttagacttgatgatgcatccctctttagagatccaaagacaccccaagcatccccctctctcagcaataatcacattgtatagcagtgtttttcaaagtgtggtcctcacaccgcctgtgttagaatcacctttagtgtttgttaaaagaattgattttgggttcccactcctgacctaaccagaatatctgagaacataggcaggaatttacatttttgacaagctcctcatgattctgatgcaccaaaaattttaatgaataatcatcttccctactagactgaacaccttgagaggaaggactgtgtcttttattgttgttatattgttaatacctggcacagtgcttggaacattagcttggctaatgtttattgaatgaatgtatgaatgaaaaaatgcattatgaaagtttcctcttgtactctcatgttcgtagtgatgtttgttacttcctgggcagaaaagcttggttactactccatttgagctgtattaattctattttgcagagatatcaaggctcctacataataaatgatcattgtcctcctcaaaaactctttggcagttatcttggggaaatgtctttggagcatatggcaccattgttttcagtaacatttcagtcttgtcaaactttgttgtttgaaggtggatttacatttcggttatagccaaaaatcactcaaagctaagcctacttaaaaaagtggggaattaaactgggtttggagtaagcaatgaagtttgactctgaagtcccaaattctgagtcaaacagtgaaaaatgacttctaagatacaacatggtgacaaagtacttagtgggggtgcgatgggccccagatatttacttcagttaacttggcttttatagaatcctggcaatgccatggaccttaagagaagtaattggctacctctagctaaacccagctggacaaagagaataggacttgtatttaacattttcaaagaaggtgactgcataagcttttgttgttgttgctctactcaacctgttctccacaactgtttctaccagaagattattttatgtctgcaatttatgcttgtttccactttttatattgtcttattgaagaaagcacaaaaataatcaaaaataaagtaaaacctgttttgagagtatgaaagaaattttaatgccacattgaggttctggctacttgtaagtaagagtaactgcatctggatgtgtttttattatacaattctatgtgtatctttagatgcagtgaaattcagattgcagcaaaatcacttatctgttcttttcggctaaaacactctaggtgaattttctaaacttccatggtttacatatttatatatgactaccaagatggagcaatccacggatggacttttgaataaactcaaatatttgatactgcttcctccaaggaatggagagtgtcaggcaggtaggtaagaaccactcctacacttatttctagctcctgaagccaactgcagccttggagccaatggctgtatttggctgtgtgttacaggttggccaaactgattgccatcaggtcagacaaaactgccttttatggtgtagtctgccagcttcagacatatgctgtattgttgttattggctagactatttattagactattgttggactattttttatcaaatgctttaccccacgcctgtttgtattgggagctctggaccaatagtgtctctcctagtgacagaaatatgagcatctgtggattacacagcctcatccctctctacaatattccagcccatccaaaatgctatattatgaattaaataaatatatatgtattcatgaa

SEQ ID NO: 607 - DNA, 5643 bp, Homo sapiens
aggagggcggaggcggaggggagggcagagggttggtggagctggaggaagctccggacgacgactggaagaaggaggcgggcggcccgggcctcaggcccctcccaggctctgagtctcccggctgcaggcggatggatggggcttcttcaggcggtggcggcagcagcgaaggtggcggcggcagcagcggcagcggctatggtgtggtcgctcgattctcccagtgcctggctgagtttcggacgtggttaagaaccaactggttgaggttcaatgcagacaagacggatgtgatgctgaaaatgtgcatcagatgtttatgtttaattggtttacagactgtctgtggactcttttcctgtcaaattaccagccatctgttgaatcttcaagtccaggaggttcagcaacatcagatgaccatgaatttgatccatcagctgacatgctggttcatgattttgatgatgaacgaacattagaagaggaagaaatgatggaaggagaaacaaacttcagctctgaaatagaagatcttgcaagggaaggcgacatgccaattcatgaacttctcagcctttatggttatggtagtactgttcgactacctgaagaagatgaggaagaggaagaagaggaagaagaaggtgaagatgatgaagatgctgataatgatgacaacagtggctgtagtggggaaaataaagaggagaatataaaggattcatcaggtcaggaggatgaaactcagtcttccaatgatgatccatcacaatctgttgcttctcaagatgcccaggaaataatccgcccacgtcgatgtaaatattttgatacaaatagtgaagtagaagaagaatctgaagaagatgaagattatattccatcagaagactggaaaaaggagattatggtgggctccatgtttcaagcagaaattccagttggcatttgtagatacaaagaaaatgaaaaagtatatgaaaatgatgatcagctcctgtgggaccctgagtacttaccagaagataaagtgattatatttcttaaagatgcatctagaagaacaggtgatgagaagggtgtagaagcaattcctgaaggatctcacataaaagacaatgaacaggctttatatgaattggttaaatgcaattttgatacagaagaagcattgagaagattaagatttaatgtaaaagcagctagagaggaattatctgtttggacagaggaagagtgtagaaattttgaacaagggctgaaggcctatggaaaggattttcatttgattcaggctaataaagtccgaacaaggtcagttggtgaatgtgtagcattctattacatgtggaaaaaatctgaacgttatgatttctttgctcagcaaacacgatttggaaagaagaaatataatcttcatcctggtgtaacggattacatggatcgtcttctagacgaaagtgaaagtgctgcatctagtcgagcaccatcccctcccccaactgcatcaaacagtagtaacagccagtctgagaaagaagatggcactgtaagcactgctaatcaaaatggagtgtcatctaatggaccaggtgaaatattaaacaaagaggaagtaaaagttgaagggttacacattaatggaccaacaggtggaaataagaaaccacttcatgcagatatggatactaatggttatgaaacagataaccttaccactgacccaaaacttgcccatatgactgcaagaaatgaaaatgattttgatgaaaaaagtgagagacctgccaaaaggcgaagggtaaacagcaatggaaaagaaagtccaggttcttctgaatttttccaagaagcagtctcacatgggaaatttgaagaacttgaaaacacagatgactaaattttagacctattttactttctttggagtaaattctggtgtgactaaaattttcagggttgatgggttaccttaaaaagttgatttccttgaagcagtttgaaaatttgaattgagtcttaactttaggaaatgaggtttcataattctgccttttgcagatttttttactttaaagctgtcagactcttttaagggtattttaaaaattagtaaatttgaatgaactaaagatatatctctaccttctcatttgaatatctttagttcattcagatttactaattttggtaaatctgaatgaactaaagatgtatctgtaccttctcatttgatgtattaatcataaaatttcactacaaggtaatttttgcttagtttgatggatgaatgggaaactcaagtccaaatttctgcttaataccaatttctctgagtttcttgaaatgtctttaaaacagacatttttctcaccaaacagtttgagtatctttattaaggaaacccttacgaatcctgaaaattatgctagcatgatttttttatatatagaagtttaaaaataaaccaggtcaggtttgtatatgtaaaattgttgacatcaatgatgtctttccatattcttatctgggcttaagaaatacattctgtatttttccagattctttgtagcctttgaaagatttttacagtacatatgtcttgactgagctgtcctttcttaatacaaaagcgtgtataattttcttaacttgtacagttggtaaacttttatgagaggaattgttattctgagtctgtcagctttcattttattttgctaaggtttttctaatgaatttttaagtgtttgtgtagtaattaagtcatatttcttatccaggtggttaaagcattcataaaggattataaaatttttttttttttttttttttttaaatttctacttaagggcaagtaatttgagaattctgaaattaagcatgatgcttagattgcagtttgttttgcatttgctataattttcaaaattatttttgaagcaagacaaaagtttaatgtcagcttaagtgcttaaatatatcatgctgaccagaatcctgttatttttatatgcatcataaaatttcccatttctgcattaaataaacagaggaggggggtcaagtgatacttagatattggcacacacaaggaacaactgttggcaggcagtatcgattttatgaagagaaagtgaagtttgaaaacttttcaaacttttctagttacaatccaatttttcagatttgataatgcttttccaaagtgaaaataagatacacaataatcattgctctgtgtgattacagataggattatccatctgcatagccttgtaaaagtgccattttatttttagtgctaaattcttgttaaataatgtagttttatatagctgatagaccaacctatatccaaacttttataaaatattaattattcttgtttttctcacacaggcatactccaaatgcttcttccagttcatttttcagccatcagttcaagagccaatgcctttttaaaataaagcttctgtggtcttgtttttaatggctcaactgtctgatgtaattgagtgaaggtttgcactgagaaattagcattcaggccttacccccatgaagtattactgttaacatatgttcggactgcttcccttcaccaatgtgaacaactttttttcccaaacagtgttaaaagccactttgcaacacttgacttcatcttaatgtacattcactgttgttacatacatatctaagtaaatcaaagttttgggtggaagtgttgagaagtatgagttttttgttgtttttgttttacttaaaacttttaatttatccagaatggcagtagctttagcaagcagatggtcacaatctgttttctaaatcattttttattaaatgaatccaaagtatcctagctctttgtcaaagatggtctgtagaaatgtttttaaagattagggatgctgtactttttgaattgttgcagtgttggagatgccattttcacctttttaaaaagatgcattttatttgcaggtttgtgaagttcttgcaaactcttactacagaaatgttttaaatacattctcaggcatgtttgcaaaaatatggcacatgtatacattttaggaaatgttacttttgttaatctttaaaaaatacacctaatgaaagacattccactattatgcgtaatgctcagctttttgtaaagaaatatttaattgtattttgtgtttatacaggtatttcacacaataatttgttcttaatgcagccactataacttgataagtcattgcactatttaaaaagttttagtaatatcatgaatttaatttgcttaagatttagtacatttcagaacttttgaacttttgacaaattgcattggaaaaagaagtctgttaatagtgatttagtctccccgcctcattcccacccccaacaaagcactatcattttcatttggaatgggtattttctgtttcatgatgtattttcaaatagagttcaggatctgcaattcagttcaacacaagtttgttgagctttaaaatgtatttgaagtaatatttaaataggcatttaaaatttcaaattagatgttaaatttatgcatagtaattttgcactgtaaaataattcccttctcccattccttgtctgccattctgaatatgcttattaaaatatttttttaaacatatttgcctacataatactgtgtgaatattttcattagattaattcactaagattttattagagattgtttgaatgatgcatgttattgacaaggcaaatatatatatatacacagtctgtttcttctattcctagacatattgcactactttttcagtggttcttggtcccctttaccacatcttgggtgatgtatttttgtcttcttcccctttgccacaagagatcctttcagtccctagacctccattcactctgtttctcttctgctggattatataatttaaaaataatgtgttcccgtattttgtagtggagttcatatcacattatgttttgcaaaataaaacttgttttgtcacaatattttctttgctatcgatggataattaggagtgggcacttggaataactgagggctggtgaatataataggcaatatttacatggggtgtgtaactaaataccaaatcagatagtaaggttttcccaactataatccatattcatgaaaaatgccagtgtggaaaaccatgtaacatacagaagaacaggagtttccaaattttaaccttttattctaaaaatgactctcttctctcaaaatgactttttctgtatcacataattctactgatacaactttttaccgtaaaaattaactctcttctttaatatcaagttcatcctttgcagaatcttaaagggttttccacacatccatccacccacttacagactgatttcatgtatctgaatatctgattaacctttcttttctaataccagttttccataaactcttgtcatgtacccttagtattgtgctgatcttttgccaactatacggacgtggagtttttccttttcagaatatgattattttcaatttgtctttagttagtataaagaattatagaatgtataatgtaattaaaatgtcattttgcttgcaaaaaaaaaaaaaaaaaa

SEQ ID NO: 608 - DNA, 699 bp, Homo sapiens
atggccacagccgagtcccgtgcgctccagtttgccgagggcgccgcgtttccagcgtaccgggccccccacgccggcggggcgctcctgccgcccccgagccctgcggcagccctgctccctgcgccgcccgcgggccccggcccagcgacctttgcgggcttcctcggccgggaccccgggccggccccgccgccccccgccagcctgggctcgcctgcgccccccaaaggcgcggccgccccgtcggcgtcgcagcgccgcaagcgcacgtctttcagcgccgaacagctgcagctgctggagctcgtcttccgccggacccggtaccccgacatccacttgcgcgagcgcctggccgcgctcaccctgctccccgagtccaggatccaggtatggttccagaacaggcgtgccaagtctcggcgtcagagtgggaaatccttccaacctttggctaggccggagattatcctcaaccactgtgctcctggaactgaaacgaaatgtctgaagccccagctgcctcttgaggtagatgtgaactgcctgcccgaaccaaacggggttggagggggcatctctgactctagctcccaaggtcagaattttgaaacctgttcccctctctctgaagacattggttcaaagctggactcatgggaggaacacatcttttctgcctttggtaacttttga

SEQ ID NO: 609 - DNA, 4490 bp, Homo sapiens
cgggataccttgtttatagtaccttctctttgccagtccatcttcaaattggaattatagaaagtagagggagggatagtctaccgtctctcactggattggtgccacctaaaacattgttatgctggaaatgctagaatataatcactatcaggtgcagacccacctcgaaaaccccaccaagtaccacatacagcaagcccaacggcagcaggtaaagcagtacctttctaccactttagcaaataaacatgccaaccaagtcctgagcttgccatgtccaaaccagcctggcgatcatgtcatgccaccggtgccggggagcagcgcacccaacagccccatggctatgcttacgcttaactccaactgtgaaaaagagggattttataagtttgaagagcaaaacagggcagagagcgagtgcccaggcatgaacacacattcacgagcgtcctgtatgcagatggatgatgtaatcgatgacatcattagcctagaatcaagttataatgaggaaatcttgggcttgatggatcctgctttgcaaatggcaaatacgttgcctgtctcgggaaacttgattgatctttatggaaaccaaggtctgcccccaccaggcctcaccatcagcaactcctgtccagccaaccttcccaacataaaaagggagctcacagcgtgtatttttcccacagagtctgaagcaagagcactggccaaagagaggcagaaaaaggacaatcacaacctgattgaacgaagaagaagatttaacataaatgaccgcattaaagaactaggtactttgattcccaagtcaaatgatccagacatgcgctggaacaagggaaccatcttaaaagcatccgtggactatatccgaaagttgcaacgagaacagcaacgcgcaaaagaacttgaaaaccgacagaagaaactggagcacgccaaccggcatttgttgctcagaatacaggaacttgaaatgcaggctcgagctcatggactttcccttattccatccacgggtctctgctctccagatttggtgaatcggatcatcaagcaagaacccgttcttgagaactgcagccaagacctccttcagcatcatgcagacctaacctgtacaacaactctcgatctcacggatggcaccatcaccttcaacaacaacctcggaactgggactgaggccaaccaagcctatagtgtccccacaaaaatgggatccaaactggaagacatcctgatggacgacaccctttctcccgtcggtgtcactgatccactcctttcctcagtgtcccccggagcttccaaaacaagcagccggaggagcagtatgagcatggaagagacggagcacacttgttagcgaatcctccctgcactgcattcgcacaaactgcttcctttcttgattcgtagatttaataacttacctgaaggggttttcttgataattttcctttaatatgaaattttttttcatgctttatcaatagcccaggatatattttatttttagaattttgtgaaacagacttgtatattctattttacaactacaaatgcctccaaagtattgtacaaataagtgtgcagtatctgtgaactgaattcaccacagactttagctttctgagcaagaggattttgcgtcagagaaatgtctgtccatttttattcaggggaaacttgatttgagatttttatgcctgtgacttccttggaaatcaaatgtaaagtttaattgaaagaatgtaaagcaaccaaaaagaaaaaaaaaaagaaagaaagaggaaaagaaatccatactaacccttttccattttataaatgtattgattcattggtactgccttaaagatacagtacccctctagctttgtttagtctttatactgcaaactatttaaagaaatatgtattctgtaaaagaaaaaaaaaatgcggccttttcatgaggatcgtctggttagaaaacataactgataccaaccgaaactgaagggagttagaccaaggctctgaaatataaagtctaatcttgctctcttttattctgtgctgttacagttttcttcatcaatgagtgtgatccagtttttcataagatattttattttgaaatggaaattaatgtcctctcaaagtaaaatattgaggagcactgaaagtatgttttactttttttttattttatttttgcttttgataagaaaaccgaactgggcatatttctaattggctttactatttttatttttaaattatgttttactgttcatttgatttgtacagattctttattatcattgttcttttcaatatatttgtattaatttgtaagaatatgcatcttaaaatggcaagttttccatatttttacaactcactggtggttttccgcattctttgtacacccatgaaagaaaacttttatgcaaggtcttgcatttaaaagacagctttgcgaatattttgtaaattacagtctcactcagaactgtttttggacacatttaaggtgtagtattaataggttaaaaccaggctttctagaaagaataaacttacatatttatttttaggacatgaaaatagcaatattcttggagattgataaccatagcattaatacgcccattatggtcatttaaattggggtttatttcagcaaacttgttgaatttatttttaagaaagaaatactgtattgggaagttactgttacttgataacaatgttttaacaagaagcaatgttataaagttagtttcagtgcattatctacttgtgtagtcctatgcaataacagtagtgttacatgtatcaagcctagatgttttatacagatgccatatagtgttatgagccaggctgttgaatggaatttctcagtagcagcctacaactgaatagcaagtggcataaagcatatccattcagaatgaagtgccttaaatatagcagtagtcttttttggactagcactgactgaactgtaatgtaggggaaagtttcatgatggtatctatagtcaagacgaacatgtagcatggtgcctatgtagacaatataagagcttccaattttccttcagatatttttaatattaaatatattttagtgacagagtgccaacttctttcatcaggaaaccttattcaggagggtttttaaaaagtgtttaaatgtcaaatgtgaattggtgatgggtgatggagggttcagagaggagtgatcgtcagatgtgtgaatggacggtttaggtgaaaataatcaactgcatagttcccatgcacgctgggcaatgagaatccttggaaacattggtgatgctatcagttttatagctttatttcttaagggggtagggaaaattagttcccattctttcaacccccttaactgtatagctcttttcctagaatagtgacgcaaatctgcatgaacagctaattgtaccatagtgttcattgatacaatcatagcattgtctatttttctcttcatatttatatgggggggagggcgctggatgcaaaagttgaagatcgtgatgctatgatgttagttttccttagctgattttgagggtttttaaaaataaagcaaggttgactaacctacggccacgggaacaggaccatggttaagcaaccatatagaaagctttgttgaaagaaagtatggcatcttgtaccactgccctgactgtcacaactcctaaccttgccattgcctgcctccccctccccttctccttaagagacaatttctgcaggtggcaggtgagcaagcccaggagaatgctgcaatcttgggggtggttttatttatttcttttttgccaaatagagtgtggattcatttcaggggctagctaagccaagaggcagtggtttgggcttgttgtttgtaacaagaaaatgatccacaccactcccccgattcccgggtgcagaattgtaactcggggttgggcctctatatggagtgaccaaaatgccaaaattgtccatctgcctctgagtagggcaatggaaataccaaaccttctgactttgccaaaaagcatacaagcaacctggtcatacataggatgacaaaattctttctggttgtttttaaacaataaagcaataagaacaaatacaatacataggaagttaaaagcacaaaggaatgaacttattaatatttttgaaaaatgcactgggaaaaagttgatgtcaataacagtataaaacagccctatttcttgataaaaaatgacaaatgactgtctcttgcggatgcttggtactgtaatgttaataatagtcacctgctgttggatgcagcaataatttctgtatggtccatagcactgtatattatggatcgatattaatgtatccaatgaaataatcgacttgttcttgatagcctcattaaagcatttggtttttcacataaaaaaaaaaaaaaaaaaaaaa

SEQ ID NO: 610 - DNA, 4530 bp, Homo sapiens
ggttccgcggggctggcgggcgagcgggcggccgggatcggcggcggcggcggcggcggcggcgcttgacagacaatgagggcggcggggcggcgttgagcggcggcggcggcggcggcggcggcgagcgacgcggggcccgggggcggggcggggcgccagccatggacaatcagtgcaccgtccaggtgaggttagagctggggcatcgcgcccaactgcgcaagaagcccaccacggaggggttcactcacgactggatggtgtttgtccgcggccccgagcaatgtgacatccagcacttcgtggagaaggtggtcttctggctgcacgacagcttccccaagcccagacgcgtgtgcaaggagcccccctacaaagtagaggagtcggggtacgctggcttcatcatgcccatcgaggtgcacttcaaaaacaaggaggagccgaggaaggtctgcttcacctacgacctgttcctgaacctggaaggcaacccgcccgtgaaccacctgcgctgcgagaagctcaccttcaacaaccccaccacggagttccggtacaagctcctgcgggccggcggggtgatggtaatgcccgaaggagcagacacggtgtccaggcccagtcccgactaccccatgttacccacaattccactctctgccttctctgaccccaagaagaccaaaccatcccacggctccaaggacgccaacaaggagagcagcaagacctccaagccacacaaggtgaccaaggagcaccgggagcggccccgcaaagactccgagagcaagagctcctccaaggagctggagcgtgagcaggccaaaagctccaaggacacctcgcggaagctgggcgagggccggctgcccaaggaggagaaggcgccaccgcccaaggctgccttcaaggaacccaagatggccctgaaagagaccaagctggaaagcacgtcccccaagggtgggcccccacccccacccccacccccaccccgggcttccagcaagcggccggccaccgccgactcgccaaagcccagcgccaagaagcagaagaagagcagctcgaaggggtcccggagtgctccaggcacctcgccccgcacctcctcctcctcctccttctcggacaagaagccggccaaggacaagagcagcaccagaggggagaaggtgaaggccgagagtgagccccgggaggccaaaaaggccctggaggtggaggagtccaactcagaggacgaggcctccttcaagtccgagtctgcccagtcaagcccgtccaactccagctccagctcagactccagctcagactcagacttcgagccatcccagaaccacagccaaggacccctgcgctccatggtggaggacctgcagtccgaggagtccgacgaggacgactcttcgtcaggcgaggaggctgccggcaagaccaacccggggagggactccaggttgagcttcagcgacagcgagagtgacaacagcgccgactcctccctgcccagccgtgagcccccacccccccagaagccacccccgcccaacagcaaggtgtcaggccggaggagccccgagtcctgcagcaagcctgagaagatcctcaagaagggcacctacgacaaggcctacacggatgagctggtggagctacaccggaggctgatggcgctgcgggagcgcaacgtgctgcagcagattgtgaatctgatcgaggagactggccacttcaatgtcaccaacaccaccttcgacttcgacctcttctccctggacgagaccaccgtgcgcaaactgcagagctgcctggaggccgtggccacatgaccctgggccgcgtgccgggcccccaccgccggggtcctgggaggctgcagccaggcctcgcctgccctcctctcccgtctcgcctgcccgcagcactgccttagcgacagccctgtcctcgcccgcacagcccgctgcactttcctcggcggctccctgcccactctccccgctccatcgccaggagccctggggccgggctgggccacacgggagccgccccccgggctctctgggctcccctcagagagcggctggtgttgaaggcagctctgggcagagacagggccgggggcccctcgcccagccttgggaccagcccccactgctcggcgggctgtgcggcgtcgctgccccagcctttctgagcagcggatcgacggctggggggcatctccagcctcccgaatggttcagaacacaccctccgcccaccctggacctcagaaggccctgcctgtgtgtctgcgtcgtcctccgtgtagacctagcgccggctcctccccggctcgcgctgcgctggggtctgtgctgtatagttctctctattatatatgtgtgtgcactgtctggtcaagagcagtgtccatgtgcgtttctgtggcagcagtgcacgtggggtgggtggggggtgcgtacggtggggcttgtaggttaagatgtctctgcggtggtgtggggctggaggccgagccaggcacggcagctggccctctccaggcgcatggaggaattctccctttgccgttccaaggatgccgccgcctcctaccggggctcccgggggggtcagccaacactacaaagggcagcgagtcctcagggcgcccgggagccaccagtctgctctcgggctctactcagactagcgccaacagtctccgcggacagactcgcatcagccgccctggggctcggcctcctcccataggctcctcttcctctctttcattcaagtcttcaaactttgaaaaaaatatgagcttttgccaaataagacgggatagtttatggagttttctgaggcgcattgaactctggtcagcccctcgagcgtgggctcggccatcagcaggcccggtgggttggccgggctggccctcccaggctgcctttctctctggtcgcggcctggcccgccccggcctccaccgccgcaattcatgctggtgccgcgcccgcagccccactcctggtatgcctgagattctccaggggccaagccggtcctccttcccggcccactcttccagggccaggacgctcccgcggagccagcccatcgtggctgggggtcccaggggctggaggcctgcctggttagcctctgtttcccagacattgactcgaggcgcctccagtcctctcaaccccctgactttcaagtcctttcaagtccttgtgccctgaccaagttatgaggaaaagagggctgagggcctggaggtgggctcgcaccccctcgaacccacctagatgtctcctcctccccagcctatgagttcagacttggggggctccatctgtccctccctgaggtccctcatcttgtccctgctctgattctgtcagcagatcctgaacactccttggtggggacccatgcctccaaggctgcccccaatgccagctgtcctggggaaactccccagaactctcggggaaaggcccgagaaccttcggaggaagcctccgggactcctcgccacctgctctgtttctctcccggccccactgccttcaggtatcaggaagagggcaggcccctgtgccccctctccccttcccagggcggccaacaatactccaccatggggcgcttcctttcttctctggaaactaagacattggactgaaggaactggcctgaggggggctgaccgggggcccgtgctgctgggagctctacgcacaagaggccgccggggtcacggacaggaacctcagcccagggtgctggcctttctccttcgcaggagtcccccaaaatccacacagcgactcgagcagccttccactcagccagaggagggtcgggctcccccgcctgctctcggtggtggcgtctggcccttcctgccgtttccaaggcctccggaagcaccaacccagttctcagttacctcctctggccggaaggcctcacgttgtcctccagagctgctctgggcccagggctggctccgtgaccacctgatggacgtgctgggcagcatgggctcccaaggcagcatccccagctgctctcccaccccaccccagctgcccggcggctgggcccacgagggctctggggacacttccataggaaaggggcctggcactttgtgattgccacgtgtttcctgttaagccgcctgcccccagtgcaaatctctgtgttttgctctctcctgaacaaaaatgtaaaccgacgccggaaagcaaatggtatcgaatacctttcttgcccataagggtttttacaaagaacgtgtctcactaggaactaggacactcatcggcccgagaccaactcctggataaaaggaataaggagaatcgtgtttgtaacgagttacaggattgtttctttcctggattttaaacttttgttaaattgtgaaattatggaggagttttatagaaaaaaaaagtgaaataaagtcagatgggaaagcaaaaaaaaaaaaaaaaaaaaaaaaaa

SEQ ID NO: 611 - DNA, 5140 bp, Homo sapiens
cgcgcacgcagggctagcctcgcccaggcctcctccctcacgccggccgcaggacgggcgcgcacgccaagtgacgctccgaggaggaagcgcagcccccttcccctccctcgctgcccctggcccagcgggagccccccctccccccagtgcgcctgtgcggaggccctcttgattatgtgtgccctctccgggcgcccgcgttagcggccgggtggaggtggggagggaagacgctgaggaggaggaggaggcggaggaggcggtggaggggaggtggggggaatcagcaaggacatggctcctgactcctgtgcggaacgtgagtgactgagcggcaaagcccgaatggtctctagcgaccggcccgtgtcactggaggacgaggtctcccatagtatgaaggagatgattggaggctgttgcgtttgctcagacgagagaggctgggccgagaacccgctggtttattgcgacgggcacggctgcagcgtcgcggtgcatcaagcttgctatggcattgttcaagtacccactggaccgtggttttgcaggaaatgtgaatctcaggagagagcagccagagtgagatgtgaactttgtccccataaggatggagctttaaaaagaacagataatgggggttgggcccatgtggtttgtgccctgtatattccagaggtacaatttgccaatgtttccacaatggaaccaattgttttacagtctgttccgcatgatcgttataataagacttgctacatttgtgatgaacaaggaagagaaagcaaagcagccactggtgcttgcatgacatgtaataaacatggatgtcgacaggctttccatgtaacatgcgctcagtttgccggactgctttgtgaagaagaaggtaatggtgccgataatgtccaatactgtggctactgtaaataccattttagtaagctgaaaaagagcaaacggggatctaataggtcatatgatcaaagtttaagtgattcttcctctcactctcaggataaacatcatgagaaagagaaaaaaaaatataaagagaaggacaaacacaaacagaaacacaagaagcagccagaaccatcacctgcattggttccatccttgactgttactacagaaaaaacttatacaagcactagcaacaactctatatctggatcattgaagcgcttggaagatactactgcacgatttacaaatgcaaatttccaggaagtctctgcacacacctctagtggaaaagatgtttcagagactagagggtcagagggcaaagggaagaaatcttcagctcacagctcaggtcaaaggggaagaaagcctggtggtggaagaaatccaggaacaactgtgtcagcagctagcccttttcctcaaggcagtttttcaggaactccaggcagtgtaaagtcatcttctggaagttcagtgcagtctccccaggatttcctgagctttacagactcagatctgcgtaatgacagttactctcactcccaacagtcatcagcaaccaaagatgtacataaaggagagtctggaagccaggaagggggggtaaatagttttagtaccttaattggcctcccttcaacctcagctgttacttcacagcctaaaagctttgaaaattcacctggagatttgggtaattccagccttcctacagcaggatataagcgggctcaaacttctggcatagaagaagaaactgtaaaggaaaagaaaaggaaaggaaataaacaaagtaagcatgggcctggcagacccaaaggaaacaaaaatcaagagaatgtttctcatctctcagtttcttctgcttcaccaacatcatctgtagcatcagctgcaggaagcataacaagctctagtctgcagaaatctcctacattgctcaggaatggaagtttacagagcctcagtgttggctcatctccagttggttcagaaatttccatgcagtatcggcatgatggagcttgcccaacaactacgttctcagagttgctgaatgcaatacacaacgacagaggtgacagttctacactaacaaagcaagaacttaaattcataggtatttataacagcaatgatgtagcagtatcgtttccaaatgtagtatctggctcgggatctagtactcctgtctccagctctcacttacctcagcagtcttctgggcatttgcaacaagtaggagcgctctctccctcagctgtgtcatctgcagcccctgctgttgctacaactcaggcaaatactctatctggatcttctctcagtcaggcaccatctcatatgtatggcaatagatcaaattcatcaatggcagctcttatagctcagtctgaaaacaatcaaacagatcaagatcttggagacaatagccgcaacctagttggcagaggaagctcaccccgaggaagtctctcgccacgatcccctgtaagcagcttacagattcgctatgatcaaccaggcaacagcagtttggaaaatctgcctccagtagcagccagcatagaacagcttttggagaggcagtggagtgaaggacagcaatttttactagaacagggtactcctagtgacattttaggaatgctgaagtcattacaccaacttcaagttgaaaaccgaagattagaggaacaaattaaaaacttgactgccaaaaaggaacggcttcagttattgaatgcacagctttcagtgccttttccaacaataacagcaaatcctagtccgtctcatcaaatacacacattttcagcacagactgctcctactactgattccttgaacagcagtaagagccctcatataggaaacagctttttacctgataattctcttcctgtattaaatcaggacttaacctccagtggacaaagtaccagcagctcatcagctctttctaccccacctcctgctgggcagagtccggctcaacaaggctcaggagtgagtggagttcagcaggtcaatggcgtgacagtgggggcactagctagtggaatgcagcctgtaacttccaccattcctgccgtgtctgcagtgggtggaataattggagctttgccaggtaaccaactggcaattaatggcattgtaggagctttaaatggggttatgcagactcctgtcacaatgtcccagaaccctacccctctcacccacacaaccgtaccacctaatgcaacacatccaatgccagctacactgactaacagtgcctcaggactaggattactttctgaccagcaacgacaaatacttattcatcaacagcagtttcagcagttgttaaattctcaacagctcacaccagtacacaggcacccccacttcacacagctaccaccaacccatttctcaccatccatggagataatgcaagtcagaaagtagcaagacttagtgataaaactgggcctgtagctcaagagaaaagttgacacctgagaaacatctagaaattgcctatcctgctgttctagcacttcatctggctgcctttgcagtccttttactacagctatgaagaaacgcaacaagaaactcaatgcacaacaaaggattaattgctgcaaggacattcttgtaaggctttgattagttttcttgttgctttgttgcactgaaatggaattcccatgcccctaccccttaccccagttttttgaacatggaaagaaaatttaataactttttaaagtgacataatttacatgcaatatgtttatcaactcaagaatttaatatagttggtacacaactagttttgtttataaattggagatgcaaatagcaaaactaaatacttgctccatttacaaactacttgattttattgtacaagttgaaatatgctcttttgtttgggttacagtatgcttgctctaagtcaaattccaaggaactaatttcttctcctggagttgcattgattcagtattacaaatatatagcacatcacctgggacttggcaatctttgttaaaaaaaaatttcctttctaatgggatttggccaattttggtaatgaagttaggatggtaatgtctgcatctgctaaaggtaattttcttttgagaattgctttctttagtgttaagacctactcatattttgaagaaatcttgagttaagtgagttctgaggctgctgggggaaccagatcaattcaaagctaaatacttctttcagaaaggggccactgtggaaagtgctggtggggtttgcccttgatcaagtgcctccattgtgctgcaagggctgtagacagcagggtgggacagtcagtcctccgagcagcaggaatcatcccgtcacctgcagccttcccatgcttccgcctttattcagaactttctgtgccactgtagatagctcaggcaaaactattacctgggtatttatccactaatgagtcacaagaaaaggagtggatttggtaagaatagagatttgttttatttaaaccacttcccattactgaccattaaaagctcaccactagagttcctgaaacaggtgaaacctgtatgacagcccttccactttggggagccacgcttttgatgtgacagtaccgcagagtgattcccccactgaggatgtcatcatcaaactcttctttggtgtgtgaattattagtggaaaagacccagctgtaattagacctccactgtgtacttagctggaagaacatgttaattctgcaatatgtttcttggttaaacattgcacagttcttacctcatttctgtaaataaagttttgtgaatctgttttgtattgtgacaaattcataagataacattgatattttgatttgtaatatttctaattggtagatttaattgaaaagtaaaattaatttatttttatatgttcaggggaattttaaagtcaaatcttttgtagataatttaaaaaatcagtgtggtttattttacttatttaacccactggttgttattctgtaacagtttgtataaatggtaaattttgaatgtgttgttattttacctagatgtaaaattccacatgtattaaaatgtacaaaatgttttgttaataaaatttaataatgttaaaaaaaaaaaaaaaaaaa

SEQ ID NO: 612 - DNA, 9378 bp, Homo sapiens
cctttctaactgtggcccgcgttgtgctgttgctgggcaggcgttgggcgccggcggtcttcgagcgtgggggcccgctggctttcccttctcagaaactgcgccgggggcgctcgcttgccccggattcggacgcggcgctccccgggctcgtctgaagtgcagatcgccgcagaggccccagtgcccggatgtccatcaggattagcgcgagccaatacgggccgagcccggggctgcgccgaggacgcccggggctcgagagcaggtagtcccgtaacatcggggcgccgcgccgggacgcgtccccgcccggctccgccaaatggtgagcgcggcgctggcagcagggcccgcggggtgaaggcgctcatggacggaagacccctggctctataagctgaattatggcagcccagtcaagtttgtacaatgacgacagaaacctgcttcgaattagagagaaggaaagacgcaaccaggaagcccaccaagagaaagaggcatttcctgaaaagattcccctttttggagagccctacaagacagcaaaaggtgatgagctgtctagtcgaatacagaacatgttgggaaactacgaagaagtgaaggagttccttagtactaagtctcacactcatcgcctggatgcttctgaaaataggttgggaaagccgaaatatcctttaattcctgacaaagggagcagcattccatccagctccttccacactagtgtccaccaccagtccattcacactcctgcgtctggaccactttctgttggcaacattagccacaatccaaagatggcgcagccaagaactgaaccaatgccaagtctccatgccaaaagctgcggcccaccggacagccagcacctgacccaggatcgccttggtcaggaggggttcggctctagtcatcacaagaaaggtgaccgaagagctgacggagaccactgtgcttcggtgacagattcggctccagagagggagctttctcccttaatctctttgccttccccagttccccctttgtcacctatacattccaaccagcaaactcttccccggacgcaaggaagcagcaaggttcatggcagcagcaataacagtaaaggctattgcccagccaaatctcccaaggacctagcagtgaaagtccatgataaagagacccctcaagacagtttggtggcccctgcccagccgccttctcagacatttccacctccctccctcccctcaaaaagtgttgcaatgcagcagaagcccacggcttatgtccggcccatggatggtcaagatcaggcccctagtgaatcccctgaactgaaaccactgccggaggactatcgacagcagacctttgaaaaaacagacttgaaagtgcctgccaaagccaagctcaccaaactgaagatgccttctcagtcagttgagcagacctactccaatgaagtccattgtgttgaagagattctgaaggaaatgacccattcatggccgcctcctttgacagcaatacatacgcctagtacagctgagccatccaagtttcctttccctacaaaggactctcagcatgtcagttctgtaacccaaaaccaaaaacaatatgatacatcttcaaaaactcactcaaattctcagcaaggaacgtcatccatgctcgaagacgaccttcagctcagtgacagtgaggacagtgacagtgaacaaaccccagagaagcctccctcctcatctgcacctccaagtgctccacagtcccttccagaaccagtggcatcagcacattccagcagtgcagagtcagaaagcaccagtgactcagacagttcctcagactcagagagcgagagcagttcaagtgacagcgaagaaaatgagcccctagaaaccccagctccggagcctgagcctccaacaacaaacaaatggcagctggacaactggctgaccaaagtcagccagccagctgcgccaccagagggccccaggagcacagagcccccacggcggcacccagagagtaagggcagcagcgacagtgccacgagtcaggagcattctgaatccaaagatcctccccctaaaagctccagcaaagccccccgggccccacccgaagccccccaccccggaaagaggagctgtcagaagtctccggcacagcaggagcccccacaaaggcaaaccgttggaaccaaacaacccaaaaaacctgtcaaggcctctgcccgggcaggttcacggaccagcctgcagggggaaagggagccagggcttcttccctatggctcccgagaccagacttccaaagacaagcccaaggtgaagacgaaaggacggccccgggccgcagcaagcaacgaacccaagccagcagtgcccccctccagtgagaagaagaagcacaagagctccctccctgccccctctaaggctctctcaggcccagaacccgcgaaggacaatgtggaggacaggacccctgagcactttgctcttgttcccctgactgagagccagggcccaccccacagtggcagcggcagcaggactagtggctgccgccaagccgtggtggtccaggaggacagccgcaaagacagactcccattgcctttgagagacaccaagctgctctcaccgctcagggacactcctcccccacaaagcttgatggtgaagatcaccctagacctgctctctcggataccccagcctcccgggaaggggagccgccagaggaaagcagaagataaacagccgcccgcagggaagaagcacagctctgagaagaggagctcagacagctcaagcaagttggccaaaaagagaaagggtgaagcagaaagagactgtgataacaagaaaatcagactggagaaggaaatcaaatcacagtcatcttcatcttcatcctcccacaaagaatcttctaaaacaaagccctccaggccctcctcacagtcctcaaagaaggaaatgctccccccgccacccgtgtcctcgtcctcccagaagccagccaagcctgcacttaagaggtcaaggcgggaagcagacacctgtggccaggaccctcccaaaagtgccagcagtaccaagagcaaccacaaagactcttccattcccaagcagagaagagtagaggggaagggctccagaagctcctcggagcacaagggttcttccggagatactgcaaatccttttccagtgccttctttgccaaatggtaactctaaaccagggaagcctcaagtgaagtttgacaaacaacaagcagaccttcacatgagggaggcaaaaaagatgaagcagaaagcagagttaatgacggacagggttggaaaggcttttaagtacctggaagccgtcttgtccttcattgagtgcggaattgccacagagtctgaaagccagtcatccaagtcagcttactctgtctactcagaaactgtagatctcattaaattcataatgtcattaaaatccttctcagatgccacagcgccaacacaagagaaaatatttgctgttttatgcatgcgttgccagtccattttgaacatggcgatgtttcgttgtaaaaaagacatagcaataaagtattctcgtactcttaataaacacttcgagagttcttccaaagtcgcccaggcaccttctccatgcattgcaagcacaggcacaccatcccctctttccccaatgccttctcctgccagctccgtagggtcccagtcaagtgctggcagtgtggggagcagtggggtggctgccactatcagcaccccagtcaccatccagaatatgacatcttcctatgtcaccatcacatcccatgttcttaccgcctttgacctttgggaacaggccgaggccctcacgaggaagaataaagaattctttgctcggctcagcacaaatgtgtgcaccttggccctcaacagcagtttggtggacctggtgcactatacacgacagggttttcagcagctacaagaattaaccaaaacaccttaatggagccccaggttgattcaatgccttgggaactatttttgcacattggaagcctcaaaaacagtccagacatttgtttcatcaggacaccaaactctaaaaaagaagcaccacgagatggccaggacatttgtccacttaaactctcaacaacagtgtgatcattggttggacactgtggttatgcagaagcagagatgaggaggctggccccagagatgatcttgcccttcctaactaaaggacagaagtgcaatttagcttaaatgggtgtatgaatggtctagaaacatttctattttttttttaaaccagcaggatacaagttgcaaatgaaatgaggagaaacagtttcaactctgaaagtgaatttcacgtcatctcagtagccacgctagtccattcccagaaggaaatttttttttttaacaatgacttttggtaaagggttttgtggatgattttttttcttttgagttttgggagaaatatttgtttagtaacttctaatggccatctgtaaaccataagtaatgaaggactccactgtgccccactttctgccaatgaacagtggcttgataataccaagtattgttgtaatttataaaattgaaggcaacccccgctcctgccgcccccaatctccccattgcctagagcgctgcacattgaccccagctctgacttctcattactgtgctgaaagtcagcccacgtcggagcggtgaggaggagccacagcacatggggtgccacctcgaggtctgcacaggaggacttggcgctgccatttcctacccctgccatttcccacccctgcttcagcgaaagggactctctaacagggcagtcactgttgactctattctgaatttcctcccttggggaagaagggaaccaacatttatacctgaccagatggctaaagtgcttttaaagttttgtttaagtagagctggaatttgaggtgctgatctgtggtctacagttatgtggtaactcatgttgtccagccaactcagagtttcgtcagtgaacaagaaacatgaaatctgcttcttagagaggctatatttttctgctacaaatattttatatttatagcaaaactagactttcagagtccttgattgtctaggggaagttaactccctgagaggatgtagagatttggggtggttgattagacttttgaaaaactcatcaccacatgccttcactccagagtgttctcagctagatttgatttggttgaggaggaactgtggccctccgtaagttattgccatagtgtatgcattaaaccaagtccattttgaatgacctaaaatgaagtaacacaatcagaaatcccatgtgcccataagcacagatttttctttttcattgaaactttaaaggttattattggaaacattactttgagtgcagtgtttttaaaagccaattcttttttatcccttttagaagtagaatttgcacacttactacaattgaggagtgtcatctctataactttttctccgcctttgtcccattctgcccctgtacatgtttcctaccaagcatgtttcacattttcctattagtggaggagggagaaccatatttatttataatgaagacatctaagatccctatgatgaatgcaggaactctcttggtagtttgtaaatacacaaagggatgtgtcgagggatgggagcgatgcttatctctcacagtgtgagtggtctgtgtgaggctgttccttcagtttcttctccagactgttctttggttgtcactaagtcagaggtctggtccctcatgtttaggtgaaagccagagaatgacagctgtagtcatatctgagcataagaccttgatgtgtgattcctgatgaccggtttcatttattcatgttataaagcaaagccctggtcctttttaaactactagttttaaaaacctgtgttaaatgaacagtaattgcctggtaggtttggtgtgtgtgtagcattgtgtgtccatctgttatatgtaaaggacaaggcaccagaatcaggctttatttcgatattgaagatgttatttaacatctttcttttttccttactcccttagccatcccctccccttttgtcctatcattccctagaacaagccacctgtcaattgtgaagggttgtgttctttatggcaggttctatgcagattgtgccagagcatgtgcgtgttctgttggcaagccacagtgctcccttgactgaagacatttccaggtagatttctcagccagctctaaaacagattgctttttcagtggccttactctttgtgggtttttttttttttctctgaacttgatataaagattttatttgtcccttgaaaaagtaacaaatgtgcatagatcaatttgtactactttggtcattggatatttctgatccttattgcattgtacctaaaggagagtaactaatggtaacctttttaatagagtatgtgaaaggtagtggctgatgaatccttaacgttcatagggtctttttgctgttacggttgtatatagaggtctgaaggatttttaaaatgatttgcactttttcactgcatgcttacaattcccaaaggcaaaatctgtactgaggtagatcatttgaaagggctagattataaaattaagccttagagtatggaaagttcttataacaataatagtacacacttcagagtaagacaaatgcaaagcatcttaaggagtgaaaatagagtgtaaatcttgcctttggcactacaaggtgtgtgtgtgtgtgtgtgtgtgtgtgtgtgtctttagtaggaaatggaagaacactgttttattttttaaagtgtttaatgtttctgtcctttctgtgaattattgaatttaagagccctgctaaataatgaaaaaacactttactaaaatttatcaaattatactgggttcggattgtgaaaacattggccacctagtagcagtggtgaggagtgggagggcccagcaagcatttatcagaaatagaatcacaataggaggagaatttgactgtctgatattatgatttgattacaatactgaatgggaaaagtatctaatattttgtaacaaaaagaccttcatattatctgttttgaccaaaatatgtagctatttcccttacacagattggaccgcacttatctcccttgtcctgtatcctttaatttcaggtctcaggatgtttagaaagctaaaaccccctacccctttctggctgaaaacttgccttatttggtatcttacacattaatgttactagcatcaggagcttactgttttattatgattcatcttcagtaatttttagaagcaagaagaaagccattgtgtcctctacaattaacaaaacttatctctgatatacaaagggatataaatatatacacttaaatagagaaaaagaggttgattgaattgtgcctttgagtgaacccagtttttaaataccgctgtgtttgtttcgccatggcttcagggatgctacatggctcttgcaccttttactcctctgctttatgaagtttgagttgtatttgtgcatcttaaagtaggttgaggcttgaggctgggctttcgggtttttttgttttttgttttgttttgttttgttttgttttcttgtacttaaacctgcttgcttcctaccacagattctttattttcccaaacactacaaaaaaacttttaaaactttgccatttcatctgtttacactctttgccactgattagcagtatttaaatcttgcaagaatattttgtgctttctttagaaacacaagagtatagatttttctcactgaaaagtgagagttacgcattgcagccatgaagggatgctaggatcaattatggcagtaccttttttcccctcctgttcttgagccagttgtctcttttgttttgggtcccacttaggattaatggatgtaaggtattttcctgtgcctttattttgtgtcattctattggaaggaggtgtaacggcagaatagcatcgtgttgggggttttccttcaaacactgcaagtgatattgccaccatgtgaacctcaaatatgcaatccagttgtgttggtttctcggtgacttggagtgttcatctcttcatgaattgtgagcactgaccatgttcttcagttcttaattatggtgagttgacaaataccaactactgcttttctttaggtggctataaatttcttactgtcaggaggaaatgacattatattctgttccactgaacgtcagagatcagcaggcactgtactgggtagagaagtgcctatacttctctacctaagagggcaggagggaaaccctacagctccttgtgagcctatatattagtatatcggcctggagaggacaagggaataagaccactcatagtgaggctggccaagctgcactggtcggaccaggcagtggctgacctaaggaagacaacttgctttgcttaaaagtagattttttaagcaatgcttaacacaggcagcattcacctttgttcaggccatcgacatgtattgttaaaattactgcatatccccctcagatatcaagtatacactgttcatgttggggttgtgtgtgtgtatgtgtgtatgtacgcacgcatgtgtcccaaatcttgttttaattttttttttctgaatgtgatcatgttttggatgatacctgagcagggttgccttttttttatttattaccattatatattatattatattatattatatattttttgctttcttataactttggaggaaagtcaaatcttggtattattaaaattgttttaaaaaggagtaaattttccagttgataaatgaaaatcactggcctatgtttaataagtttttctttaattactgtggaataacgtgccagctatcatcaacacaatgattttgtacatagggtagggaagcagtgatgctctcaatgggaagatgtgcaacacaaattaaggggaactccatgtattttacctacttcagcaatggaactgcaacttggggctttgtgaataaaatttagctgccttgtatagtcgtttgaaagaatatgtgatctgtgagagaattatagtttttttttagaagaaaaatctgcaaaagatctttccaaagacaatgtgccacagatcttttgttctctgtaatgaggattaattgctgtttaaacaaaaatgtaattgttcatctttaaattctttccttttcataagaggatcaagctgtaaaaaaacaaaaaaattaataaaaatttcgagaaatca

SEQ ID NO: 613 - DNA, 3439 bp, Homo sapiens
acggcgcatgctccgcaatcatcttctttaccctggagctgctgctgctgctgctgcttttgcttttggggctgagtttaataagcgagcgagcgagcaagcgagcgcggggggaaaaaggcagagaatgtccgccatctaccctccgctcctgggcgcgctctcattcatagcagcctcttcatgaattacagctgagggggggcggaggaggggggggtaccacacaacaccccagcaaacctccgggcccccaggcatggctagctcgtgtgccgtgcaggtgaagctggagctggggcaccgcgcccaggtgaggaaaaaacccaccgtggagggcttcacccacgactggatggtgttcgtacgcggtccggagcacagtaacatacagcactttgtggagaaagtcgtcttccacttgcacgaaagctttcctaggccaaaaagagtgtgcaaagatccaccttacaaagtagaagaatctgggtatgctggtttcattttgccaattgaagtttattttaaaaacaaggaagaacctaggaaagtccgctttgattatgacttattcctgcatcttgaaggccatccaccagtgaatcacctccgctgtgaaaagctaactttcaacaaccccacagaggactttaggagaaagttgctgaaggcaggaggggaccctaataggagtattcataccagcagcagcagcagcagcagcagtagcagcagcagcagcagcagcagcagcagcagtagcagcagcagcagcagcagcagcagcagcagtagcagcagcagtagcagcagcagcagcagcagtagtaccagtttttcaaagcctcacaaattaatgaaggagcacaaggaaaaaccttctaaagactccagagaacataaaagtgccttcaaagaaccttccagggatcacaacaaatcttccaaagaatcctctaagaaacccaaagaaaataaaccactgaaagaagagaaaatagttcctaagatggccttcaaggaacctaaacccatgtcaaaagagccaaaaccagatagtaacttactcaccatcaccagtggacaagataagaaggctcctagtaaaaggccgcccatttcagattctgaagaactctcagccaaaaaaaggaaaaagagtagctcagaggctttatttaaaagtttttctagcgcaccaccactgatactcacttgttctgctgacaaaaaacagataaaagataaatctcatgtcaagatgggaaaggtcaaaattgaaagtgagacatcagagaagaagaaatcaacgttaccgccatttgatgatattgtggatcccaatgattcagatgtggaggagaatatatcctctaaatctgattctgaacaacccagtcctgccagctccagctccagctccagctccagcttcacaccatcccagaccaggcaacaaggtcctttgaggtctataatgaaagatctgcattctgatgacaatgaggaggaatcagatgaagtggaggataacgacaatgactctgaaatggagaggcctgtaaatagaggaggcagccgaagtcgcagagttagcttaagtgatggcagcgatagtgaaagcagttctgcttcttcacccctacatcacgaacctccaccacccttactaaaaaccaacaacaaccagattcttgaagtgaaaagtccaataaagcaaagcaaatcagataagcaaataaagaatggtgaatgtgacaaggcatacctagatgaactggtagagcttcacagaaggttaatgacattgagagaaagacacattctgcagcagatcgtgaaccttatagaagaaactggacactttcatatcacaaacacaacatttgattttgatctttgctcgctggacaaaaccacagtccgtaaactacagagttacctggaaacatctggaacatcctgaggatataacaactggatgcatcaagaactattgtgttttttttttttggttttttttttttttggttgtgattttttgttcttgttgtttatatgaaaacactcaaaatgatgcaaccaaaagggaaaaaataaaaatcaaacaaccttcagctttatttttctttaaagccagtcatcatctcttgataaaggagaggttaaagcaaaccagcctcagcggaccactcttctctccaaggaaatccccgggaagagttagcctggatagccttgaaaacaaacaaatcaaacacaacacaagaaaactcaaagaatgtgtatggtatcatgtatctctctgtggtggttcattccacaggacgaatgcatattcaacacactgccttattacataactgatctatttattatcgcatacagatattctaagtcgttgagggaatgacaccatcagacattataagtacttggtcccgtggatgctctttcaatgcagcacccttgccatcccaagcccagtgaccttactcgtataccgtgccactttccaccaactttttccaagtcctttaactcgttgcagtctgtattttccaccttttgtttttccagttccaggacacagattatcaactggggggaccaaatagccaccttgattttcttctttgtggtctttttcctgaaagttggggcccagtccttggctgtatccatgtaatgatcttggaccatggtagaaaatgcaccaaataggatcatatgaattgctgtctagccttagtcaataaacttgtaggacttttaaacaaaagtgtacctgtaaatgtcctgaatccagcattgttgagctgtcatcaacattcttgtgtctgttttactgttacaatattaggtgaatatggaagtaaaggcattccacaggatcatcatttaaaaaaaaagaattctggtcctgttttctaaaaaaaaaaactgttgtagaaattcttaatttggatctatttattagtcagagtttcagctttcttcagctgccagtgtgttactcatctttatcctaaaaatctggaatcagagatttttgtttgttcacatatgattctcttagacacttttatatttgaaaaaattaaaatctttctttggggaaaaattcttggttattctgccataacagattatgtattaacttgtagattcagtggttcaatacctgtttagttgcttgctaatatttccagaaggatttcttgtattggtgaaagacggttggggatggggggatttttttgttcttgttgtacccttgttttgaaactagaaatctgtcctgtggcatgcaaaagaaagcaaattatttttaaaagaaaaaaaccaaagtacttttggtgtcattattccatcttctccataagtggagaaatgaaaagtaagaacagctcatcttcaaagtttttactagaaattc

SEQ ID NO: 614 - DNA, 4981 bp, Homo sapiens
gcggccgcggaggcggaggcagccgcggaggcggaggcggccggcggggggtggcgaggggcgccgggcccccgcggacctgtcgtcctcggcccgtcctccggccccggccccgcgcggctgaggaggcgcggccaggaccatgtcggcgggcggccgtgacgaggagcggcggaagctggccgacatcatccaccactggaacgccaaccggctggacctgttcgagatcagccagccgaccgaggatttggagttccatggagtgatgagattttattttcaagataaagctgctggaaactttgcaacaaaatgtattcgggtctctagtactgccaccactcaagatgtaatcgaaacgctcgcggagaaatttcgacctgatatgcgaatgctgtcctctcccaagtattcactctatgaagtgcatgtcagcggagaaagaagattggatatagatgagaaacctctagttgtacaactgaattggaacaaagatgatcgggaaggcagatttgttcttaagaatgagaatgacgccattcctcctaaggctcaaagtaatggacctgaaaagcaggaaaaagaaggggttatccagaacttcaagagaactctctcaaagaaagaaaagaaggaaaaaaagaagagagaaaaagaggcattgcgacaggcatctgataaagatgatagacctttccaaggggaggatgttgaaaattctcgactggctgctgaggtttacaaagacatgccggaaaccagctttactcgaaccatttctaatcctgaggtggttatgaaacgacggaggcagcaaaaattggaaaagagaatgcaggaatttcggagctcagatgggcggcctgattcaggtggaacattgagaatttatgcagatagtttaaaaccaaatattccctacaagacaatcctgctgtctactacagatcctgcagactttgctgtggctgaagctttagagaagtatggtctggaaaaagaaaaccctaaggattactgcatcgcccgggttatgcttcctcctggagcccagcattctgatgaaaagggtgctaaagaaattattcttgatgatgatgagtgtcctttacaaatcttcagggaatggccaagtgacaaagggattttagtctttcagttgaagaggaggccaccagaccacatcccaaagaaaaccaagaaacacttggaaggcaagacacccaagggaaaggagagagctgacgggtctggctatggctccacccttcctccggagaagctgccctatttagtagagttaagcccagatggttctgactctagagataagccaaagctttaccgccttcagttaagtgttactgaagttgggacagaaaagttggatgacaactctatccagttgtttggcccaggaattcagccccatcactgtgaccttaccaacatggatggagtggtcactgtgacgcccagaagtatggacgcagaaacctacgtggaaggccagcgcatctcagaaaccaccatgctgcagagtggcatgaaagtgcagtttggggcgtcccatgtatttaagtttgtggaccccagtcaggatcatgctcttgcaaaaagatctgtggatggaggcctgatggttaagggcccaagacataaacctggaattgttcaggagacaacttttgatttgggaggagatattcatagtgggacagcattaccgacaagcaagagcaccactaggctggacagcgacagagtgtcgtctgcctctagcacagccgagcggggaatggtgaagccgatgatcagagtagaacagcagccagattatcgcaggcaagaaagcagaacacaggatgcttctgggcctgagctgatactacctgcaagcattgaattcagggaaagttctgaagattcatttttgtctgccattataaattatactaatagctctacagtccactttaagttgtcccctacatatgtattatatatggcatgccggtatgtattgtccaaccagtacagacctgacatcagccctacagagcgcacacataaagtcattgcagtcgtcaacaagatggtgagcatgatggagggtgtcatccagaaacagaagaatattgcaggggcacttgccttctggatggcaaatgcatctgaacttctcaacttcattaagcaagaccgagaccttagtcggatcacactggatgctcaagatgttttagcacatttggttcaaatggcatttaaatacttggttcactgtcttcaatcagaacttaataattacatgccagcctttctagatgaccctgaagagaacagtctgcaacgaccaaaaatagatgatgtgctgcacacgctcacaggagccatgtccttgctacgacgctgcagagtcaatgccgccctgaccatccagctcttctctcagctcttccacttcatcaatatgtggctgttcaatagattggtgaccgacccagattcggggctgtgctcccattactggggtgcgattatccgtcagcagttgggccatattgaagcctgggctgagaagcaggggctggaactggctgcggactgtcatctgagcaggatcgtgcaggcaacgactttgcttaccatggataagtatgcacctgatgacattccaaatataaacagcacctgctttaagttaaattcattacaacttcaagccttattacagaactatcactgtgcacctgatgagccttttatcccaacggatcttatagaaaatgtagtgactgtggctgaaaacactgccgatgagctggcccgcagtgatggaagggaagtgcagttggaggaggatcctgatctgcagctgccgtttcttttgccagaagatggttattcttgtgatgttgtcagaaacattccaaatggtttacaagaatttttagaccctctgtgccagagaggattttgcaggttaattcctcacacacgttcaccaggtacttggacaatatattttgaaggtgcagattatgaaagtcaccttctgcgtgagaacacagagctggctcagcctctgaggaaagaacctgaaataatcactgtgaccctaaaaaagcagaatggaatgggccttagcattgttgcagcaaagggtgctggtcaagataaactaggaatctatgtgaagtcggttgtgaaaggaggtgctgcagatgtggatggacgtctagctgcaggtgatcagctcctcagtgtggatggacgaagtctggttggactctctcaggaaagggcggcagaactcatgacaagaacaagctctgtggtgacactggaagtagcaaagcagggtgccatctaccacggtctggccacccttctcaatcagccatcccccatgatgcagagaatttcagatcgtcgtggctcaggtaaaccccgaccaaagagtgaaggctttgagctctataataattcaactcaaaatgggtctcctgagagtcctcagctgccttgggcagaatatagtgaaccaaagaaattgcctggtgatgacagactgatgaaaaatagagctgatcaccgttccagccccaacgtagcaaatcagcctcctagtcctggagggaaaagtgcatatgcctctggaacaacagcgaagataacatctgtctctactggaaacctctgcactgaggagcagacgcctccgcctagacctgaagcctaccccatccccactcagacgtacaccagagagtattttaccttcccagcttccaaatcccaggatcggatggctcctcctcagaaccagtggccaaattatgaggaaaagccacatatgcacacagatagtaatcattccagtattgcaattcagcgtgttacacgttcccaagaagaacttcgagaagataaagcttaccaacttgagcggcatcgaatagaggcagctatggaccgaaagtctgatagtgatatgtggataaatcagagctcctcactggactccagtacctctagccaggagcatctgaaccattcctctaagtcggtcacccctgcttccacactgaccaaaagtggccctggccgttggaaaacaccagcagccataccggccacccctgtggccgtctcccagccaatccgaacagacctgcctccgccacccccgccacctccagtccactatgccggtgatttcgatggaatgtccatggatttgcctctcccaccacccccttccgccaaccagatagggctgccgtctgcgcaggtggctgctgctgaacggagaaagagagaagaacatcagcgttggtatgagaaggagaaggcccgcctggaggaggagcgggagaggaagcggagagagcaggagaggaagttgggccagatgcgcactcagtccttaaaccctgctccgttttctcccctgactgcacagcagatgaagcccgaaaagccttccacactccagcggccacaggaaacagtcattcgggagctgcagcctcagcagcagccccgcacgatcgagcgcagagacttgcagtacattacagtcagcaaagaggagctttcctcgggggacagtctgtcccccgacccgtggaagcgggacgccaaggagaagctggagaagcagcagcagatgcacatcgtggacatgctgagcaaggagatccaggagctccagagcaaaccggaccgcagcgccgaggagagcgaccggctgcgcaagctcatgctggagtggcagttccagaagagactccaggagtcgaagcagaaggacgaagatgacgaggaggaggaggacgatgatgtggacaccatgctgatcatgcagcgcctggaggctgaacgaagagcgagggtaaaggggggagtgctttggctgtgcccatctgtggtccctattttagcttctgcgtgtttcccatggggatag

SEQ ID NO: 615 - DNA, 7500 bp, Homo sapiens
agctcatgggagtatgaaggagatggtaggaggctgctgcgtatgttcggacgagaggggctgggccgagaacccgctggtctactgcgatgggcacgcgtgcagcgtggccgtccaccaagcttgctatggcatcgttcaggtgccaacgggaccctggttctgccggaaatgtgaatctcaggagcgagcagccagggtgaggtgtgagctgtgcccacacaaagacggggcattgaagaggactgataatggaggctgggcacacgtggtgtgtgccctctacatccccgaggtgcaatttgccaacgtgctcaccatggagcccatcgtgctgcagtacgtgcctcatgatcgcttcaacaagacctgttacatctgcgaggagcagggccgggagagcaaggcggcctcgggagcctgcatgacctgtaaccgccatggatgtcgacaagctttccacgtcacctgtgcccaaatggcaggcttgctgtgtgaggaagaagtgctggaggtggacaacgtcaagtactgcggctactgcaaataccacttcagcaagatgaagacatcccggcacagcagcgggggaggcggaggaggcgctggaggaggaggtggcagcatggggggaggtggcagtggtttcatctctgggaggagaagccggtcagcctcaccatccacgcagcaggagaagcaccccacccaccacgagaggggccagaagaagagtcgaaaggacaaagaacgccttaagcagaagcacaagaagcggcctgagtcgccccccagcatcctcaccccgcccgtggtccccactgctgacaaggtctcctcctcggcttcctcttcctcccaccacgaggccagcacgcaggagacctctgagagcagcagggagtcaaaggggaaaaagtcttccagccatagcctgagtcataaagggaagaaactgagcagtgggaaaggtgtgagcagttttacctccgcctcctcttcttcctcctcctcttcctcctcctctggggggcccttccagcctgcagtctcgtccctgcagagctcccctgacttctctgcattccccaagctggagcagccagaggaggacaagtactccaagcccacagcccccgccccttcagcccctccttctccctcagctcccgagccccccaaggctgacctttttgagcagaaggtggtcttctctggctttgggcccatcatgcgcttctccaccaccacctccagctcaggccgggcccgggcgccctcccctggggactataagtctccccacgtcacggggtctggggcctcggcaggcacccacaaacggatgcccgcactgagtgccacccctgtgcctgctgatgagacccctgagacaggcctgaaggagaagaagcacaaagccagcaagaggagccgccatgggccaggccgtcccaagggcagccggaacaaggagggcactgggggcccagctgccccatccttgcccagtgcccagctggctggctttaccgccactgctgcctcacccttctctggaggttccctggtcagctccggcctgggaggtctgtcctcccgaacctttgggccttctgggagcttgcccagcttgagcctggagtcccccttactaggggcaggcatctacaccagtaataaggaccccatctcccacagtggcgggatgctgcgggctgtctgcagcacccctctctcctccagcctcctggggcccccagggacctcggccctgccccgcctcagccgctccccgttcaccagcaccctcccctcctcttctgcttctatctccaccactcaggtgttttctctggctggctctacctttagcctcccttctacccacatctttggaacccccatgggtgccgttaatcccctcctctcccaagctgagagcagccacacagagccagacctggaggactgcagcttccggtgtcgggggacctcccctcaggagagtctgtcttccatgtcccccatcagcagcctccccgcactcttcgaccagacagcctctgcaccctgtgggggcggccagttagacccggcggccccagggacgactaacatggagcagcttctggagaagcagggcgacggggaggccggcgtcaacatcgtggagatgctgaaggcgctgcacgcgctgcagaaggagaaccagcggctgcaagagcagatcctgagcctgacggccaaaaaggagcggctgcagattctcaacgtgcagctctctgtgcccttccctgccctgcctgctgccctgcctgccgccaacggccctgtccctgggccctatggcctgcctccccaagccggcagcagcgactccttgagcaccagcaagagccctccgggaaagagcagcctcggcctggacaactcgctgtccacttcttctgaggacccacactcaggctgcccgagccgcagcagctcgtcgctgtccttccacagcacgcccccaccgctgcccctcctccagcagagccctgccactctgcccctggccctgcctggggcccctgccccactcccgccccagccgcagaacgggttgggccgggcacccggggcagcggggctgggggccatgcccatggctgaggggctgttgggggggctggcaggcagtgggggcctgcccctcaatgggctccttggggggttgaatggggccgctgcccccaaccccgcaagcttgagccaggctggcggggcccccacgctgcagctgccaggctgtctcaacagccttacagagcagcagagacatctccttcagcagcaagagcagcagctccagcaactccagcagctcctggcctccccgcagctgaccccggaacaccagactgttgtctaccagatgatccagcagatccagcagaaacgggagctgcagcgcctgcagatggctgggggctcccagctgcccatggccagcctgctggcaggaagctccaccccgctgctgtctgcgggtacccctggcctgctgcccacagcgtctgctccacccctgctgcccgctggagccctagtggctccctcgcttggcaacaacacaagtctcatggccgcagcagctgcagctgcagcagtagcagcagcaggcggacctccagtcctcactgcccagaccaaccccttcctcagcctgtcgggagcagagggcagtggcggtggccccaaaggagggaccgctgacaaaggagcctcagccaaccaggaaaaaggctaaatccacccttacccctcctgacccccccaagtggagggaacagatcctggcctgaggggtcctagcctggagcaggcgcctgcgcccagaccctggagagccttgacccagagcctgtgctgaggtccagggagtgtggagagctcctggtgtcgaggactgagactgagaggggagccccctccatctggcccccttccctttccgcactgtccgctttgtgaggctcagaggaaggacagtctgcaagcccgcctaggaggtccatccccagcaaatgttttggaggtccccccagagagcagagtgggccatggcagaagtagggggttggttggacctgtcacatgaaatggatcagcacttgaatggggagaagtggagggagaggccctgggcctgtccctgcggggaaatcttttatggaagaagggctggacccactttacctgcagtttcttcccagctcgggcagatggcagaagggaccccttggactttttctcgccatccctccccccagcgcaggggcacaagctgagcttgtaaaagcccacagatgttgggggctggagaaggggcaggagagcatcacactcagccccagcctcctcaacctcttggggccccgtgatggggaggagagggcaggtgcggggaggctctggccttccttggtgccccgccctttgtttgcactattggacttaggagtgccgagggtggggagatggagctgcccgtctcagtgtgtgagtgtgtgtgtgcgtgcatgtgtgtgtgtgtgtgtgtgtgtgtgtgtgtctgtctgcctgtctctctcctcctggacccagggcagccaagggcagggataggcgcagtggtcagatgaagcagcgccagagaggggacctcccagctcttatttgcaccctccccacctcaccaactttggtccctctctgggggcatgaatggttaacaaacaccagagcagtactccaatattggagagtcgctgggggcacagggctttgaatcagggtagtatcctgccttccctcccctgaccccacatggtctcagggcccccttagggccccctaccccactgatagcttcctccttctctggcacaaggggagccccagggcttgggggagggcgtaaggtggggggaaatgccactgcttttagcaaaagcctccctcccagaattagccagcttgcctcctgcaccccacccccaccaaccaggggagccactaagctgactaacaactgtcccctcacccaccagctatttccccagggtagagtgggcaattctcaccttcaaagagtccccgcctgcccaggcctttggcacagaggctgagtggacagtcaggagagaggcgagaggcaaggcgaagcctgtgtccctgtttcagttgcactggggttggagcccagggtaggggtttccagcttccccaggctccggccttgtcagtctctttgcatgtgtggatttttctgtgtgtgtttctgtttgggtttttgttgttgggttttttttttttttttaataaagaaaagaagatgtgtatatttttggcaacgacagaaacgtagtgcagatatatttttgcctgtgctgctcaactgttttttttttctgatactgaaaataatattaatattcctgttgataagactttgtaagatgttagggagctgataatggaggggggtgggaatccttcaaaggcaatttcttaggcacttgcaagggcttgggggagggggaggcagttgtgatgacctcagaaatactcactttttattaatgctaaatatgttagaaagaaatgatagcattcagcattttattcttcttaatctattaagctgtgtaactccctgccccaaaccactgaaaagaaaagtaaccttcaggccaggcgcggtggctcacgcctgtaatcccaacactttgggaggctgaggcgggcggatcacttaaggtcaggagttcaagaccagcctggccaacatggtgaaaccccgtctctatcaaaaattagccgggcatggtggcacgtgcctgtaatcccagctacttgggaggctgaggcacgagaattgcttgaacccaggaggctgaggctgcagtgagccaagattgtgccactgcactccagcctgtgtgagagagtgagactctgtctcaaaagagaaaaaaaaagaaaagtaaccttcagagattcttagaagagttgctcattcacacccacgcccttgcccaaggctggcccacttagagcgaaacttaacttttgtctggatgggaagagaagtaagtctaccccgaggttgccatgttgaagagtgagaggtccaagtgattctgtgcattgaaaccaagacaccccacccagaacacttcttccctccctcagcccaaaccaaaggctggggttctcatctccaagtggctgttctccaactttcccaagccgcttgcattccccagactggactactgtggcggttaggttagatttgaagacggggcccaggctgggtatgaacgggtgcagccctcttctcctcttcccccccacatctctcatgagagaggtagtggcatttccttctcagggagcttcaatgggaaaggtctcgaaagcttcaggaggagcagaataccaacgcagggggatggctgtaacgatctcaccgtctcctaacctcagtcccttttttgagagtgaatggtggagggtgggaagggacccagatttgtagatctctttgtctgggggaggggaaggatgtggtttgcagagcggaagcagagtttggaaacgcatgagagcagagcttcgtgtgttcccaccctcagtgaggaggtgtgagtgggtgagcatgtggagttgggtgttcccaccctcagtgaggaggtgtgagtgggggtgcatatagaggcagtgcctgctgtggggtcacaactggtgcatgccagcgccaaagggacctgtctttaggggtcatttcagccagctcctcccatcacagatgacagctccaagcctagaaggggctcagtgacagggccaggacaagccctcaggactgtggcctcctggcccttggttcccctgccccacaacatggtctccacatggctggctggctggctgtccctgtgtgtgtgtgacacacggtgtgagtgcagggctgtgcccggggtgggagggtgtctatgtggcactgactgtcttagctcagagctggtggatcctctccatggacaatgacactttaaggattgtcttggtttgtttttcctatttgtggggtattttccccctcaggctcctgggtctgctgctgcctcaaggtgtcctgaccttgaggctgatgaggggacccctgcctgtttcccccatactgagttctagggaggtgctcaccccagactcttaggaagggtctagagaaatgagaggagcccaagccaggggccagctccgagaaagggtaacctccacgcttctctctcccaaattggaaatgaagacaggttttcaaaggcacaggctccccctgccagcttctaggatcttccttggtgtgcaatgggccagttaggggtaggcagcttgcacccagttctcctttatctcaacttattttcctggggagaggtgcctagagggattgaggtaacttcaactgggaattccaaggaaggtgggcaagtagccttggctctctcccaccatgtccatcaggattgagagtgtgtctagctcccgaccactttgtcttgacctactgaaaagttgggaactgaggggtgccttcattcccctttgttcactttctccagctcaacttgggacttgggtggtgggactggagacctcacccctgctcccgtcccgccccctttctatcccaacctgtttccatgtagcagacccttcctagggagcagggaggggaagccacagattgcaaacccaggggctcctttttcattctttctaaaaccttgatatcctcagcccaaaggcgatgcccccctgccacctccaagcctggaattgtgcataacccggatcttgtatctttgtataacggatgttatttgtacgaagggcagttcgtaaacagcacttgttcttttaataaaagaatgttttgcaaaaaaaaaaaaaaaaatccgaaga

SEQ ID NO: 616 - DNA, 3365 bp, Homo sapiens
aaaagggggagggaactgcggctaaggagacgttcggtgatgggagcgcaatatatgaggggatacagtgcctcaggtttaaaagagcaggaagctgagtgagaggttgcagaaaaagtgtcttcgctcggcagaggttacaggtggcatctcagaaagagctttgaggctacaggctgtagtcgggaaggggatcggagaactgtgtgaagggacagcttagggactagcgtcctgggactagggggaagttcgcgactttctgaagactggcaggaatgtgcctcctggccctcgatgcttcccccctgaggggaggcatcgtgagggactgtggcaggcttcactgaacgctgagccggggaggtccaactccacgtatggatccggggaatgagaattcagccacagaggctgccgcgatcatagacctagatcccgacttcgaaccccagagccgtccccgctcctgcacctggccccttccccgaccagagatcgctaaccagccgtccgagccgcccgaggtggagccagatctgggggaaaaggtacacacggaggggcgctcagagccgatcctgttgccctctcggctcccagagccggccgggggcccccagcccggaatcctgggggctgtaacaggtcctcggaagggaggctcccgccggaatgcctggggaaatcagtcatatgcagaactcatcagccaggccattgaaagcgccccggagaagcgactgacacttgcccagatctacgagtggatggtccgtactgtaccctacttcaaggacaagggtgacagcaacagctcagcaggatggaagaactcgatccgccacaacctgtccctgcacagcaagttcatcaaggttcacaacgaggccaccggcaaaagctcttggtggatgctgaaccctgagggaggcaagagcggcaaagccccccgccgccgggccgcctccatggatagcagcagcaagctgctccggggccgcagtaaagcccccaagaagaaaccatctgtgctgccagctccacccgaaggtgccactccaacgagccctgtcggccactttgccaagtggtcaggcagcccttgctctcgaaaccgtgaagaagccgatatgtggaccaccttccgtccacgaagcagttcaaatgccagcagtgtcagcacccggctgtcccccttgaggccagagtctgaggtgctggcggaggaaataccagcttcagtcagcagttatgcagggggtgtccctcccaccctcaatgaaggtctagagctgttagatgggctcaatctcacctcttcccattccctgctatctcggagtggtctctctggcttctctttgcagcatcctggggttaccggccccttacacacctacagcagctcccttttcagcccagcagaggggcccctgtcagcaggagaagggtgcttctccagctcccaggctctggaggccctgctcacctctgatacgccaccaccccctgctgacgtcctcatgacccaggtagatcccattctgtcccaggctccgactcttctgttgctgggggggcttccttcctccagtaagctggccacgggcgtcggcctgtgtcccaagcccctagaggctccaggccccagcagtctggttcccaccctttctatgatagcaccacctccagtcatggcaagtgcccccatccccaaggctctggggactcctgtgctcacaccccctactgaagctgcaagccaagacagaatgcctcaggatctagatcttgatatgtatatggagaacctggagtgtgacatggataacatcatcagtgacctcatggatgagggcgagggactggacttcaactttgagccagatccctgagtcatgcctggaagctttgtcccctgcttcagatgtggagccaggcgtgttcatatctactctttacccttgagccctccccaggaatttgggaccctgctttagagctagggtggggtctggtcacacacaggtgttgaagaaattataaagataaagctgccccatctggggacgatatggggagggagatgggaggggaaaggggagagggtttttctcactgtgccaattagggggtaaggccccctctcaggagccatcatcggctttccccattcctacccacttaggctttgtagcaagatgagcaatgctgttggaaatgtgaagtcaccagtggccttacccctgcctttgggagcaggatttttttgtagagagtcttatctgagctgagccaggctagctggagcctgggatttctatgcagtggccccttaggccagtgatgtgcggtgggtgggctgtttaggggatctggaagggccaaggtctgagcactggagtggctcgccaggccaaatcacccttagaaggctgcagataacagaaaggctttttataaacttttaaagaaatataaacacaaatatagagattttttaaccatggcagggtgctagtggtgggcagaatgcttttttttctttctgaaggctttgtgatagtgacatgatacaaacactacagacaataaatattaggagacacagggaagtggggagaggtggggagtaatagtaaacacagggaagagctcccctacggaccaggtatagagaaaggtctatgcagaaataggttagagtttccctaacaaaaaagctaacccaggtcccctcattccttcaacttgtgcctgggagtgtgtggtgttagggtgcagccacactcttctatgacccagcatgggttagtgctatggtgggagagtacattgaaggcctggaattagcttggggccagggaagggactgggaggggagagaagagaaggagggaaggatttaggatggtaaagttaggtacagagacctccctgttcaaggcccctgacagctgtccctgcccttcttccccttccctgactgcaggggttatgtggaagtgtgtgtggcagcaggcagcggggaggggaggaacagggaagggggagctggggagcttggctgagggtctgggaaatgagcagggatggggggggatgtggatcaggtttactagcacctgccagggaggccatctggggctccttctccaccccagcccccaaagcagcccttcccccagtgccctttgcatcgtcccctcccccacccctgctgtgggttcccatcatttcctgtgtcagcgcctggcctacccagattgtatcatgtgctagattggagtggggaagtgtgtcaaatcaataaatgaataaattcaataaatgcctataaccagcaaaaaaaaaaaaaaaaa

SEQ ID NO: 617 - DNA, 1388 bp, Homo sapiens
gtctctgccaagcgcctgttggtaggaacctgcttggtcgcgtctgagggggcttgtaggtggctctggctgaaacaggcgcctgcgagagtctgtaggagggaaaccgccatggacgatcagggttgccctcggtgtaagaccaccaaatatcggaacccctccttgaagctgatggtgaatgtgtgcggacacactctctgtgaaagttgtgtagatttactgtttgtgagaggagctggaaactgccctgagtgtggtactccactcagaaagagcaacttcagggtacaactctttgaagatcccactgttgacaaggaggttgagatcaggaaaaaagtgctaaagatatacaataaaagggaagaagattttcctagtctaagagaatacaatgatttcttggaagaagtggaagaaattgttttcaacttgaccaacaatgtggatttggacaacaccaaaaagaaaatggagatataccaaaaggaaaacaaagatgttattcagaaaaataaattaaagctgactcgagaacaggaagaactggaagaagctttagaagtggaacgacaggaaaatgaacaaagaagattatttatacaaaaagaagaacaactgcagcagattctaaaaaggaagaataagcaggcttttttagatgagctggagagttctgatctccctgttgctctgcttttggctcagcataaagatagatctacccaattagaaatgcaacttgagaaacccaaacctgtaaaaccagtgacgttttccacaggcatcaaaatgggtcaacatatttcactggcacctattcacaagcttgaagaagctctgtatgaataccagccactgcagatagagacatatggaccacatgttcctgagcttgagatgctaggaagacttgggtatttaaaccatgtcagagctgcctcaccacaggaccttgctggaggctatacttcttctcttgcttgtcacagagcactacaggatgcattcagtgggcttttctggcagcccagttaaccatttataagatttggaccttggagctgaaccagggagctagcaaaagtaaagcagacttataaaattatagctatgtgcagctgcacaacacagtccttccactagcagctgtgttaaagtatttataaggagaaaatttcagaactaagttgagtaatataggggatatatatttgtgaaaaataatttttacttatatttttcagaggatttgacacgataagcctcatctgatggaagagaggaataaataattcacctatatgtgtttgaggttgtgacagacttataaaatctttttaaaaaataaagctataatttatattaaaaaaaaaaaaaataaa

SEQ ID NO: 618 - DNA, 1670 bp, Homo sapiens
attgagagtggctctaacaagtgccatttttccttgttagctttcatttctcagccctttacaagattaaaatagtctgcagtttaatctctccaaagctttacggacagtgattctgtcctaaacaagacagtgactccaggatttctgaagactattgtggaagaagcatccattaaggccaagctataacatcagaaatggtgaatgaatacaagaaaattcttttgctgaaaggatttgagctcatggatgattatcattttacatcaattaagtccttactggcctatgatttaggactaactacaaaaatgcaagaggaatacaacagaattaagattacagatttgatggaaaaaaagttccaaggcgttgcctgtctagacaaactaatagaacttgccaaagatatgccatcacttaaaaaccttgttaacaatcttcgaaaagagaagtcaaaagttgctaagaaaattaaaacacaagaaaaagctccagtgaaaaaaataaaccaggaagaagtgggtcttgcggcacctgcacccaccgcaagaaacaaactgacatcggaagcaagagggaggattcctgtagctcagaaaagaaaaactccaaacaaagaaaagactgaagccaaaaggaataaggtgtcccaagagcagagtaagcccccaggtccctcaggagccagcacatctgcagctgtggatcatcccccactaccccagacctcatcatcaactccatccaacacttcgtttactccgaatcaggaaacccaggcccaacggcaggtggatgcaagaagaaatgttccccaaaacgacccagtgacagtggtggtactgaaagcaacagcgccatttaaatacgagtccccagaaaatgggaaaagcacaatgtttcatgctacagtggccagtaagactcaatatttccatgtgaaagtcttcgacatcaacttgaaagagaaatttgtaaggaagaaggtcattaccatatctgattactctgaatgtaaaggagtaatggaaataaaggaagcatcatctgtgtctgactttaatcaaaattttgaggtcccaaacagaattatcgaaatagcaaataaaactcccaagatcagtcaactttacaagcaagcatctggaacaatggtgtatgggttgtttatgttacaaaagaaaagcgtacacaagaagaacacaatttatgaaatacaggataatacaggatccatggatgtagtggggagtggaaaatggcacaatatcaagtgtgagaaaggagataaacttcgactcttctgccttcaactgagaacagttgaccgcaagctgaaactggtgtgtggaagtcacagcttcatcaaggtcatcaaggccaagaaaaacaaggaaggaccaatgaatgttaattgaaatatgaaagctgaaatgcaacaaacaacttccgcttaaaacaattaagttgttaataactgtgattttgtaaatttcagtaattcatttaaatgatgtttcagtagatatattctagcatattaagagcttttataactgagttatagattagtttgctttctggaataaaattttcttcttatactcttccttttttttagatattacattttgcttttatgacattcacgaggcaaaaaaccg

SEQ ID NO: 619 - DNA, 4865 bp, Homo sapiens
gcagtgccgccttttttttttttttgcatcccatttttttaaatttgcaattttatattttgcaaatattttgagagacattgatttttctccccgtgctcccccgttcttccctgcggagtgcgctgcgccgcccagccctgtcgccccccggaggtgatccctccctcctgcctgcccgccagcctgacctgtgcccggctcgcgggccgcagcctcggccccggcgcgcccccggcagctctcggcgcgatgagcatagagacgctactggaggcggcccgcttcctggaatggcaagcgcagcaacaacagagagcacgtgaggagcaggagcggcttcgcttggagcaggagcgagagcaggaacagaagaaggccaatagcctggccaggctggcacatacccttcctgtggaggaaccccgcatggaggcgccacccctgcctctgtctccaccggctcccccgccggcacccccaccaccacttgccacccctgccccactgactgtcatccctatccctgtggtgaccaactcccctcagcctctacccccacccccacccttgcccgcggcagcccagcctctgcccctggcgcctcgtcagccggccctggttggcgcccccggactcagcattaaggagcctgcccccctgcccagcaggccgcaggtgcccacccctgctcccctactgccggactcgaaggccaccattccacccaatggcagccccaagcctttgcagcccctccccacgcctgtcctgaccatagcgccacaccctggagtccagcctcagctggccccccagcagccgcccccacccacgctggggaccctgaagttggcaccagctgaagaagtcaaatccagtgaacagaagaagaggcccggggggatcggaaccagagaagtccacaacaaattggagaagaacaggagggcccatctgaaagagtgctttgagaccctgaagcggaacatccccaacgtggatgacaagaagacgtccaatctgagcgtgctgcggacggcgctgcggtacatccagtccctgaagaggaaggagaaggaatatgagcatgaaatggagcggctggcacgtgagaagattgccacgcagcagcggctggcagagctcaagcacgagctgagccagtggatggacgtactggagattgaccgcgtgctgcggcagacgggccagcccgaggatgaccaggcctccacctccaccgcctctgagggtgaggacaacatagacgaggatatggaggaggaccgggcgggcctgggcccacctaagctgagccatcgtccccagccggagctgctgaagtccaccctgccaccccccagcaccacccctgcgcctctgcctccacacccacaccctcacccccactccgtggccctacctcctgcccacctccccgtgcagcagcagcagccacagcagaagacccctctgccagcccctcctcccccaccggctgcccctgcccagacactggtgccagctccagcccatctggtggcgacggctgggggtggctccacggtcatcgcccacacagccaccactcacgcttcagtcatccagactgtgaaccacgttctgcaggggccaggcggcaagcacatcgcccacatcgccccctcggcccccagccctgcggtgcaactggcgcctgccacaccccccattgggcacatcactgtgcaccctgccaccctcaaccatgtggcccacctgggctcccagctgcccttgtacccgcagcccgtggcagtgagccacatcgcccacaccctctcgcaccagcaagtcaacggcacggccggcctggggcccccggctactgtcatggcaaagccggccgtgggggctcaggtggtgcaccacccccagctggtgggccagaccgtgctcaaccctgtgaccatggtcaccatgccctccttcccagtcagcacactcaagctggcttgaggacgaggccactcagaggcccccagtggggacagggagggggacctgtcccccactctctcacccaccagctccacacattccagccaggcccaggccagcccccccacccacccccaggcctcctaggggaagggggtgcaaagactctgagccaagggagggaagggccaccctgctgcactaggacttggtaagatgactctgagaaaatgcgagactctgatggaatgtgccacctgtccggcccagtgccagctccagtgccgctcctgcttcccctccctaccctcggaaatcagtgcgatgtggacgtcacgctccctgacttctcccccgccctgccccgccttcgtgtgctgctgctgctattgctgtctggtgaggtggcccaggcccccggctttcctccggagcctcatgttctcttcccaggcctttggaggggaaatggggaaagcagaactgaagccacttggcccagaaagctgcggattggggtgataaggggccttgctctgagcacaggtgacagatcataggaagtggctggtctggagtcccacccggacaggtggggcctcagcctggggctctctgacccggttgcagtcactgtgattcgttaccgtagatactacttaaaatgattctctaccaacaataaaccaaacccagccactgccaagcttcctgtgccctcaccccaatccctgccactgggctctggacctcaggagggcaggctgaggtggggaaggagggacttggctgtccttccccttccccgtcccctgcagcctgggtctggatgggaggagagccactgggcccctgtccccagtccccagtccccagccctgggcttggctcttggcttccagaaggcagcaaagaggggcgctgtcctgcgttcagcccctgatctctgacctctgctgagtgctgggcactgctccaagggacaggtgggcctggcggcctgtgggtttgggtgcctcctgcagtttgggagacatggaccagcatctggtcttgtttccaggagcatagaagccacatcgttgagacatcaggaaggtaaaaacccagcggcttagccaagccctaagcctgtccccagaccaaccctgggacctatacagaacagagggccagagctagggctgctgcttctgctccagcccctttgcctctgtcctcccatcccctcaacaccctgcttctcccggggacgcttttgagtgggccctgcccggggagctgcagagcagcagcacctttctctgagaagaggtccttggttgggtcaaggacagggctgagcgtggaagggggaggagtcaggggctctgtgttaggatgcggctttctctgcctctgggcagcctgctttggcctttccttgtatgtgggtgtttattacaagtggctttgtgtcagacacgctcggctccccacctggacacacactcaccagtggcctttcagtgtagcgggaggaagccggtgtccctggatgtgaagctcacactgatgggctggggcaggggcctgggccggcgagggggccggggggaggggacagagctgaggatttcctggagtgccctgcaggcacagaggaggtcagcaaaggtcttgaatagattttctctggaaataaagaatccttagatgcctaaaaattcccttcctgttccctcctggtcctggacacctcccaggggactgttccttatttctctctcctggtgtgggtaaagggacagttacaaaccaggtcaccatcctcagaggctgagccctgtacccaccccagcacagccacctccgccagaccccgtggctctgggagagccagctttgctattcccattgtgacagcgatggcaggcctgacccacggggcagttagagcagcctcgtggagctcgcccctcccctcagcctgcccacctctccctgcatcctgaggccagtggcccccgggcctgcacagatacctcatcatccacccgctgcccctccccgtccctgtcccccagcatcgggggcctgcaaatctagtgccgaatgactatgtccagattggtgacgatgggtgttgctgtttttcttgtcgtttgtgaacgctgtgatgctgtgtgcccaagtgggcagtcaccacccagcccttccttgggcgtctcccccagagtgctgtcgggaccacatctgtcctcaccctgtgggaccgcctggccctccctccctagcccttccagcctgggacacacacacacacacacacacacacacacgcacgcacacgcacacatcttacctctcatgcgtgttttaccttttgatgttcagagtggctcactggctgggagtccttacctcggggagagggggaggttggttccttggggggccaaagaaggcagggaatgcctggagggtaactggggggccaccatgaccccttctctctccagaaacagctgcttctccccccatcccagggtcccacccccaacccccagaggtggcccttgtttacagtgaggactcggccactgtgtctctgtttcctgaaatataaactgtagcgaccccagactgtagagatttttatgtgtttggatacatctgctgtgtggaaaaaaaaaaaaactacaaaaaccctaattttgtacatactgtatttttactattgaactgtattctagtggctgttcatgctccaagactttagttaccgagacatgaatactatccatgtaataagcacttgcctggaataaaatataaaactgaaataaacctgcactgaaacctgagatggagctgccaaaaaaaaaaaaaaaaaaaaaaaa

SEQ ID NO: 620 - DNA, 5400 bp, Homo sapiens
atggccgccgacgtcttcatgtgctccccgcgccggcctcgcagccggggccgccaggtgctgctcaagccccaggtgtccgaggacgacgacgactcggacacggatgagccgtccccgccgcccgcctccggcgcggccaccccggcccgggcccacgcgagcgccgcgccaccgccgcctcgggccgggccgggccgcgaggaacctccgcgccgccagcagatcatccacagcggccacttcatggtgtcgtcgccgcaccgagagcacccgcccaagaagggctacgatttcgacacggtcaacaaacagacgtgccagacctacagcttcggcaagactagctcctgccacctgtccatcgacgcctcgctcaccaagctcttcgagtgcatgactttggcctacagtgggaagttggtgtctccaaagtggaagaatttcaagggcctgaagctacagtggagagacaagatccggctcaataatgccatctggcgggcctggtacatgcagtatctggagaagcgcaagaatcctgtgtgccactttgtgacacccctggacggctctgtggacgtagacgagcaccgccggccggaggccatcaccacggaagggaagtactggaagagccgcatcgagattgtgatccgggagtatcacaagtggagaacctacttcaagaaaaggctacagcagcacaaggatgaggacctctccagcctggtccaggacgatgacatgctgtattggcacaagcacggggatggatggaagacccccgtccccatggaggaggatcccctgctggacacagacatgctcatgtcggaattcagcgacaccctcttctccacactttcttcacaccagccggtggcctggcccaatccccgggaaatagcacatctgggaaatgcagacatgatccagccgggactgattcctttgcagcctaacctggacttcatggacacctttgagcctttccaggacctcttctcttctagccgctccatttttggctccatgctacctgcatctgcctcagcacctgtaccagatcccaacaacccacctgcacaggagagcatcctgccgaccacagccctccccactgtgagccttcctgacagcctcatcgcgccccctaccgccccatccctggctcacatggatgagcagggctgtgaacacacctcccggactgaggacccgtttatccagcccacggacttcggtccctcagagccgccactgagtgtcccgcagcccttcctccctgtcttcaccatgcccctgctgtctcccagccccgccccaccgcccatctcccccgtgttaccattagttcctcctcctgccactgccctgaaccccccggctccacccaccttccatcagccacagaagtttgctggagtcaacaaagcgccgtctgtcatcacccacacggcctctgccaccctcacccacgatgcccccgccaccacctttagccagagtcagggccttgtgatcaccacccatcaccctgccccgtcagcggccccttgtgggctggcactgtctcctgtcacccggcctccccagccacggttaacttttgtgcaccccaaacctgtatccttgactgggggcaggcctaagcagccccacaaaatagtgcctgctcccaaaccagagcccgtgtccttggtgttgaagaatgcccgtatcgccccagctgccttttcaggccaaccacaagcggtgatcatgacgtcagggcctctgaagagagaagggatgttggcctccaccgtgtcccagtccaacgtggtcattgcgcctgctgccatcgccagggctcctggggtcccggagttccacagcagcatcctggtgacagatctcggccatggcacgagcagcccgcctgcccccgtctcccggctcttcccaagcacagcgcaagaccccctggggaagggcgagcaggtcccgctgcatgggggcagcccccaggtcactgtcacagggcccagtcgggactgcccaaactcagggcaggcctctccgtgtgcatcggagcagagccccagtcctcaatctccccagaacaactgctcagggaaatccgaccccaaaaatgtggctgcactaaagaaccggcagatgaagcacatctcagctgagcagaaaaggcgcttcaacatcaagatgtgcttcgacatgctcaacagcctcatctccaacaattccaagctgaccagtcacgccatcacactgcagaagactgtggagtacatcaccaagctgcagcaggagagaggccagatgcaggaggaggcccggcggctgcgggaggagatcgaggagctcaatgccaccatcatctcctgccagcagctgctccctgccacgggagtccccgttacccggcgccagtttgatcacatgaaagacatgtttgacgaatacgtgaaaacccggaccttgcagaattggaagttctggattttcagcatcatcatcaagccgctgtttgagtcgttcaagggcatggtgtccaccagcagcctggaggagctgcaccggacggcgctctcctggctggaccagcactgctccctgcccatcctcaggccgatggtattgagcacgctgcggcagctgagcacctccacctccatcctcacagacccggcacagctgccagagcaggcgtccaaggctgtcaccaggattggcaagagattgggagagtcctagctgcttagctggcatgtggccgcatgagatgccaggagacccttccctgcccatggagagtaggctgcgccccccagcccttcctgacgctcagcctcggggcctctctccaactctgccggcccaccgtggcatcgggaggccatgctcaggtctgaagcaggtttggggcctgctgacagcaatagcccgcctttgggaaccccttgctgtgaactctctcactcagtgacctcagtcaccaacctcctctgccctcggggcagcccacacaaaagggaagtgctggccgtgctggtcctgccctgctggtggcctgccgggcctggcgccggtgagcggaatcgatgggatgagggtgacagggcctgctcctgtcctgaggcccagccttgtccctcctgccacgtcctgtccacatgcatgcctctgcctgatgccctgctccactctctggtctgcccgtggggcagttggaaggcgtctttctttctcccctcaactctgacagcacccagcccttgtggatggacttgggcttctattcaggcttatgcatggcaggctgccagggggaagtgccttcttcagaggtcctccaggacacatgtgtgcagaaacggtggatgtggaacacacaggaccagaatggaagcgtgtgatgcacggtggctgctctggctgagaggccctgctgggcatgtttcatctgtccccttttagctccacctgacattgcaggatccatggggactcagcccagggccttctcggatgtcacctcaccgctgtggcccttctgccgttcttctccacttggctccagctgcagctgttgacagatcaagcatgtcctgtgggagcttagaaccctgaagttctagtgtctgaaagatcagactccacgtcctgctgtcagccttgtcatcttgtctgatgtctttcagctgggagccccaaaccaggacagttctcggaccaaagatgcccccacactcaaaagtctgtcccgtcttgtgtttggagaaggaaacaatgttggcaggcagcactctgtggtggtcagccctcagagctgtttctaggcatctctcagatcagacagcaaagaatctacccagatctgggctgggtggaggtgtggctgggctgggggccattctgagcctgcagtgagagtttggcccagcctcagtccttgctcttctctggctacctctgcagggagctgcaggggcaagcactctctccagcactcaggaagcccggccgagggtacctcctcgtggaaagaatgcactttaaagctctgctgaggagttcggagcccaggctttcaggcgacctctgccctccctgcctctcctcaccctccctctcttcctgcagggcctgggaagggctttgagggagcctgggagccatgtgaagaggggcacgcctgggctgtcccacagtttagatccagttggaggttctccctggctcctgcaggcctgcggggatctctccccacttcaggcctccggccagctgcctgccctcttgtctgtgcttcagccctgcacaaaagcagcttggtgacaccactcagccacccagagtacgtgtttacaggctttccagatcaccttcctgtggggtgaacgtaatgaggcggggctggtccttggaatttcccctggaaaatggtaacagactccatccttgacccggggatgagcatgaaggcattgtcccaaaggcagaggccaccgtggtaggaattccaccaaggccagaagggaaaaaggaagaacccaccgtgtctggctgtgcgggccctggggagggtcgtgagtgcagcccctctctacttctgtgcctttgtaaaacgtgtagataaccgcagtggttggctgagccaagaactctcctaaatcagtggctttctccccaccccttgctggggagtcatttttaaaaaaatctgtgggatataaaattggcctcctgctgcttcagcctacctctccctctgctgacttaatgtcgtgattctgtttcttcagatatttaaggctgttaggttgtgtgagccttgaagtgtgtgtgtgtgtcccagcgactgtccactgtccaggagatgcatgtctttgtattggagatatttctgtaactcattctcttggtgctcacgattgccatggccatagggccacagtgccgtatctgctgcagacatgattgtttcttgttctagaggttttcttgttttcgaatcttgcctgatgaatccagccagaccaaggggcctagatttgacctctgtcctgggctcctgggccaggtgcaggaacatctgaggccactctgctggccacctccagtgggtgctgaccacaggatgggctttgtttacactcattttcaccctgattcttgcccccactttcataaaagaaacttcaaaatgctgacgctttggagagtaagaaaatcaatcttggctgggcacggtggctcctgcctgtgatcctagcactttgggaggctgaagctgaaggatcacttgagctcaggagttggagaccaaccctggcaacataacaagaccctgtctctacaaaaaaaaaaaaaaaaaaaaaaaaaaaaaaaaaa

SEQ ID NO: 621 - DNA, 8550 bp, Homo sapiens
caacgacaacaacagggggacacaaaatggcggcggcttagctcctacccctggcggcggcggcagcggtggcggaggcgacggcacctcctccaggcggcagccgcagtttctcaggcagcggcagcgcccccggcaggcgcggtggcggtggcgcgcagccagatttgcctgaagacctggataatctccatttttgtcatggactgttaaaacgtttgaagttccaattctggtcttgatttcccagttaaagatgttcttcacccgaatgcagtctttcctgttggtaaaataagacaaccatcaacattgcctgtttgtctgcttttgaatctcttaaggatggatgtttgtaagatgttgcttaatacagtctggaatactctgtccatttgttgaattgtaaatgactttcaaatgtgcaagttctgttaaatacaaagagaacctctatgggtaacttttgtgttgaagaagtcatttgtcaaccatggtaaaacttgcaaacccactttatacagagtggattcttgaagctatacagaaaataaaaaagcaaaagcaaaggccctctgaagagagaatctgccatgcggtcagtacttcccatgggttggataagaagacagtctctgaacagctggaactcagtgttcaggatggctcagttctcaaagtcaccaacaaaggccttgcctcctataaggacccagacaaccctgggcgcttttcatcagttaaaccaggcacttttcctaagtcagccaaggggtctagaggatcatgtaatgatctccgcaatgtggattggaataaacttttaaggagagcaattgaaggacttgaggagccgaatggctcctccctgaagaacatagagaagtatctcagaagtcaaagtgatctcacaagcaccaccaacaacccagcctttcagcagcggctgcgactgggggccaaacgcgctgtgaataatgggaggttactgaaagacggaccgcagtacagggtcaattatgggagcttagatggcaaaggggcacctcagtatcccagtgcattcccatcctcgctcccacctgtcagccttctaccccatgagaaagaccagccccgtgctgatcccattccaatatgtagcttctgtttggggactaaagaatcaaatcgtgaaaagaaaccagaagaactcctctcttgtgcagattgtggcagtagtggacacccatcctgtttgaaattttgtcctgaattaacaacaaatgtaaaggccttaaggtggcagtgcatcgaatgcaagacatgcagtgcctgtagagtccaaggcagaaatgctgataatatgcttttttgtgattcctgtgatagaggatttcatatggaatgctgtgacccaccactttccagaatgccaaaagggatgtggatttgccaagtctgcagaccaaagaaaaagggaagaaaactacttcatgagaaagctgcacaaataaaacgacgatatgcaaaacccattggacgaccgaaaaataaattaaagcaacgattgttgtctgtaaccagtgatgaaggatccatgaatgcattcacaggaagggggtcacctggtaggggtcaaaagactaaagtctgtaccacaccttcatctggtcatgctgcatctgggaaggactcaagcagcagattggctgttacagaccccactcggcctggtgccaccaccaaaatcaccaccacctccacctacatttctgcctctacacttaaagttaacaagaaaaccaaagggctcattgatggccttactaagttttttacaccatcacctgatggtcgcagatcacgaggtgaaattatagacttttcaaagcactatcgtccaaggaaaaaggtctctcagaaacagtcatgcacttctcatgtgttggctacaggtaccacacaaaagctaaaacctccaccttcttcacttccacccccaacccccatctccggtcagagccccagttcacaaaagtccagcacggccacttcttctccctctccccagagttcttccagccagtgcagtgtgccctccctgagcagccttaccactaacagccagctgaaggcactctttgatgggctttctcatatctataccactcagggacagtctcgcaaaaagggacacccgagttatgcaccacccaaacgtatgcgtcgtaaaactgaattatcttccacggcaaaatctaaagcccacttctttggcaaaagagatattagaagtcggtttatttctcactcctcctcctctagctgggggatggctagaggaagtatttttaaagcaattgctcacttcaagcgaacaactttccttaaaaagcacaggatgctaggcagattaaaatataaagtgacccctcagatggggaccccctcaccagggaaggggagcttgacagacggaaggattaaacctgatcaggatgatgatactgaaataaaaataaacatcaaacaagaaagtgcagatgtaaatgtgattggaaacaaggatgtcgttactgaagaggatttggatgtttttaagcaggcccaggaactttcttgggagaaaatagagtgtgagagtggggtggaagactgtggccggtacccttctgtgattgaatttggtaaatatgaaatccaaacctggtactcctcgccttacccacaggaatatgcaagattaccaaagctttacctgtgtgaattctgtcttaaatatatgaaaagtaaaaatattttgctaagacactccaagaagtgtggatggtttcatcctccagcaaatgaaatttaccgaaggaaagacctttcagtatttgaggttgatgggaatatgagcaaaatttattgccaaaacctttgcttgttagccaagctcttcctggaccacaaaacgttgtattatgatgtcgagccattccttttttatgtccttacaaaaaatgatgaaaagggctgtcatctggttggatacttctctaaggaaaagctttgccagcagaagtataatgtctcctgcataatgatcatgccccagcaccaaaggcaaggatttggacggtttctcattgatttcagctatttgctttctagaagagaaggccaagcagggtctcctgaaaagcctctctccgatctgggccgtctctcctacctggcatattggaagagcgtcatcttggagtatctctaccaccaccatgagaggcacatcagcatcaaggcaattagcagagcgacgggcatgtgcccacatgacattgccaccactctgcagcacctccacatgatcgacaagagagatggcagatttgtcatcattagacgggaaaagttgatattgagccacatggaaaagctgaaaacctgttccagagccaatgaacttgatccagacagtctgaggtggaccccaattttaatttctaatgctgcagtgtctgaagaagagcgagaagctgagaaagaggctgagcggctaatggaacaagctagctgctgggagaaggaggaacaagaaatcctgtcaactagagctaacagtaggcaatcacctgcaaaagtacaatcgaaaaataaatatttgcattccccggagagccggccagtcacaggggagcgagggcagctgctggagctgtctaaagagagcagtgaagaagaagaggaggaggaggacgaggaggaggaagaagaggaggaagaagaggaagaggatgaagaggaggaagaagaggaagaagaagaagaagaagaagaaaatattcaaagctctcccccaagattgacgaaaccacagtcagttgccataaagagaaagaggccttttgtactaaagaagaaaaggggtcgtaaacgcaggaggatcaacagcagtgtaacaacagagaccatttcagagacgacagaagtactgaatgagccctttgacaactcagatgaagagaggccaatgccacagctggagcctacctgtgagattgaagtggaggaagatggcaggaagccagtcctgagaaaagcattccagcatcagcctgggaagaaaagacaaacagaggaagaggaaggaaaagacaatcattgcttcaagaatgctgacccttgtagaaacaatatgaatgatgattcaagtaacttgaaagaaggcagtaaagacaatcccgaacctctaaagtgcaaacaagtgtggccaaaaggaacaaagcgcggtctatctaagtggaggcaaaacaaagagaggaagaccggatttaaactgaatttgtacaccccgccagaaacacccatggagcctgacgagcaggtaacagtggaagaacagaaggagacttcagaaggaaaaaccagccccagtcccatcaggattgaggaggaggtcaaggaaactggggaagccctgttgcctcaagaggaaaacagaagggaagaaacatgtgcccctgtaagtccaaacacatcaccaggtgaaaaaccagaagatgatctcatcaaacctgaggaagaggaagaggaggaggaggaggaagaggaagaagaggaagaagaggaaggggaagaagaagaaggaggaggaaatgtagaaaaagatccagatggtgctaaaagccaagaaaaagaggaaccagaaatctccacggaaaaagaagactctgcacgtttggatgatcacgaagaggaggaggaagaggatgaagagccatcccacaacgaggaccatgatgccgatgacgaggatgacagccacatggagtctgccgaagtggagaaggaagagctgcccagagaaagcttcaaagaagtactggaaaaccaggagacttttttagaccttaatgtgcagcctggtcactcgaacccagaggtcttaatggactgtggcgtcgacctgacagcttcttgtaacagtgagcccaaggagcttgctggggaccctgaagctgtacccgaatctgacgaggagccacccccaggagaacaggcacagaagcaggaccaaaagaacagcaaggaagtcgatacagagttcaaagagggaaacccagcaaccatggaaatcgactctgagactgtccaggccgttcagtctttgacccaggagagcagcgaacaggacgacacctttcaggattgtgccgagactcaagaggcctgtagaagcctacagaactacacccgtgcagaccaaagtccacagattgccaccacgctcgacgattgccaacagtcggaccacagtagcccagtttcatccgtccactcccatcctggccagtccgtacgttctgtcaacagcccaagtgtccctgctctggaaaacagctacgcccaaatcagcccagatcaaagtgccatctcagtgccatctctgcagaacatggaaaccagtcccatgatggatgtcccatcagtttcagatcattcacagcaagtcgtagacagtggatttagtgacctgggcagtatcgagagcacaactgagaactacgaaaacccaagcagctacgattctactatgggaggcagcatctgtggaaacggctcttcacagaacagctgctcctatagcaacctcacctccagcagtctgacacagagcagctgtgctgtcacccagcagatgtccaacatcagcgggagctgcagcatgctgcagcaaaccagcatcagctcccctccgacctgcagcgtcaagtctcctcaaggctgtgtggtggagaggcctccgagcagcagccagcagctggctcagtgcagcatggctgctaacttcaccccacccatgcagctggctgaaatccccgagacgagcaacgccaacattggcttatacgagcgaatgggtcagagtgattttggggctgggcattacccgcagccgtcagccaccttcagccttgccaaactgcagcagttaactaatacacttattgatcattcattgccttacagccattccgctgctgtgacttcctatgcaaacagtgcctctttgtccacaccattaagtaacacagggcttgttcaactttctcagtctccacactccgtccctgggggaccccaagcacaagctaccatgaccccaccccccaacctgactcctcctccaatgaatctgccgccgcctcttttgcaacggaacatggctgcatcaaatattggcatctctcacagccaaagactgcaaacccagattgccagcaagggccacatctccatgagaaccaagtcagcgtctctgtcaccagccgctgccacccatcagtcacaaatctatgggcgctcccagactgtagccatgcagggtcctgcacggactttaacgatgcaaagaggcatgaacatgagtgtgaacctgatgccagcgccagcctacaatgtcaactctgtgaacatgaacatgaacactctcaacgccatgaatgggtacagcatgtcccagccaatgatgaacagtggctaccacagcaatcatggctatatgaatcaaacgccccaataccctatgcagatgcagatgggcatgatgggcacccagccatatgcccagcagccaatgcagaccccaccccacggtaacatgatgtacacggcccccggacatcacggctacatgaacacaggcatgtccaaacagtctctcaatggctcctacatgagaaggtagacaacgtgggcagtccacaaaacctacggggcatcactattggattgatctgcacaaatacctttgaagagtacgatttcaaaaccagcaattggtgtgaatgcaaaaacatttgttggcaccatttatttaaaaaaaaaaaaagctgtatgcagcagaaagccttatacaagttgtttttctttttttcctttttcttttttttggtaccttcatttctgttacttttatataaaattctctgcaaaggaaggcctctctttggactacaatttggaggcagccacttgttgtgcctgcttctgttaaacaatgtggatatcaagcccccccaaattatctgttttaatattgaacctagagctttttttttcccttccctgtccactccatgtaaatgcctttagcatttcagttattgtatattttgtttaaggtgacacttcagcatgccgctaatgtctttgttagtgacagtgcattttgtagtactgtacaagtgttgtgctaacagtaagccatttcttaagttttttgccttgattagggtgccctaatttgagggttttaaaaaaaactatatttttgttaattataaaactgtaaagagctataaaagctattcccatttggttagtcaaaagggttttattgctaaatgtttggtgtaaagttgagacccttttccattttggtgacagatttctttggggaaaaaaggcagctttctgttttataaatgcagacttctgtttattgaatgaagcatatctcagtgtttatctgtcaggttttgaaacatttcatatatgtccaaatacttggcaggatttaaaaaaaaatagtgaatttggtgtaaagttgctattttatggaaatgcctctaactttacattttcattccatctgtagatttttctatctttataaaatattggagttattttttaaggaaaaatagaaaagtagcttgtgaatagctcaaactaagcttacaaatcgcatgtaaaaaagcaaaaaagttatttgtgtctgtttatattgcttccttttttgtagcctttgtacctgtacagggtgacagtaagggccaagcaggagaggcgtaatccttgtataaaataggatccagcgacactcttgtatttatctgttctctttttagtcagtcacttcaaaaaaacaaaaaacaaacaaaaaaaagctgtacattttaacataaaataaattatgatgagccatttttagcctcttgtgtcctgtcatattatgattgatagagaatgaccaatggaactgtatcatgtgtcacgcctcagaacacatacacattttgggaaaataaattatttagtgtaaattggagttatgggattttctgatttgttttgactttgggggaggggttggcaataaataagagtaatatctaataaaaccatcacatataccaaatacctatttaataaattaatttataatggattttaatgcttttcatgaaagtttattttatgcgagtgcataccttctgtatgccaatcattgtctttaaaataaagtgaaattgtttttttcttttggactttgatcttcatttgcaaagagatcccgcacaaatatccagctgcctcactcgcacagtctgtagaaacatccctccaagcctcgcaccagggtagcaaacttcctttttataaagattcataccaaaaaaagcacccaatttgggattgtatgtttgaaaaatcattttctttttaaaaagtgtgaacgttttgctctgttgtgaatgattaattgtatgttttctttagagtctaaagtttagaccc

SEQ ID NO: 622 - DNA, 708 bp, Homo sapiens
atgagatgggctgccccaggaaagaagacatctggtctgcaacagaaaaatattgaagtgaaaacaaaaaagaacaaacagaaaacacctggaaatggagatggtggcagtaccagtgagactccccagcctcctcgaaagaaaagggcccaggtagatcctactgttgaaaatgaggaaacattcatgaacagagttgaagttaaagtaaagattcctgaagagctaaaaccatggcttgttgatgactgggacttaattaccaggcaaaaacagctcttctatcttcctgccgagaagaatgtggattccattcttgaggactatgcaaattacaagaaatctcatggaaacacagataataaggagtatgcagttaatgaagttgtggcagggataaaagaatacttcaacctaatgttgggcacccagctactcaacaaatttgagagaccacagtatgccgaaattcttgcagattgtcccgatgcacccatgtcccaggtgtatggagtgccacatctcctgagattatctgtacaaattggagcaatgttggcctatacacctctgaatgagaagagccttgctttattactcaattatcttcacgatttcctaaagtacctggcaaagaattctgcaactttgtttagtgccagcgattatgaagtggctcttcctgagtaccatcggaaagctgtgtga

SEQ ID NO: 623 - DNA, 1852 bp, Homo sapiens
gtcgttggctggagcagcggctgcgcgggtcgcggtgctgtgaggtctgcgggcgctggcaaatccggcccaggatgtagagctggcagtgcctgacggcgcgtctgacgcggagttgggtggggtagagagtagggggcggtagtcgggggtggtgggagaaggaggaggcggcgaatcacttataaatggcgccgaagcaggacccgaagcctaaattccaggagggtgagcgagtgctgtgctttcatgggcctcttctttatgaagcaaagtgtgtaaaggttgccataaaggacaaacaagtgaaatacttcatacattacagtggttggaataaaaattgggatgaatgggttccggagagcagagtactcaaatacgtggacaccaatttgcagaaacagcgagaacttcaaaaagccaatcaggagcagtatgcagaggggaagatgagaggggctgccccaggaaagaagacatctggtctgcaacagaaaaatgttgaagtgaaaacgaaaaagaacaaacagaaaacacctggaaatggagatggtggcagtaccagtgagacccctcagcctcctcggaagaaaagggcccgggtagatcctactgttgaaaatgaggaaacattcatgaacagagttgaagttaaagtaaagattcctgaagagctaaaaccgtggcttgttgatgactgggacttaattaccaggcaaaaacagctcttttatcttcctgccaagaagaatgtggattccattcttgaggattatgcaaattacaagaaatctcgtggaaacacagataataaggagtatgcggttaatgaagttgtggcagggataaaagaatacttcaacgtaatgttgggtacccagctactctataaatttgagagaccacagtatgctgaaattcttgcagatcatcccgatgcacccatgtcccaggtgtatggagcgccacatctcctgagattatttgtacgaattggagcaatgttggcttatacacctctggatgagaagagccttgctttattactcaattatcttcacgatttcctaaagtacctggcaaagaattctgcaactttgttcagtgccagcgattatgaagtggctcctcctgagtaccatcggaaagctgtgtgagaggcactctcactcacttatgtttggatctccgtaaacacatttttgttcttagtctatctcttgtacaaacgatgtgctttgaagatgttagtgtataacaattgatgtttgttttctgtttgattttaaacagagaaaaaataaaagggggtaatagctccttttttcttctttctttttttttttcatttcaaaattgctgccagtgttttcaatgatggacaacagagggatatgctgtagagtgttttattgcctagttgacaaagctgcttttgaatgctggtggttctattcctttgacactacgcacttttataatacatgttaatgctatatgacaaaatgctctgattcctagtgccaaaggttcaattcagtgtatataactgaacacactcatccatttgtgcttttgtttttttttatggtgcttaaagtaaagagcccatcctttgcaagtcatccatgttgttacttaggcattttatcttggctcaaattgttgaagaatggtggcttgtttcatggtttttgtatttgtgtctaatgcacgttttaacatgatagacgcaatgcattgtgtagctagttttctggaaaagtcaatcttttaggaattgtttttcagatcttcaataaattttttctttaaatttcaaaaaaaaaaaaaaaaaaaaaaaaaaaaa

SEQ ID NO: 624 - DNA, 1998 bp, Homo sapiens
ttgattatggaacattctaaaacttagacaagacgattgtgattggctgaagggcatacgccctcctccagggtgacgtgtctgcctatggatatcagttgccagagaaacctggctttactatggcggttggaggaacggcagtgatcacacgtcggctgctgggaagatctggattctcgtttcaggtcaccatcagaaaagctaagtttgctgtatagtgaggatcaggagatctgatcctgattgcagaaccttccctgattacagaatcttggatgatttcacaaaagttcatcttcattgcagatacctgcctttctttctaggttgtatctcccacttcacccttctagaccatcccagaagatctataagatttcatctgggaaatcactaggagttcttggaagggaaagaaggaagattgttggttggaataaaaacagggttgaatgagttccagaaagcagggttctcaacctcgtggacagcaatctgcagaagaagagaacttcaaaaaaccaactagaagcaacatgcagagaagtaaaatgagaggggcctcctcaggaaagaagacagctggtccacagcagaaaaatcttgaaccagctctcccaggaagatggggtggtcgctctgcagagaaccccccttcaggatccgtgaggaagaccagaaagaacaagcagaagactcctggaaacggagatggtggcagtaccagcgaagcacctcagccccctcggaagaaaagggcccgggcagaccccactgttgaaagtgaggaggcgtttaagaatagaatggaggttaaagtgaagattcctgaagaattaaaaccatggcttgttgaggactgggacttagttaccaggcagaagcagctgtttcaactccctgccaagaaaaatgtagatgcaattctggaggagtatgcaaattgcaagaaatcgcagggaaatgttgataataaggaatatgcggttaatgaagttgtggcaggaataaaagaatatttcaatgtgatgttgggcactcagctgctctacaaatttgagaggccccagtatgctgaaatcctcttggctcaccctgatgctccaatgtcccaggtttatggagcaccacacctactgagattatttgtaagaattggagcaatgttggcctatacgccccttgatgagaaaagccttgcattattgttgggctatttgcatgatttcctaaaatatctggcaaagaattctgcatctctctttactgccagtgattacaaagtggcttctgctgagtaccaccgcaaagccctgtgagcgtctacagacagctcaccatttttgtcctgtatctgtaaacactttttgttcttagtctttttcttgtaaaattgatgttctttaaaatcgttaatgtataacagggcttatgtttcagtttgttttccgttctgttttaaacagaaaataaaaggagtgtaagctccttttctcatttcaaagttgctaccagtgtatgcagtaattagaacaaagaagaaacattcagtagaacattttattgcctagttgacaacattgcttgaatgctggtggttcctatccctttgacactacacaattttctaatatgtgttaatgctatgtgacaaaacgccctgattcctagtgccaaaggttcaacttaatgtatatacctgaaaacccatgcatttgtgctctttttttttttttatggtgcttgaagtaaaacagcccatcctctgcaagtccatctatgttgttcttaggcattctatctttgctcaaattgttgaaggatggtgatttgtttcatggtttttgtatttgagtctaatgcacgttctaacatgatagaggcaatgcattattgtgtagccacggttttctggaaaagttgatattttaggaattgtatttcagatcttaaataaaatttgtttctaaatttcaaagcaaaaaaaaaaaaaaa

SEQ ID NO: 625 - DNA, 2440 bp, Homo sapiens
cggacagccgcgcgctgagggtctcggggcgggcgccgcgggacctctccgggccatggcagcccctgtcaaagggaacaggaagcagtccacggagggtgacgccctagacccacctgcatcccccaaacctgctggcaagcagaacggaatccagaaccccatctcgctggagttaacctgtggaagatctacaaagcagtggagaagctgggggcctatgagctggtaaggaaggcacctcccagtccttgccaaactgcatatccctggggtgagcctgcagcgctgtccttgcctctggacagaggaagagccaggatccccagtcctacccctgcgtccctgcctccctgccttccccgctggtactctgctgctcaaagcagcttttcagccttccccatctgttctgcccgccccgtgttgggaaaactgcttgggccagcagtccatggccctaggagagagaatcggctggccgctgctggagccgcagagcagctgccaaactgcagtccttcgagtccctgcgagggcggccggagctgcaaggaccccgccgccagggggcgcccgccggccgcgccctcacgaggtgcccttgcaggtgaccgggcgccgcctctggaagaacgtgtacgacgagctggggggcagcccaggcagcaccagcgcggccacgtgcacgcgccgccactacgagaggctggtcctgccatacgtgcggcacctgaagggggaggatgacaagccgctgcccacctccaagcccaggaaacagtacaagatggctaaggagaacaggggggatgatggggccaccgagaggccgaagaaggccaaggaggagcggcgcatggaccagatgatgccaggaaagaccaaagcagatgctgctgacccagcaccacttcccagccaggagccccccaggaacagcacagaacagcagggcctggcctctgggtcttctgtgtcctttgtgggtgccagcggctgtcctgaggcctacaagcggctcctatccagcttctactgcaaggggacacacggcatcatgtcaccactggccaaaaagaagctcctggcccaggtgagcaaggtggaggccttgcagtgccaggaggagggctgccgccatggggcagagccccaggcgtccccagctgttcacctcccagagagtccccagagccccaaagggctgactgagaactccaggcaccggctgacccctcaggagggattgcaggccccaggtggcagcctcagagaggaggcgcaggcaggcccctgcccggcagcccccatcttcaagggctgcttctacacccaccccaccgaggtgctgaagcctgtcagccagcaccccagggacttcttctctagacttaaagatggggtgctattggggcctcctggcaaagaggggctgtcagtgaaagagccccagctggtgtggggcggagacgctaaccgcccttctgcgttccataaaggtggctccagaaagggcatcctctaccccaagcccaaagcctgctgggtgtcccccatggccaaggtcccagccgagagccccacgctcccgcccaccttccccagtagcccaggcctgggcagcaagcgcagcctggaggaagagggtgctgcccacagtgggaagagactgcgggccgtgtctccctttcttaaggaggcggatgccaagaagtgtggggccaaacctgcagggtccggcctggtctcctgccttctgggcccagccctggggcctgtgcccccagaggcctacaggggcaccatgctgcactgcccgctgaacttcactggcaccccgggccccttgaagggccaggctgcactccccttcagccccctggtcatcccggccttcccggcccacttcctggccaccgcaggcccctcgcccatggccgctggcctgatgcacttccccccaacgtccttcgacagtgccctccgccacagactttgcccggcctcatctgcctggcacgcaccaccagtcacaacctatgcagcgccccacttcttccacctcaacaccaagctgtaggccagcccatggtgttgtgtacactgtggagtcgacaggggcctacaacaggcaggtactgctgccagggggctctgaactagtgcctgctacccaggacacccgggccatgcccctggctgggcagcctggcacaagtgaagaagaaggcagtgggaaaactgggtttatctcaaggcagcagcctgagcccaggagcagaggacccagttgttataaggcgctgggagaggatgggcagctcccactgccccagagcggagctcgaagcacccaggttgcccacggaaaatccaataaaaagacaccagtgtgaatccaaaaaaaaaaaaaaaaaaaaaaaaaaaaaaaaaaaaa

SEQ ID NO: 626 - DNA, 926 bp, Homo sapiens
ggggagagccctccctgccagtctggcaactccagcaaagtcctcaggctcatcccacacactcggtgctagtcactgctgtgtgtttacatgagtaatggagctgccgggggaggggagttgtaagcagagcgctgagcctcgcagctcgcattcggagggaagctgacatccacaccaagtcgagacttccagggatgtggccggggagcagtcacatgctgtagctttcatgagcacaggcatcagtcaggcagatgtttgtcgactggaatggcgccaaatcttaaaggcagaccacgcaaaaagaaaccatgcccacaaagaagagattcattcagtggtgttaaggattccaacaacaattccgatggcaaagccgttgccaaggtgaaatgtgaggccaggtcagccttgaccaagccgaagaataaccataactgtaaaaaagtctcaaatgaagaaaaaccaaaggttgccattggtgaagagtgcagggcagatgaacaagccttcttggtggcactttataaatacatgaaagaaaggaaaacgccgatagaacgaataccctatttaggttttaaacagattaacctttggactatgtttcaagctgctcaaaaactgggaggatatgaaacaataacagcccgccgtcagtggaaacatatttatgatgaattaggcggtaatcctgggagcaccagcgctgccacttgtacccgcagacattatgaaagatcaatcctaccatatgaaagatttattaaaggagaagaagataagcccctgcctccaatcaaacctcggaaacaggagaacagttcacaggaaaatgagaacaaaacaaaagtatctggaaccaaacgcatcaaacatgaaatacctaaaaacaaaaaaaaaaaaaaaaaaaaaaaaaaaaa

SEQ ID NO: 627 - DNA, 2404 bp, Homo sapiens
caaaaaacccaggctccaagggattatgacaactaagattcctcttactggagcaagaactaccccataggctggaaaaatagcttcatgaagtttaagaacaagcaggaacatgggagaaatgaggaattccagttcctatcttgtaaaaatgctttcatatgtgacctgagggaccaggagaggtgaagggagcccctggttctcttataaaatctctaagtttttacaccacttcaagaaatatagtcagccctctttgtatagagcattaggaagcaagagcgtggtgaagctgacatttctcaggcacattgacatttaaaatacaaacttttctcttaaagatctcactggttggacatctcttctcctccgtccttcccttcgctctacttttgttccaagccgcccctgcctctccagggctaggagtgggacaggggtgggagaggtggtctcaccaggctgctggccccacggagcctgtctccctggggatgggaacggggatagaagacaggggaggaggcgcgcgcccgttttgggggttccgggtaggctgtgaggaccgcttttggtgagagtgccttgagcagcggggagcagttggattcaacttcagggcacaggagaagttaggagaagagggagagggaaagagtgggacacacagaaccagggtgcccagccaggcgagggtccgaggcaggaacgttctagcctcttcccgtgcgagtcctgctgcctctttgagcctccgtgtcttcatcactgaggaagggatttgacctgatgagaggaaggtgcccctggcttcccagtatgatgagctgccgcactacccaggcatcgtggatggccccgcagccctggctagcttcccagagacagtgcccgcagtaccagggccctatggcccgcaccggcctccccagcccctgcccccaggcttggacagcgacggcctgaagagggagaaggatgagatctatggacacccgctcttccccctcttggccctggtctttgagaaatgtgaactggctacatgctctccccgtgacggggccggagctgggctggggacaccccctggaggtgacgtctgctcctctgattccttcaacgaggacatcgctgcctttgccaagcaggttcgctctgagaggcccctcttctcctccaacccagaactggacaatctgatgatccaggccatccaggtgctgcggttccacctgctggagctggagaaggtccacgacctgtgcgacaacttctgtcaccgctacatcacctgcctcaagggaaagatgcccatcgacctggtcatcgaggatcgggacggcggctgcagggaggacttcgaggactacccagcctcctgccccagcctcccagaccagaataatatgtggattcgagaccatgaggatagtgggtctgtacatttggggaccccaggtccatccagtgggggcctggcctcccagagtggggacaactccagtgaccaaggagacgggctggacaccagcgtggcctctcccagttctggtggagaagatgaggacttggaccaggagcgacggcgaaacaagaagagggggatcttccccaaggtggccaccaacatcatgcgagcctggttgttccagcacctctcgcacccgtacccctcggaggagcagaagaaacagctggcgcaggacacggggctcaccatcctgcaagtcaacaactggttcattaacgcccggagacgcatcgtgcaacctatgatcgatcaatccaaccgcacagggcagggtgcagccttcagcccagagggccagcccatcgggggctataccgagacgcagccacacgtggccgtccggcctccgggatcagtggggatgagtttgaacttggaaggagaatggcattatctatagaggctgatgcaggagagacccagcctccggctgtgacccccagcctcacacctgcctctggttcccgcctggtcctccagcttcaggaccccacctccaaaggcccctctgctcaatgcctacctccctagggccctgctgggacatgggggcctgagtgcccatccaagggctctcaaggacaccggcaaggcctccaggccctgagccccacttctgccttcacctctgcctgggacccgagctgggctcctgggccttggtccccagaagatggcggctagggcctcgccgccaggacagagaagggacggggtggctgggcagtcagggaaggagggtcgcccggatccgacattttggagagattccttcactctcctgtcccccctacctcccttctctaatttcttcttttttttaatgataaagtcttaaaaacacggaaaaaaaaaaaaaaaaag

SEQ ID NO: 628 - DNA, 7986 bp, Homo sapiens
ggaagtgacgttaggggaaggtgggggcaatcatggtgccgctggggaggggagaagctgctgctgccgccgttgccgggagccgcggagacaagtcattacgttttcatttctcacaactgggctgagcacaactgaaccatgggggaacacagtccagacaacaacatcatctactttgaggcagaggaagatgagctgacccccgatgataaaatgctcaggtttgtggataaaaacggactggtgccttcctcatctggaactgtttatgataggaccactgttcttattgagcaggaccctggcactttggaggatgaagatgacgacggacagtgcggagaacacttgccttttctagtagggggtgaagagggctttcacctgatagatcatgaagcaatgtcccagggttatgtgcagcacattatctcaccagatcagattcatttgacaataaaccctggttccacacccatgccaagaaatattgaaggtgcaaccctcactctgcagtcggaatgtccggaaacaaaacgtaaagaagtaaagcggtaccaatgtacctttgagggctgtccccgcacctacagcacagcaggcaacctgcgaacccaccagaagactcaccgaggagagtacacctttgtctgtaatcaggagggctgtggcaaagccttccttacctcttacagcctcaggatccacgtgcgagtgcacacgaaggagaagccatttgagtgtgacgtgcagggctgtgagaaggcattcaacacactgtacaggctgaaagcacatcagaggcttcacacagggaaaacgtttaactgtgaatctgaaggctgcagcaaatacttcaccacactcagtgatctgaggaagcacattcgaactcatacaggggaaaagccatttcggtgcgatcacgatggctgtggaaaagcatttgcagcaagccaccaccttaaaactcacgttcgtacacatactggtgaaagacccttcttctgccccagtaatggctgtgagaaaacattcagcactcaatacagtctcaaaagtcacatgaaaggtcatgataacaaaggacactcatacaatgcacttccacaacacaatggatcagaggatacaaatcactcactttgtctaagtgacttgagccttctgtccacagattctgaattgcgagaaaattccagtacgacccagggccaggacctcagcacaatttcaccagcaatcatctttgaatcaatgttccagaattcagatgatacggcaattcaggaagatcctcaacagacagcttccttgactgaaagttttaatggtgatgcagagtcagtcagtgatgttccgccatccacaggaaattcagcatctttatctcttccacttgtactgcaacctggcctctccgagccaccccagcctctactacctgcctcagctccgtctgctcctccgcctgctccctccctaggacctggctcccagcaagctgcatttggcaacccccctgctctcttacaacctccagaagtgcctgttccccacagcacacagtttgctgctaatcatcaagagtttcttccgcacccccaggcaccgcagcccattgtaccaggactttctgttgttgctggggcttctgcatcagcagcggcagtggcatcagctgtggcagcaccagccccaccacaaagtactactgagcccctgccagccatggtccagactctgcccctgggtgccaactctgtcctaactaataatcccacaataaccatcaccccaactcccaacacagctatcctgcagtccagcctagtcatgggagaacagaacttacaatggatattaaatggtgccaccagttctccacaaaaccaagaacaaattcagcaagcatctaaagttgagaaggtgttttttaccactgcagtaccagtagccagtagcccagggagctctgtccagcagattggcctcagtgttcctgtgatcatcatcaaacaagaagaggcatgtcagtgtcagtgtgcatgccgggactctgcaaaggagcgggcatccagcaggagaaagggctgctcctccccaccccctccagagccgagcccccaggctcctgatgggcccagcctgcagctcccagcgcagactttctcttcagcccctgttcccgggtcatcatcctctaccttgccctcctcctgtgagcaaagccgacaagcagagactccttcagaccctcagacagaaacattaagtgccatggatgtgtcagagtttctatccctccagagcctggacaccccgtccaatctgattcccattgaagcactactgcagggggaggaggagatgggcctcaccagcagcttctccaagtgaagggcccatgtgtgctcacctctgggaaaagcgggtgagcaggaggcatgaggtacaatgcctgccatcatgggtcagaaatttgaaggatgaagaaatctactgtttgaaatcctcacctttcagacgtattttctttattcacatcccaggagcatccattttaaggaactattctttggaaaaaaacaaaaaacaaaaaaaacaacaaaaaaagctaagttataagtgaactgtttggctgcactgtatgtcacttttgcttgttgtcatgtgaacttggaaactaaggttactcgtgtgcataaaaattctaaatgaaagggtgtggtttccatcaatctgatgctgcccatcgcttgcactggggtctttgtggatcgggcaggagttttcagtgtgttgggtgttgctccttcctatgtgtcttttgaatctgaggctgacatttgcttggaaggccagacccttgctccatcagagagggcagtggcaaaggccagtgaggcagctgtgagttggacagggttcaggtgagatggtgttgtcatttgtgcttagtgttggtggtgctcagggtggataacacgggtcgttctgcagcccgcttcagcacaaataggcagcttaaggcctggctcacaggctgtggggttgatctggctctgcagaggccctaggcagcttgttgactgctgtctgttgatgacgtgtgtgcaaagcaggctctagcaacatgatcactgtccttgccttcctggttctttctctcggttggttgccagggcttgcagatcgcagtgaattttccttggggaacatcgctgttttgtcctagagtgaacttgtggcttatggccagtgctgtttggtggtctgccttctttttaatggtattttcttcctcagagcagaagggctgcattttgcttatcagaagaaggtgcagatttaagggaattcatatgaggtggcatgtaattggcaggccaggtgtcctggttccaggttccagccaggctttgggttgccccctccatctctgcccccctctggattttgcatacagcctcatacagtgcaaacaaggatgtgacttgctcagcttagtcatgtgatttatttaaaaaaaaaaaaaaaagaaacacaaaacgatgatcttctactcagggtatagcaaaacaaaaaaattccctttccaccaaaaagcctgaaatgttgcaataagttatctcatttggaatgtttcattaagttgtgttataggaaaaaattgtgtgtgtgtgttatagaattatatccatatgtctgcctttggctccaagtcattgcctcttaaaataaaagatacaatccatactagcatgaaaagtttccctcaacaggctatattaacatagtcatgagtgctgaccaaactcaccgagctcagaggccaggcatggcctgaggtgcagaataggcctctgcctcccaagagccctttccttgccctgagcaaggagtggtgttccacaaacaaggctgctcttctaagccaacagtgtcaggcaggaagcagccataattttgccttgcattttcattccctaatgtaaagggatctgcattggtcactctcctgttctctgagccattgctcagggccagccaagatattattgagaacagataatttaccttggagccagaggccctccctgcctttagcaaggatgttcagggacagacaaagagggcagtggtggtgaatgttgttactgccatgaggagaaatggcagtaagaaatcttaactacaagcagccaatttctcattccaggaccctagccagaataattgacttctttttttttttgagacagagttttgcttttgttgccctggctggagtgcagtggcgcaatcttggctcaccgcaacctccacttcccaggttcaagcaattctgcctcagcctcccgagtagctgggattacaggcatgcgccaccacgcctggctaattttgtatttttagtagagacggggtttctccatgttggtcaggctggtctcgaactcccaacgtcaggtgatcctcccgcctcagtctcccaaagtgctgggattacaggtgtgagccaccatgcctggtctagggaattgacttctttttgaccttctgcactcccttccccaaaaggattgtggcttctgttgaccattgacctcagcagaagttgataaggcaggaggtttccagtcctcctggaaaaccaactgctgagcatgagttgtccttggctgtctctgggcctcgcacccatgggaagttttgaggtagggcccttgctgtttacaacttctgagagagtagtgatgggaccccaaagtaagcttgtatcagagggcagtaatgaccttcccatatccccatcctgtggtcacctgggatttgggttccctggggcggaagtgggaaataggagcccagggaaggacatctgaagcacccacagtttaaatagcgactcttcttggttagccagggctgtgctcatgttgggccctacccaggtcagtggccttttcactctcaaagatcgggggtgacgaagcagcatcttaaacagtgtttaggctgacagatttttccagttgaagaagctgaagtatctgccttttgagggtgactctagattacaagagagactatcagatccaatcagcttttgaaaaatcaggaatgtgcttaaaatgccagtgagtggttgtgaagatcaggtttatttcccaggataggcagtctttctttccctccttttccagttctcttttcctacctgtccttccataagcctggtctctagtgccgaggaccttggagaagagagggcccctagctaagctggagccagaaagaaccttcatggtgagtgtggtttcccaaacttgggaaatgaacctagggtgaggttagggaggatttgtagaattctagcaggtaaaaatcaagcctttttcccctcccatagtaaacttaaccattttcaccctgtacgttatcttctagctcctactaacatctccaattagacaaccgcttcaaagggtgcttagcaccagggattggggttcatggacttaggaggtggtaaggaaactggctggcaccaccaaactgccttagtgaacttggcccttcccaggcaggtaggttgggcattgagggaaggtggcccagtctttgctggcagggtctggccagtctcatgggggcaccaccagtttggtgacagaagtggtgtcatttattgaattccacctccgtttagaaggagatcatggtacaaagcccaggaggggccttaagatgtgaagatctctctgagtaaaaggcaaggggcttctcttcttcacctctgggatagttggtagatcggagagttttattttcagggtcaaggctgtggactgatggggatattggagggtgggtgggttttcctgagagactttgtataatgctgaatgtgtccagagggacaagtttgcagaacctcatattggtatattaaagaaataataaaataaaaaagcactttaggttattttatctttaacccgattgctgcaatttcttttgtgtgtatatatacatatatatactttccacaaagttttattttttgctcagaataaaaagttaaattgaggtgtgaaaagaaaagcacttaccttggtgcaatatgtgtagcttgatggtcgttgtcccatgtggccctggcctggcagcgtttttccgctcaatcagccctgtgctgtgagactgtccatagggaaacactattatgcattctcagcaaccgctcaatctatgcaagccttccctgtgtgccccagggcgccccctcaggctctctgaagaactgctgtgggtcctgttttctgctgactgttgaggccctttttcatcacttcttggtctctcgccatcttttccctcttcaccattacaaaatgatgcctgaaaggaaggaacagattgttcctaggtagaaacctggcaccttctagacttttatatttgtaatcacatccattgtccttaaagacttttccagagtgattgaaaccattgatttgtggaactgcaacaatatttctcaagagtttacaattgtcttacaccaccaatcagaaatatgtttggggaggcatgggtggcagggggcaacatgagccatttccatactgctccccatactacctgtgttggttccttaagcaaaaaggcctccagccttcattaaatcctataaacaaacattacatcccatgaatcattatcaactttcttcctttactccacctcccccattttatcttcaattctcaggctatagaatagacaagttttagaatatacttcagccaaagcagaaggattttcatagatccaatatgcaaatagttctgctgtgacatagatcagaaattgtctgttccttaatatttgggggtggaggcaacaaaactgaagcatatttctgattggttagccattttggcctgtttcctcttgcatgttttttagggagagagggaaacagtcctgtatttcttctgatgccctttggggaagccgacgaccactgggcatttctcactgttactcctgttcaagagagggcttctcagtctgcactgaaaaatgcaaattaaactggatctttatgtcaatgtgtacatagtacaagcttttttactggaattgaggtttaaaaccacacactgcccttttggtggtgtgcctgttgggccaaaaattgggtgataatgtagtgtcactttctcagctcaatgcagtttctactttttcttatgggaaaatttttcataaaacctttttgcaccaaaacccaggggtgttttttgcaatatccttgttatcctcgtagtgtgccaagtcagaggctttctcttgcccttttcctgctgtgttctcaggcctcccaagggctatttgactcaacagtctacatccttcgttgtgttttggagaatgtgggggtgggggtcagagttcaaggtgtctgttcccttttcctgtgaactctttctagtccctatttggggagggtggctggaaacagatttttgctgaatttctggctcagatcttctagccaggaaaggcaagagcccccaagagcccttttttttgacatacactaatcattggccggggtcttggtgacaacttttaaaatcccaaatagttttatttggattatgtaaaagtaagtgtgaaacatgggaacaacggacttccactgagcgatgtgaaaacgttacaggttcagtacttccaaaggaagaaacctccaaacccaaaaaagaataaatatgaatttgtatttttgaagaatgtgaaataatggtgtttgcttaattgctcattttgtataaacttaatattgtactttaaaatatctgctaaaaagtgaaaatttaactttttggaattgaaaaagcaatattaaatactaatgaaatcctaattaaatgcttatttaaatctggtaaaaaaaaaaaaaaa

SEQ ID NO: 629 - DNA, 1483 bp, Homo sapiens
ccgcggcacccacgtgcagcggctgggcccggcgctttcaggggaccaccaggcccccagagcgccgtgctatgttgggggctagtcactagcacggggctggaagctgagatcaaagacgccaatgagccggcgtgggtggatgagtgaggcgggcaagaagcagcaccggttagcctgagggttcgctccagggccaggcctggagccagcgcccttacctgcccctggaaagtctgagaccactcggggcggggcggctgccggagggtgggctgcggctccgtggcgggttccagaggggcggagccaagggctgggcgttcccgcgggcggggcgtcccgggggcggggcgggcccctgtgtttgttgcaccgtgtcagttactttgtaacaaaagtgctgcagccgcttgctccggccggcaccctaggccggcccgccgccagctgtcgccgacatggaacccttggccagcaacatccaggtcctgctgcaggcggccgagttcctggagcgccgtgagagagaggccgagcatggttatgcgtccctgtgcccgcatcgcagtccaggccccatccacaggaggaagaagcgacccccccaggctcctggcgcgcaggacagcgggcggtcagtgcacaatgaactggagaagcgcaggagggcccagttgaagcggtgcctggagcggctgaagcagcagatgcccctgggggccgactgtgcccggtacaccacgctgagcctgctgcgccgtgccaggatgcacatccagaagctggaggatcaggagcagcgggcccgacagctcaaggagaggctgcgcagcaagcagcagagcctgcagcggcagctggagcagctccgggggctggcaggggcggccgagcgggagcggctgcgggcggacagtctggactcctcaggcctctcctctgagcgctcagactcagaccaagaggagctggaggtggatgtggagagcctggtgtttgggggtgaggccgagctgctgcggggcttcgtcgccggccaggagcacagctactcgcacggcggcggcgcctggctatgatgttcctcacccagggcgggcctctgccctctactcgtgccaggcccacttgccaggcaggagccctccccaagccttcagggctgctcggagtcacctgttggaatggactaaaaggacccttgtgtgggaacaggtgctccccaaacaccctgctgctggctgccaggcaggccctctggaagggaaggggcaggactcatcaggacctccctggacccctgcagggcaggcagcttgggcccgagcccaagcatttggctctgctgcccccaaggggacaggaagcctcttgggcctcttcccttcctggacaaggccccctgcctttgcctcacataaactgtacagtattttcattaaaagcctctttcataacttccaaaaaaaaaaaaaaaaaa

SEQ ID NO: 630 - DNA, 3773 bp, Homo sapiens
ccgtcccggggcggacgggcgcgggcgggaggatggagctgaactccctgctgatcctgctggaggcggccgagtacctggagcgcagggatcgagaggccgagcacggctacgcctcggtgctgcccttcgacggcgacttcgccagggagaaaacaaaggcggccggcctggtgcgcaaggccccgaacaacaggtcttcacacaacgagctagaaaagcacagacgagccaaactcaggctgtaccttgagcagctcaagcaactggtgcccctgggccccgacagcacccgccacaccacgctgagcctcctgaagcgggccaaggtgcacatcaagaaactggaggagcaggaccgccgggcactgagcatcaaggagcagctgcagcaggagcatcgtttcctgaagcggcgcctggagcagctgtcggtgcagagcgtggagcgcgtgcgcacagatagcacgggctctgctgtctccacggacgactcagagcaagaagtggacatagagggcatggagtttggccctggtgagctggacagtgttggcagcagcagtgacgcggacgaccactacagcctgcagagtggcaccggcggcgacagtggcttcgggccccactgccggcggctgggccgccccgccctctcgtaggcccgtgccctctgctccttggcctgcctgcccgccagccacgcgtgtcagccctccagttctccttcagttgacgccagcctctccacaggcccactgctgtgccattctggaagctccagctgctgctgggctgcctggcactgcccgcttgccggtcagggcctgccgagctgcctgccccttccagctgggcagagtcccctgcaaggaggcagggcccagcttccacatccggagccctggtcagcatagccgcccacggtctgttctcagattcctaatcattccagaagtattaaacgtcattgctgcaaacctcggcaggtgccgtgtgaggggcttaatgaccaccacagggagctcagaccccaaccctggatcccaggagaaaggagtggaccgaggaaggaaggaaggcaaggctgtctgtccatccgtccgtctgtccacctacctgtcagtccacataggctcctggcgtggacaaggggtctgtgaagggcgggaactgggtgagcacctggggcaggtgggtggttaaggtccttcccacttcgcaggtgtcagaacctagggctgggctctcggggccaggcaggccagcccagcccacgccgagctgggcagcgtctgctctggtaggactgtcagacgcacacgcgcacgcacctagacacacccactcatgtacatgctcacacatgcagacacacctgggcgtcccgaggtcacatgttctggggatgatggccttcaggggtcatctggcaaacagcccctgggctgtgcctggatccccctctagctcctgctcacccacgcccacccagtagtcctgcctgtctgcacaggagaggggcttctcttcctggctggggctggggtgaactggaggctggttaagttgcagccgctgggtcctcgggggcttactcatctcccttttttaaacaaaaagcaaaaaagtaaaatgctgcactgcccagcagcccggttagggctcctggagccaccttaggaaagggcttctcatgagctctgctgcggcagcttcagctggcagagaggctttcccagaaaaaaaaaaaaaaccatttttaaaaagaagaaagcctaaagactctcggcctagggacgtccgtgtgtgccgcctctgtttcctgtaccagatttttgtattctattttcctagctgttgttgcgtccttgtttgctgaggggtgggagccacccagcgtctcagggacctgtccctccgtcacgtcgtcaaagtgtgccttgtgtcttgtgtcaggccttgcccttcccaccagcatgtccctcgtggctcagggtgccccaggcctgcccagctagtgctgtcctcccatctcctgtgggcagcccctcccggcagccagggcttcctggaggcgatgcagccaggcccctgtgggtggcacggaggggctgtgacctggtccccagtgttgccctccccagtggctggcaggggcctgcttgctcactagagagatggattctcacctgtcacctgactcgagccccctgcttcctggcctaggcgagggttccaggtttcagacactggcagccaatgaagactgtgctcgctgggtggtgcaggcctggcaccaggaggcttgcacccgcctttccttcctgacgtcctctgtccttggggctggcccatagcagtgcctgccgtgcctctggtacatctgtagccaattcccatatcatggggaaaattcgtgtctattttcagtcgtacgcatagacgccccaggatggggggcccactgtggcggaagggggtccctggaaacaactctggcacagaacctgccctgcaggctgtagggggcatggtgcctggagctgaggggcatccgaacgcgttgcgggtggttgtgaggaggcctgtctgcatctccttccggccccactggggtccaggggtgcccagaaaggagcttcccctgcctgcctgagtctgtccccccaggcttcatttcaaacaccgtggcacctccgagcaaggcgggccgtgtgtaaaagcttgcttccccagccagcactgcagggccctgaggtggtcgtgtccctgccctcaattcttgaagcaccagctccctgccccaccctccagtgcctgaggcagctaggggcttctgctctcatctctgaccagcagaatccacccggtgaccagtggtggcccctcagcccaccctcccggcagctcagcctgtggctcttgaggccgtggttcccacgtggactgggaggcagtctcagccacccggggtgctgttcagctgcccctccctgccatcagcaggtgggtgaggggttgcccactgggtgggggcccgtgctaggagtcaccacatgctccaacctcccactgctccctgtcaggggcccaggctgccatcactggaggctgcagggaccaagaggccatcaccgtgtctatagagagcagacagaagcagaacagagcccggggctcctgagcctctgcgtgtgccctcccagcccacaccagtgctctcggccactgagcacccagactcaggcttgggttccccagccttattggaaggcagctcccgcataccaggataacccccgcaaaccacatagcagacccccgccatcctcgcagagtgggagaggctgcagcaaggctttgcctctgcagaccccatcttagtggcacggtgcttgggcctgtgtccccgggtggtggaaccctgtaccggtctgtggccctagggtccctgctctgtctgccccggcccgtgctgtccgctgggtgaggcaggctcccccgtgccctgcctccctctgtcagggaacctgggaccccctccccactgcctgcacagaggaccctgaccctcggccagcagggtggccccaggtccatgttgggcactagggcaggttccgtgccagagtcgggggccacacgagggcctggtgccggtgaggggggcgtgcgctagagggggaaaggggcccccggccacctgtccaccgtgtgggccgtgctgtgtccttatgtcattgtaatataaatacagatttttatatctc

SEQ ID NO: 631 - DNA, 3272 bp, Homo sapiens
cacgcgcgggctgcccgcggcacggcgggcgcggctggcgcggctggggcggcaggggcggcggagagcgcgccgagccgcggccgagctggcccgcccgcccgtcgcacatgttccggaacggcgcccggccgtagccgcctgcggcgcctcctgtcggcccgagaagggagtgcggagaggcgccggtcgccacccgcggtgcccatggagcgggtgaagatgatcaacgtgcagcgtctgctggaggctgccgagtttttggagcgccgggagcgagagtgtgaacatggctacgcctcttcattcccgtccatgccgagcccccgactgcagcattcaaagcccccacggaggttgagccgggcacagaaacacagcagcgggagcagcaacaccagcactgccaacagatctacacacaatgagctggaaaagaatcgacgagctcatctgcgcctttgtttagaacgcttaaaagttctgattccactaggaccagactgcacccggcacacaacacttggtttgctcaacaaagccaaagcacacatcaagaaacttgaagaagctgaaagaaaaagccagcaccagctcgagaatttggaacgagaacagagatttttaaagtggcgactggaacagctgcagggtcctcaggagatggaacgaatacgaatggacagcattggatcaactatttcttcagatcgttctgattcagagcgagaggagattgaagtggatgttgaaagcacagagttctcccatggagaagtggacaatataagtaccaccagcatcagtgacattgatgaccacagcagcctgccgagtattgggagtgacgagggttactccagtgccagtgtcaaactttcattcacttcatagaacccagcatgacataacagtgcagggcaaaatattcactgggccaattcaatacaaacaatctcttaaattgggttcatgatgcagtctcctctttaaaacaaaacaaaacaaaacaaaactatacttgaacaaaagggtcagaggacctgtatttaagcaaatacttagcaaaaagtggggcagagcctcccaaggagaacaaatattcagaatattcatattggaaaaatcacaatttttaatggcagcagaaaacttgtgtgaaattttcttgatttgagttgattgagaagaggacattggagatgccatcctctttctcttttctagtttgctcatactacattgagtagacacatttaaggatggggttatgaacccttcctgagctttatggtcctaaaagcaaaataaaaactattcgaatgaaaagacaagaaaatcaggtattaatcttggatagctaataatgagctattaaaactcagcctgggacagtttatcatgaagcctgtggatgatcaatcctttattattattttttttttttgaaaaaagctcatttcatgctctgcaaaaggagagactcccatgaagccttttgaaagggatcatcatgcagctcaactttctgttggattccatgctaagcaagctaaccttatcctgcattgttagcactaggcacccagctgccacctctccatcctgctgcccttaggccacatgggagcagtccatgcatgacagcctctatcctacaaggcctatgagtatggattgggggggccaaaaggaaaaagctccatgtgcctctttgtctgcgtgggtcagaagagttgtgcacgcagattagcaggccaaggtctgagccacagcagcatttttatttcagattttgataactgtttatatgtgttgaaaaccaaaatgacatctttttaaagcttatccataaaaaaaaatagatgtcttttatagtggaaaaacacatggggaaaaaaatcatctattttgatgcagcatttgataatgataaaacacctcacacctcactctttatagtgcacaaaatgaatgaggtctgggctaggtagaaaaagggtcaatgctatttttgtttttagaatcattaccttttaccagcttttaaccatctgatatctatagtagacacactatcatagttaacatagtaagttcagcacttgtctcattttaatgtaaagatttgcttccattttcctacaggcagtctctctcttcctcacagtcccactgtgcaggtgctattgttactcttacgaatattttcagtaatgttattttcttctaagtgaaatttctagcctgcactttgatgtcatgtgttccctttgtctttcaaactccaaggttcccttgtggccctctcccttaccctgggaaggcctcttggagaccttacccctggctgtttggactttgtatactttaaataatttaactacccttaattacttaaaaaaaaaaaaaagctttatgattttcataacttattgctgattttaatggattgttaatttcagtcctgtagttttattttatgtttagatagggctgggcaaggaaaaagaaaataaagacaaccatatttagcagtgcagttgagttgtgtgttaatgttagactatccctttgtgagtgacactttaacagcattcactgcttctatatatagtgtaccatcttggtcatacattacgcctcaacatatacttgtgctcttcctttgcctccagaagaagtttttccttgattgtgctatgtttcagtggaagaaattctttgaagtagatgtgagtgaaaaactgcatgcctttagaagcccagtatcagaacttgctacgtttcaggtgctagggacttaatgaaaaacaggacaaaacaattcctttttgtggcccaggtaaattatttctggtttcacttataattactaatggctgagtcaagatgttgtctctgtgtttgcttactcttgatcaagtgtgagacagtttgaagactgtgctaccatacaaagtgaatgaagccagtgactaagcttctgtttgttttgttattctcatggccttcgcttgcattatttgggccttcattcagatgaacttgaggtgccattttgttgcatatgtacaggattatgggctggaaagcatttgttataaacctatagtgcacattttaactgccccctaaattacccttccctgggtttgttttccttggggtggtgtagattgtatgagtaagaagtattaattttttaaaagacaaatcaactttgaagacacaaaagttaattggaagaaataaaaactgtgaacgaagaa

SEQ ID NO: 632 - DNA, 3342 bp, Homo sapiens
aatatcaacctgtttcctcctcctccttctcctcctcctccgtgacctcctcctcctctttctcctgagaaacttcgccccagcggtgcggagcgccgctgcgcagccggggagggacgcaggcaggcggcgggcagcgggaggcggcagcccggtgcggtccccgcggctctcggcggagccccgcgcccgccgcgccatggcccgaagaccccggcacagcatatatagcagtgacgaggatgatgaggactttgagatgtgtgaccatgactatgatgggctgcttcccaagtctggaaagcgtcacttggggaaaacaaggtggacccgggaagaggatgaaaaactgaagaagctggtggaacagaatggaacagatgactggaaagttattgccaattatctcccgaatcgaacagatgtgcagtgccagcaccgatggcagaaagtactaaaccctgagctcatcaagggtccttggaccaaagaagaagatcagagagtgatagagcttgtacagaaatacggtccgaaacgttggtctgttattgccaagcacttaaaggggagaattggaaaacaatgtagggagaggtggcataaccacttgaatccagaagttaagaaaacctcctggacagaagaggaagacagaattatttaccaggcacacaagagactggggaacagatgggcagaaatcgcaaagctactgcctggacgaactgataatgctatcaagaaccactggaattctacaatgcgtcggaaggtcgaacaggaaggttatctgcaggagtcttcaaaagccagccagccagcagtggccacaagcttccagaagaacagtcatttgatgggttttgctcaggctccgcctacagctcaactccctgccactggccagcccactgttaacaacgactattcctattaccacatttctgaagcacaaaatgtctccagtcatgttccataccctgtagcgttacatgtaaatatagtcaatgtccctcagccagctgccgcagccattcagagacactataatgatgaagaccctgagaaggaaaagcgaataaaggaattagaattgctcctaatgtcaaccgagaatgagctaaaaggacagcaggtgctaccaacacagaaccacacatgcagctaccccgggtggcacagcaccaccattgccgaccacaccagacctcatggagacagtgcacctgtttcctgtttgggagaacaccactccactccatctctgccagcggatcctggctccctacctgaagaaagcgcctcgccagcaaggtgcatgatcgtccaccagggcaccattctggataatgttaagaacctcttagaatttgcagaaacactccaatttatagattctttcttaaacacttccagtaaccatgaaaactcagacttggaaatgccttctttaacttccacccccctcattggtcacaaattgactgttacaacaccatttcatagagaccagactgtgaaaactcaaaaggaaaatactgtttttagaaccccagctatcaaaaggtcaatcttagaaagctctccaagaactcctacaccattcaaacatgcacttgcagctcaagaaattaaatacggtcccctgaagatgctacctcagacaccctctcatctagtagaagatctgcaggatgtgatcaaacaggaatctgatgaatctggaattgttgctgagtttcaagaaaatggaccacccttactgaagaaaatcaaacaagaggtggaatctccaactgataaatcaggaaacttcttctgctcacaccactgggaaggggacagtctgaatacccaactgttcacgcagacctcgcctgtggcagatgcaccgaatattcttacaagctccgttttaatggcaccagcatcagaagatgaagacaatgttctcaaagcatttacagtacctaaaaacaggtccctggcgagccccttgcagccttgtagcagtacctgggaacctgcatcctgtggaaagatggaggagcagatgacatcttccagtcaagctcgtaaatacgtgaatgcattctcagcccggacgctggtcatgtgagacatttccagaaaagcattatggttttcagaacacttcaagttgacttgggatatatcattcctcaacatgaaacttttcatgaatgggagaagaacctatttttgttgtggtacaacagttgagagcagcaccaagtgcatttagttgaatgaagtcttcttggatttcacccaactaaaaggatttttaaaaataaataacagtcttacctaaattattaggtaatgaattgtagccagttgttaatatcttaatgcagatttttttaaaaaaaacataaaatgatttatctgtattttaaaggatccaacagatcagtattttttcctgtgatgggttttttgaaatttgacacattaaaaggtactccagtatttcacttttctcgatcactaaacatatgcatatatttttaaaaatcagtaaaagcattactctaagtgtagacttaataccatgtgacatttaatccagattgtaaatgctcatttatggttaatgacattgaaggtacatttattgtaccaaaccattttatgagttttctgttagcttgctttaaaaattattactgtaagaaatagttttataaaaaattatatttttattcagtaatttaattttgtaaatgccaaatgaaaaacgttttttgctgctatggtcttagcctgtagacatgctgctagtatcagaggggcagtagagcttggacagaaagaaaagaaacttggtgttaggtaattgactatgcactagtatttcagactttttaattttatatatatatacattttttttccttctgcaatacatttgaaaacttgtttgggagactctgcattttttattgtggtttttttgttattgttggtttatacaagcatgcgttgcacttcttttttgggagatgtgtgttgttgatgttctatgttttgttttgagtgtagcctgactgttttataatttgggagttctgcatttgatccgcatcccctgtggtttctaagtgtatggtctcagaactgttgcatggatcctgtgtttgcaactggggagacagaaactgtggttgatagccagtcactgccttaagaacatttgatgcaagatggccagcactgaacttttgagatatgacggtgtacttactgccttgtagcaaaataaagatgtgcccttattttacctaaaaaaaaaaaaaaaaaaaaaaaaaaaaa

SEQ ID NO: 633 - DNA, 4585 bp, Homo sapiens
ctgacctggaagcggctggggccggagcacacgtgtttcgtgtttcggtgagtgtggcggagatggagagccgggatcccgcccagccgatgtcgcctggagaagcgacgcagagtggcgcccggcctgccgaccgctatggcctattgaagcacagtcgcgagttcttggacttcttctgggacattgcgaagcctgagcaggagacgcgacttgcggccacggagaagctgctggagtatctgcgtggcaggccgaaggggtccgagatgaaatatgccctgaagcgtctaatcacgggactcggggtcgggcgagaaacagcccggccctgctacagtttggccctggcacagctgttacagtcttttgaagacctccccttgtgcagcatcctgcagcagatacaagaaaaatatgacctgcatcaggtgaagaaggcaatgctgagacctgctctctttgcaaacctgtttggagtgctcgccctctttcagtcaggtcggctggtgaaggaccaggaggcactgatgaagtcggtgaagctgctgcaggccctggcccagtaccaaaaccacttgcaggagcagccccggaaggccctggtggacatcctctccgaggtctcgaaggccacattgcaggagatcctgccggaggtcctcaaagccgacttgaatataatactcagctcccctgaacagctagagctcttcctcctggcccagcagaaggtgccctccaagctcaagaagctggtgggatccgtgaacctattctcagatgagaatgtccccaggctggtgaatgtgctgaagatggccgcctcctctgtgaagaaggaccgcaagctgcccgccattgctctggacctgctccgcctggcactcaaggaagacaagttcccacggttctggaaggaggtggtggaacaagggctgctgaagatgcagttctggccagccagctacctgtgtttccgcctgctgggcgcggccctgcccctgctgaccaaggagcagctgcacctggtgatgcagggagacgtgatccgccattacggggagcacgtgtgcactgctaagctcccaaagcagttcaagtttgccccagagatggacgattacgtgggcaccttcctagaggggtgccaggatgaccctgagcggcagctggccgtgctagtggccttctcatctgtcaccaaccaaggcctccctgtcacgcctactttctggcgggtcgtgcggttcctgagccctccggccctgcagggctatgtggcctggctgcgggccatgtttctccagccagacctggactccttggttgacttcagcaccaacaaccagaagaaagcccaggattcatcgctccacatgcctgagcgagctgtgttccggctgaggaaatggatcatctttcgattggtgagcattgtggacagcctgcacctggagatggaggaggccttgactgagcaggtggccaggttttgtttgttccactcgttctttgtcacaaagaagcccacatcccagatccctgagacaaagcacccgttctccttccctttggaaaaccaggcccgagaggctgtcagcagtgccttcttcagtctgttgcagaccctcagcacgcagttcaagcaggcaccgggccagacccagggtgggcagccctggacctaccacctggtgcagttcgcagacctcctgttgaatcacagccacaacgtgaccaccgtgacacccttcactgcgcagcagcgccaggcctgggaccggatgctgcagactctgaaggagctggaggcccactccgcagaggccagggctgctgccttccagcaccttctgctcctcgtgggcatccacctcctcaagtcccctgcagagagctgtgacctgctgggtgacatccagacctgcatcaggaaaagtctgggagagaagccccgccggagccgcaccaagaccatcgacccccaggaacccccgtgggtagaggtgctggtggagatcttgctggccctgttggcccagcccagccacctcatgcgccaggtggcccggagcgtgtttggccacatctgctcccacctgaccccgcgtgccctgcagctaattctggatgtgctgaaccccgagaccagtgaggatgagaatgaccgtgtggtggtgacggacgattctgatgagcggcggctgaagggtgcagaggacaagagcgaggaaggtgaggacaacagaagctcagagagtgaagaggagagcgagggggaggagagcgaggaggaggagcgcgacggggacgtggatcagggcttccgggaacagctgatgaccgtgctgcaggctgggaaggcgctgggtggagaggacagtgagaacgaggaggagctgggggatgaggccatgatggccctggaccagagcctcgccagcctctttgccgagcagaagctgcgtatccaggcccggcgagacgagaagaacaagctgcagaaggagaaggctctgcggcgcgacttccagatccgggtgctggacctggtggaggtgctagtgaccaagcagcccgagaatgccctggtcctggagctgctggagccgctgctgagcatcatccggcgcagcctgcgcagcagcagctccaaacaggagcaggaccttctgcacaagacggcgcgcatcttcacgcaccacctgtgccgtgcccggcgctactgccacgacttgggtgagcgcgcaggggccctgcacgcccaggtggagcggttggtgcagcaggctggccgccagcccgactcccccaccgccctctaccacttcaacgcctctctctacctgctccgggtcttgaagggcaacactgctgagggctgcgtgcatgagacacaggagaagcagaaagctggcactgaccccagccacatgcccacgggcccgcaggctgccagctgcttggacttgaacctggtgacccgggtgtactcgacagcactgagctccttcctgaccaagcgcaacagccccctcacagttcccatgttcctcagcctcttctcccggcacccggtgctctgtcagagcctgctccccatcctggtccagcatatcacgggcccggtgcggccccgtcatcaggcctgcctgctgctccagaagaccctgtccatgcgggaggtgaggtcgtgctttgaggaccccgagtggaagcagctgatgggccaggtcctagcaaaggtcaccgagaacttgcgcgtgctgggggaggcgcagaccaaggcgcagcatcagcaggcactgtcctccctggagctgctcaacgttctcttcaggacctgcaaacatgagaagctgaccttggacctgacggtgctcctgggtgtgctgcaggggcaacagcagagcctacagcagggggcacactccaccggctccagccgcctgcacgacctctactggcaggccatgaaaaccctgggagtccagcgccccaagttggagaagaaggatgccaaggagatccccagtgccacccagagccccatcagtaagaagcggaagaaaaagggattcttgccagagacgaagaagcgcaagaaacgcaagtcagaggatggcacgccagcggaggatggcacacctgcagccaccggcgggagccagccccccagcatgggcaggaagaagaggaacaggacaaaggctaaggtcccagcccaggcaaacgggacgccaaccaccaagagtccagcccctggcgcccccacccggagccccagcacccctgccaaatccccaaaactgcagaagaaaaaccagaagccgtcccaggtgaatggagctcccgggtcccccacggaacctgcaggccaaaagcagcatcagaaggctcttcccaaaaagggggtcttgggcaaatcaccactgtccgcgctggcacggaaaaaggcaaggctgtctttggtcatcaggagtcccagcctgcttcagagtggggccaagaagaaagcacaggtgaggaaggcagggaagccctgagcacaggtacgggcccccctcagcccctgcctccatctgcctgagacgcctattttttttttttttttttaaaccatgattttaatacgcaagctgtttctaaggcgctgccactggggagggtggctgttgccgcctgcccgggcatcctgctctggcaagcacagcctgagccattcctgcaggggtcccagggtgcagagacctccccacccccggttctgggctgggaccctggctccagggccatgtccagggctctggtgtttgcctgggttggtgcaggttgatgtgctggctgcaggcaggtgtgaccatctctcgtgcctgccacctctttgcccccaggcttttttgctgtgagggagccaccagggggtgatttaaataggtttatttcttcatttacaagaggaatatatttggcttctctcttaagactctgagattcacaatcagcagctctaaaaaataaaggagcagtttggcttccggaaggaagaggaggcaacactcggaaaaaaaaaaaaaaaaaa

SEQ ID NO: 634 - DNA, 3587 bp, Homo sapiens
gaattcagcacaatgaaggagccatggaatgccaatttaacgtcagtcttgtacttgaagggaaaaaaaacacttgtaatggtggcaacagtgaagctgttcctttaacatccccaaatatagccaagtttagcactccaccagccatcctcagaaagaagagaaaaatgcgagtgggtcattccccaggcagcgaacttagggatggctcattgaacgatggtggtaatatggcgctaaaacatacaccactgaaaacactaccattttctccttcacagtttttcaacacatgtcctggtaatgaacaacttaatatagaaaatccttcatttacatcaacccctatttgtgggcagaaagctctcattacaactcctcttcataaggaaacaactcccaaagatcaaaaggaaaatgtagggtttagaacacctactattagaagatctatactgggtaccacaccaagaactcctactccttttaagaatgcgcttgctgctcaggagaaaaaatatggacctcttaaaattgtgtcccagccacttgctttcttggaagaagatattcgggaagttttaaaagaagaaactggaacagacctattcctcaaagaggaagatgaacctgcttacaaaagctgcaaacaagagaataccgcttctgggaagaaagtcagaaaatcactagtcttagataattgggaaaaagaagaatcaggcactcaactgttgactgaagacatttcagacatgcagtcagaaaatagatttactacatccttattaatgataccattattggaaatacatgacaataggtgcaacttgattcctgaaaaacaagatataaattcaaccaacaaaacatatacacttactaaaaagaaaccaaaccctaacacttccaaagttgtcaaattggaaaagaatcttcagtcaaattgtgaatgggaaacagtggtttatgggaagacagaagaccaacttattatgactgaacaagcaagaagatatctgagtacttacacagctaccagtagtacttcaagagctctcatactgtaattgttattaaaattgatgaaatgccccactcccttactgcagtctctactaaattaggttgcagtgaaatttttctcaattagttgtttttaaagttgtaagatacccttttaatacagcatcttttttctattctatatagtaggcagaaagctagtaagtcacttaaggggtagatagtttcatagtttattttttaagagatgagatttttaaaaattgtttttaaagaacaagatgggaaaataatagaatgttcatggatttctaaaagtaaattctcatatattttcttcacaagatatatgttgctactctcttgatgctgcagttttgttatagataggtgtatgagtatatatgatttctgaaattagtctatgtatggaaagcacacatgattttatgaaggtacttttgcccatgtgctgatttacttaggctaccatttacaaagaaacacattgaaaaggaatttaaaggaaggatagaaagttgcactactaattttttgttttttttttcagaagcagtaaaattaactacagtgttaaatgtatttatttgagcatagtactgaaaacaaaaagcattcaaaaaagagttttttctttattagtaaatagtattttcttaatctcagaggagctgagagttttgttgaatgtattgtacagtatgtaggagcaggagaactttgtaaattggaaagaagtctgtttttataatttatttttatttttaaagcttaaatgtagatatttatagtatacagggagcctagaagccaatgttgtttcctgttattacagctaacacagtaaagaataattttgactttaagtatgaaacagtagtaagttatagctgcaaagaatacaatatctatactgtatgtcacatctacctaaatgttgcactatgccctttaaatcatgctggttataaagtagttctaaaaatgtactaaataataatttaatattttctttttaaattatatcgggggtggtcatatacattaatctggtgatttgtatatgtgtttgaaattttttgcttttgtttaaaaaaaaataatatggtaccttggtccctaaaaacagtctgcacttagaagttatatttactcagtgtttcagaagtggagaacttatcttttatttataaaaatattttgtccttttttaaatgttttgtgtttctctacaggttacaacagttgcttcagttgcctgttttaggtgtttgcacttattttatttcttcttgaaagaatttttatttgcttttgtggtagagattatatgtaattttttttcagtcatataatggtgtgctgtcaacttaaacactgacaggtaaatagaattgtacactgtagtttgaattatttataattgacacactctctccctctccactcctgaagtatgctgctatagaaaatagcagaatcggcttgctgctacgagagaaggaaagagcgaccaccacttgcactgtgtgaaaagataaaaaacaaatgatggcaagttctcaagttaactaaatggaatcaaccattaccaggcaaattcttgcaaataccaaaatactactatgccttataaaacaaaatgaaagcaggttaagattttctgctctgtttgtatgttaatagaaatggaaatactaagtattttaatgcttagctattgaacagtagacctaaaagggttttaagctatttaaatctacttgctagtttttgcatattttatatatatatatatttatatatatatatagtgagaagtgaagaaaatgtatggtactaagattatgccttattgataaatagataaaccaatttgaatcctcttagcatgtttaagtatgttgattgctttctaattaatgaacttctcacagaaatttcacttagtgaaaccaatgattgtagcaaactcatactggatcatttcagttaccttgaactaatagcacataatggttttttgttgttgttgtttttaatgtagcccttacctggatatacatagtctgcaatcaccaaagtataatatcttgtaaggctatattttttaaagcatattttttcttgagcattaaattatcctaaatggtaatatattgtggataagtctgggcttattggacataatacatatttgggttggtactggttgaatccttcagttaactgctttgttgctttttgcaagattttttatcttaaacatgtcaggcatcttaagtcacctttatactgttttgttcctctgagtttctttcagtatgttatacaaatgccagacataacatgtagcagccatacttgcatggaaactgactacacatacataatactgcattttattgtaaggttttcacattaatacagcaattaccctgactaaattgagttttgtgatatatggaaaacttcattgtaagagaatcttgcatacaatgttgactattaacatccaaaataaagcatctgtgtacaag

SEQ ID NO: 635 - DNA, 2731 bp, Homo sapiens
gcgcttggcgggagatagaaaagtgcttcaacccgcgccggcggcgactgcagttcctgcgagcgaggagcgcgggacctgctgacacgctgacgccttcgagcgcggcccggggcccggagcggccggagcagcccgggtcctgaccccggcccggctcccgctccgggctctgccggcgggcgggcgagcgcggcgcggtccgggccggggggatgtctcggcggacgcgctgcgaggatctggatgagctgcactaccaggacacagattcagatgtgccggagcagagggatagcaagtgcaaggtcaaatggacccatgaggaggacgagcagctgagggccctggtgaggcagtttggacagcaggactggaagttcctggccagccacttccctaaccgcactgaccagcaatgccagtacaggtggctgagagttttgaatccagaccttgtcaaggggccatggaccaaagaggaagaccaaaaagtcatcgagctggttaagaagtatggcacaaagcagtggacactgattgccaagcacctgaagggccggctggggaagcagtgccgtgaacgctggcacaaccacctcaaccctgaggtgaagaagtcttgctggaccgaggaggaggaccgcatcatctgcgaggcccacaaggtgctgggcaaccgctgggccgagatcgccaagatgttgccagggaggacagacaatgctgtgaagaatcactggaactctaccatcaaaaggaaggtggacacaggaggcttcttgagcgagtccaaagactgcaagcccccagtgtacttgctgctggagctcgaggacaaggacggcctccagagtgcccagcccacggaaggccagggaagtcttctgaccaactggccctccgtccctcctaccataaaggaggaggaaaacagtgaggaggaacttgcagcagccaccacatcgaaggaacaggagcccatcggtacagatctggacgcagtgcgaacaccagagcccttggaggaattcccgaagcgtgaggaccaggaaggctccccaccagaaacgagcctgccttacaagtgggtggtggaggcagctaacctcctcatccccgctgtgggttctagcctctctgaagccctggacttgatcgagtcggaccctgatgcttggtgtgacctgagtaaatttgacctccctgaggaaccatctgcagaggacagtatcaacaacagcctagtgcagctgcaagcgtcacatcagcagcaagtcctgccaccccgccagccttccgccctggtgcccagtgtgaccgagtaccgcctggatggccacaccatctcagacctgagccggagcagccggggcgagctgatccccatctcccccagcactgaagtcgggggctctggcattggcacaccgccctctgtgctcaagcggcagaggaagaggcgtgtggctctgtcccctgtcactgagaatagcaccagtctgtccttcctggattcctgtaacagcctcacgcccaagagcacacctgttaagaccctgcccttctcgccctcccagtttctgaacttctggaacaaacaggacacattggagctggagagcccctcgctgacatccaccccagtgtgcagccagaaggtggtggtcaccacaccactgcaccgggacaagacacccctgcaccagaaacatgctgcgtttgtaaccccagatcagaagtactccatggacaacactccccacacgccaaccccgttcaagaacgccctggagaagtacggacccctgaagcccctgccacagaccccgcacctggaggaggacttgaaggaggtgctgcgttctgaggctggcatcgaactcatcatcgaggacgacatcaggcccgagaagcagaagaggaagcctgggctgcggcggagccccatcaagaaagtccggaagtctctggctcttgacattgtggatgaggatgtgaagctgatgatgtccacactgcccaagtctctatccttgccgacaactgccccttcaaactcttccagcctcaccctgtcaggtatcaaagaagacaacagcttgctcaaccagggcttcttgcaggccaagcccgagaaggcagcagtggcccagaagccccgaagccacttcacgacacctgcccctatgtccagtgcctggaagacggtggcctgcggggggaccagggaccagcttttcatgcaggagaaagcccggcagctcctgggccgcctgaagcccagccacacatctcggaccctcatcttgtcctgaggtgttgagggtgtcacgagcccattctcatgtttacaggggttgtgggggcagagggggtctgtgaatctgagagtcattcaggtgacctcctgcagggagccttctgccaccagcccctccccagactctcaggtggaggcaacagggccatgtgctgccctgttgccgagcccagctgtgggcggctcctggtgctaacaacaaagttccacttccaggtctgcctggttccctccccaaggccacagggagctccgtcagcttctcccaagcccacgtcaggcctggcctcatctcagaccctgcttaggatgggggatgtggccaggggtgctcctgtgctcaccctctcttggtgcatttttttggaagaataaaattgcctctctcttaaaaaaaaaaaaaaaaaa

SEQ ID NO: 636 - DNA, 2379 bp, Homo sapiens
gacccccgagctgtgctgctcgcggccgccaccgccgggccccggccgtccctggctcccctcctgcctcgagaagggcagggcttctcagaggcttggcgggaaaaagaacggagggagggatcgcgctgagtataaaagccggttttcggggctttatctaactcgctgtagtaattccagcgagaggcagagggagcgagcgggcggccggctagggtggaagagccgggcgagcagagctgcgctgcgggcgtcctgggaagggagatccggagcgaatagggggcttcgcctctggcccagccctcccgctgatcccccagccagcggtccgcaacccttgccgcatccacgaaactttgcccatagcagcgggcgggcactttgcactggaacttacaacacccgagcaaggacgcgactctcccgacgcggggaggctattctgcccatttggggacacttccccgccgctgccaggacccgcttctctgaaaggctctccttgcagctgcttagacgctggatttttttcgggtagtggaaaaccagcagcctcccgcgacgatgcccctcaacgttagcttcaccaacaggaactatgacctcgactacgactcggtgcagccgtatttctactgcgacgaggaggagaacttctaccagcagcagcagcagagcgagctgcagcccccggcgcccagcgaggatatctggaagaaattcgagctgctgcccaccccgcccctgtcccctagccgccgctccgggctctgctcgccctcctacgttgcggtcacacccttctcccttcggggagacaacgacggcggtggcgggagcttctccacggccgaccagctggagatggtgaccgagctgctgggaggagacatggtgaaccagagtttcatctgcgacccggacgacgagaccttcatcaaaaacatcatcatccaggactgtatgtggagcggcttctcggccgccgccaagctcgtctcagagaagctggcctcctaccaggctgcgcgcaaagacagcggcagcccgaaccccgcccgcggccacagcgtctgctccacctccagcttgtacctgcaggatctgagcgccgccgcctcagagtgcatcgacccctcggtggtcttcccctaccctctcaacgacagcagctcgcccaagtcctgcgcctcgcaagactccagcgccttctctccgtcctcggattctctgctctcctcgacggagtcctccccgcagggcagccccgagcccctggtgctccatgaggagacaccgcccaccaccagcagcgactctgaggaggaacaagaagatgaggaagaaatcgatgttgtttctgtggaaaagaggcaggctcctggcaaaaggtcagagtctggatcaccttctgctggaggccacagcaaacctcctcacagcccactggtcctcaagaggtgccacgtctccacacatcagcacaactacgcagcgcctccctccactcggaaggactatcctgctgccaagagggtcaagttggacagtgtcagagtcctgagacagatcagcaacaaccgaaaatgcaccagccccaggtcctcggacaccgaggagaatgtcaagaggcgaacacacaacgtcttggagcgccagaggaggaacgagctaaaacggagcttttttgccctgcgtgaccagatcccggagttggaaaacaatgaaaaggcccccaaggtagttatccttaaaaaagccacagcatacatcctgtccgtccaagcagaggagcaaaagctcatttctgaagaggacttgttgcggaaacgacgagaacagttgaaacacaaacttgaacagctacggaactcttgtgcgtaaggaaaagtaaggaaaacgattccttctaacagaaatgtcctgagcaatcacctatgaacttgtttcaaatgcatgatcaaatgcaacctcacaaccttggctgagtcttgagactgaaagatttagccataatgtaaactgcctcaaattggactttgggcataaaagaacttttttatgcttaccatcttttttttttctttaacagatttgtatttaagaattgtttttaaaaaattttaagatttacacaatgtttctctgtaaatattgccattaaatgtaaataactttaataaaacgtttatagcagttacacagaatttcaatcctagtatatagtacctagtattataggtactataaaccctaattttttttatttaagtacattttgctttttaaagttgatttttttctattgtttttagaaaaaataaaataactggcaaatatatcattgagccaaatcttaaaaaaaaaaaaaaa

SEQ ID NO: 637 - DNA, 2093 bp, Homo sapiens
gcgcatgagcagtgctgctcccaacccgccagtcgcggtctccggcgccagctacgccgctgccgctgtcactatggcccattacaaagccgccgactcgaagcgtgagcagttccggaggtacttggagaagtcgggggtgctggacacgctgaccaaggtgttggtagccttatatgaagaaccagagaaacctaacagtgctttggattttttaaagcatcacttaggagctgctactccagaaaatccagaaatagagctgcttcgcctagaactggccgaaatgaaagagaagtatgaagctattgtagaagaaaataaaaaactgaaagcaaagcttgctcagtatgaaccacctcaggaggagaagcgtgctgaataggattcttctcagtttgaaagacaatgaaaaatggttttgtatgacttgaatagtttgtatagtatataatcttttctgaacagatgctatagaactcttttaatatgtttaattcacctatcacactctgttaaaaacacatagaatcatcaataaaaactcaatataactttctttgggtcttaaagcaggagaatccaaagtaaatcctgaacaaaacctaaacacagccatctaactcattaccttaaaagacattctgtttattagtctgattaggaatgatggcactggttgtattttagccaagacagtttagcatggagctattccttggtgcagttcaggatatgaacacaggtacagtcattctttgaaggtgacactgttctgtatattccctataggcagctggagagatctgtgtgacacaagatgcttttgtacgggttcccatgaatcttctgctcttgtttgtgtgacatggaacaaataacttctttgccaccactttgccttagataactgtgtgtgtgtgtgccagtttgaactctgacaccacattttccttctatgcaatcatgcctgtctgataatcttgcattgctttcctctgagctttagtgggtcctagttgcacactggcctttctgtgctgtttttcaatttgcctaataatagcagttaccctgattgtaatttatgtaactttaaacaggatcacactgtaccccctgcctgccttatttgcttactgagcacaggacagaggcaatatacaactctgggttcacacacaagctgagatgagaagaggaatgagccatatattggggaaaatcatagtttgtaggtataattatatagtgcttttctccctcaaagtatttttctagccttgaattcattttatcttcattatccctgtgaagtaggtgggacaagtataaggggaagaggggtgctgaatttttaggccaaagactgatattaatacaaatcactcactaactgtagagccttgggcattatcagtgaactactctgagatttactgtcttcatctgtttaatgagtagaatgtccgtgatgcctacctcacagggttgttgtgagggtcaaatgagaatgtatgtgaaagatttgtaaatggtaaagcactatattcttgtttgttagtcctttttcctttctttgggtagacctacagtcagatgttttgttttatggatcacttattttccttactggtagactgtcgttttatagacatattcctatttcatatattctctccctgttgttagagaacctatctttgtttttggtcaaaacacacatagaaaacaaaatgatccaatgaaaactggtttaactagcaaaagccttggcacctgttggagactatgaccaagccaataaaaagggcatttaaatcagccctgttagtaggaatgtggctatggctggtgcctcttctagtcacaagtttgtttttggagggggtccagaagatcattcccttgcatagatttctcttttaccaatttgagtgcctcctacatgggcagcagtggactaagtgctgggtgtgataaagaggaatgacttaattatgagactgtatataatcaaatacagtgtgggttaggacctgtggcagaccattataataaagcatggccccgtgagggttttgaaagagaaa

SEQ ID NO: 638 - DNA, 7011 bp, Homo sapiens
cgggccgcatcagccctcctcctgtttgcgctccccagcgtgcaatttatttggggggctaccggggattgaacggagcgggcgagcgctgccaggaggtggggccggccccacctgtcgactgcccgtagtaggcagggagagggcggggtttgtcccatagggcccgccccccagtccctgggtcccgggcgcgcgacgagatataaggcagtcaggaaacaatgcgcctgcagctcgcgctcccgcgccgatcccgagagcgtccgggccgccgtgcgcgagcgagggagggcgcgcgcgcggggggggcgcgctcgtgagtgcgggccgcgctctcggcggcgcgcatgtgcgtgtgtgctggctgccgggctgccccgagccggcggggagccggtccgctccaggtggcgggcggctggagcgaggtgaggctgcgggtggccagggcacgggcgcgggtcccgcggtgcgggctggctgcaggctgccttctgggcacggcgcgcccccgcccggccccgccgggccctgggagctgcgctccgggcggcgctggcaaagtttgctttgaactcgctgcccacagtcgggtccgcgcgctgcgattggcttcccctaccactctgacccggggcccggcttcccgggacgcgaggactgggcgcaggctgcaagctggtggggttggggaggaacgagagcccggcagccgactgtgccgagggacccggggacacctccttcgcccggccggcacccggtcagcacgtccccccttccctcccgcagggagcggacatggactacgactcgtaccagcactatttctacgactatgactgcggggaggatttctaccgctccacggcgcccagcgaggacatctggaagaaattcgagctggtgccatcgccccccacgtcgccgccctggggcttgggtcccggcgcaggggacccggcccccgggattggtcccccggagccgtggcccggagggtgcaccggagacgaagcggaatcccggggccactcgaaaggctggggcaggaactacgcctccatcatacgccgtgactgcatgtggagcggcttctcggcccgggaacggctggagagagctgtgagcgaccggctcgctcctggcgcgccccgggggaacccgcccaaggcgtccgccgccccggactgcactcccagcctcgaagccggcaacccggcgcccgccgccccctgtccgctgggcgaacccaagacccaggcctgctccgggtccgagagcccaagcgactcgggtaaggacctccccgagccatccaagagggggccaccccatgggtggccaaagctctgcccctgcctgaggtcaggcattggctcttctcaagctcttgggccatctccgcctctctttggctgaagctgcccgtgtagtccccaaccgtgtctgtctggcacgtgggtgtgttggtaaacagtttggaaaagtggcgtgggagccagcctccctttgatgattattggagccccaggggacaagggatttgaggtgagggttggcgcttagagaggacaatactggggttggactgtaagggattgaagggggtaccttaagagacactccaaacctgaagtttttttgctgctgcctctttccctaggaaactcacactcccctagggggagaagaagccgagagccttttgtgcaaagccaaaaccttcgtccttttaaaaacctaggtctccagttggctttactttaaaatgccaataataaatgccctcttctcgtgcctccccaccaccacttaccactcgtgcatccctgagacagggagggaagaatgaacactccccattaacagatggaaaaactgaggcttagagatagacaatcactacaagtcagctccagctttctgccatctagccagcccctcttccccaatgctccatcccaaccaggcacctcttccttgatgtttggggtctttgtggtagcttatcttagaagcactacaccttgccttgctgtttgtcctgagatggaaaagtgtccttcttgctccccctcaatagatctccagcgtcagctgctccctggcattcaacaaatattcactggcccctactttgtggcaatctgtgggctacatgctggggtcaaggcagtagaactccaggccctcctctcccatccttgatgcaagtgcaacctcgctgagggcagactggggcatcctgtgccactaaactacattgttcttattctggcatcttagacctccacacccgtgagaaatcctggagagggtatttttgtagagtgtagactgtggctagtgacaaataaattaggaccaagaaagctcactgtagcttttaggaataacttttacacgaccatttgatagggaactggggaatggggtatggaagttttcctacacttgagagaaaaaataggataacaaaaattaaaagtctttttttcctggtccactgtgttaaggtcatttttaaccagcttgctttctacaccaagagtttatgtttgtttaatggctggaaagagaatcttgagatcaaaaaaccaataaagatgtatctctacaacggctggtggagtggtagagtggaaagagcattgctttggaagttggaacattttagtttgagatccagaacgttacaaaggtgatatgtggacttcgctgatctgggcctcagtttccccatttgcacacgatggggttggacttgattgtcctgctgatgacatttccttgtctggatagagtaagacactactctctgaaagggagaatggtgtgcttaaattatttctttcttagatagaatcttcctgagccacgaggcttaacactgaaaattaaaggtttgggatgtaggaaagcctgctgaatcattttctaacctaccctttaacctgaacctgtttgtgagcttctagttcactcacaggccacatggcctggaacaaaatgcaacagattgcaaacaatgaggcggggggtggggaaagtgattggcagcagagctcacccaataggggctaggggctgggtaagacagaattccaaacacagcgtaatcagccaatcatgggctttggggccaggagggctgaatggtcaggtttattaatggagaaataatgcgattgtccacacaatggaagccttcctgacaaaggggctcaagcttcctgatatgcaaagaagctgagaacggagctcttcctttgccgaggccgagatccattaaggtcggacttctgtgtggaggctgcaaaatgtgtggagcaggaggagacttttctcccaattgcccctctcctggttaggttaacctaagagaccttcaagccagtgaatgagaagggcgtgtccaggtgtctccaggtctctggtgttatgagccccatatctgggacattctgctgcccagtctctgcctctggtgcaggtagtttggaaatggtcgcttgtacctttgtgaagttcctgcagcttcgccgacctatgattacaaatctaaccttctagtccagggaaggaggtggggcaggcgacctataaatgatggatgactttagaaacccattgaacccaggagcaaaatgctcctaagggaaaccctttccctcccctctgtgggtgaagagggatgggttgtagccctcccttctctgaatcttcagctgaaagggatggcagaatagagaggtgggggaataataggatttataacttgtgaaaagtaacaattccccaagtgcaggctgtgctgggcaggaacaaagggcagctctgcccacagacccctcatttacaattctgatggggcatgaaagagcccgactggggaagatctttatagctaaactttgtcccaggccggtagctctttctctccaacccctccgtgggggaggggagagcctttgcagactgggggctgttggcttgggtctgccttttgttcttatctaagccttgctgtgcaaaaggaaattggagaatattttccttcttgctaatgtcccctcctttccttcactgtgcccttaccacattacaaatgaatcagctttctgctcacctcgatttgtatatatctaaattggaaaaatgtctcctaccttcccaagcaccagcgtagacagctaaagctgtagggtctatgtttgtgtttctcatgggatgtgtttcttctcttgatctcttttctcggacagagaatgaagaaattgatgttgtgacagtagagaagaggcagtctctgggtattcggaagccggtcaccatcacggtgcgagcagaccccctggatccctgcatgaagcatttccacatctccatccatcagcaacagcacaactatgctgcccgttttcctccagaaagctgctcccaagaagaggcttcagagaggggtccccaagaagaggttctggagagagatgctgcaggggaaaaggaagatgaggaggatgaagagattgtgagtcccccacctgtagaaagtgaggctgcccagtcctgccaccccaaacctgtcagttctgatactgaggatgtgaccaagaggaagaatcacaacttcctggagcgcaagaggcggaatgacctgcgttcgcgattcttggcgctgagggaccaggtgcccaccctggccagctgctccaaggcccccaaagtagtgatcctaagcaaggccttggaatacttgcaagccctggtgggggctgagaagaggatggctacagagaaaagacagctccgatgccggcagcagcagttgcagaaaagaattgcatacctcagtggctactaactgaccaaaaagcctgacagttctgtcttacgaagacacaagtttattttttaacctccctctcccctttagtaatttgcacattttggttatggtgggacagtctggacagtagatcccagaatgcattgcagccggtgcacacacaataaaggcttgcattcttggaaaccttgaaacccagctctccctcttccctgactcatgggagtgctgtatgttctctggcgcctttggcttcccagcaggcagctgactgaggagccttggggtctgcctagctcactagctctgaagaaaaggctgacagatgctatgcaacaggtggtggatgttgtcaggggctccagcctgcatgaaatctcacactctgcatgagctttaggctaggaaaggatgctcccaactggtgtctctggggtgatgcaaggacagctgggcctggatgctctccctgaggctcctttttccagaagacacacgagctgtcttgggtgaagacaagcttgcagacttgatcaacattgaccattacctcactgtcagacactttacagtagccaaggagttggaaacctttatgtattatgatgttagctgacccccttcctcccactcccaatgctgcgaccctgggaacacttaaaaagcttggcctctagattctttgtctcagagccctctgggctctctcctctgagggagggacctttctttcctcacaagggacttttttgttccattatgccttgttatgcaatgggctctacagcaccctttcccacaggtcagaaatatttccccaagacacagggaaatcggtcctagcctggggcctggggatagcttggagtcctggcccatgaacttgatccctgcccaggtgttttccgaggggcacttgaggcccagtcttttctcaaggcaggtgtaagacactcagagggagaactgtactgctgcctctttcccaccttcctcatctcaatccttgagcggcaagtttgaagttcttctggaaccatgcaaatctgtcctcctcatgcaattccaaggagcttgctggctctgcagccacctctgggccccttccagcctgccatgaatcagatatctttcccagaatctgggcgtttctgaagttttggggagagctgttgggactcatccagtgctccagaaggtggacttgcttctggggggttttaaaggagcctccaggagatatgcttagccaaccatgatggattttaccccagctggactcggcagctccaagtggaatccacgtgcagcttctagtctgggaaagtcacccaacctagcagttgtcatgtgggtaacctcaggcacctctaagcctgtcctggaagaaggaccagcagcccctccagaactctgcccaggacagcaggtgcctgctggctctgggtttggaagtttggggtgggtagggggtggtaagtactatatatggctctggaaaaccagctgctacttccaaatctattgtccataatggtttctttctgaggttgcttcttggcctcagaggaccccaggggatgtttggaaatagcctctctacccttctggagcatggtttacaaaagccagctgacttctggaattgtctatggaggacagtttgggtgtaggttactgatgtctcaactgaatagcttgtgttttataagctgctgttggctattatgctgggggagtcttttttttttatattgtatttttgtatgccttttgcaaagtggtgttaactgtttttgtacaaggaaaaaaactcttggggcaatttcctgttgcaagggtctgatttattttgaaaggcaagttcacctgaaattttgtatttagttgtgattactgattgcctgattttaaaatgttgccttctgggacatcttctaataaaagatttctcaaacatgtcagagtgggggcagcttatgccacctgagtcctcctcaaccacggaaaactatttcagggtagccacaagtgatccagagggctgcacttctctaaccatgttgctaacctggtcattccactctgggttcctgaaatgccatttcagacatgttgaaacaatgtaggctcagtactcagtgaacacggaattc

SEQ ID NO: 639 - DNA, 2961 bp, Homo sapiens
tagaaataaacagagggcgggtcgcgcgctcggtggcgcgttgtgcgcgtgtgtggagtgccctgctgcccccagctggaggggaactagtctgctccaggtggcaagctgcgtgagcaagcaagccaacatggaccgcgactcgtaccatcactatttctacgactatgacggcggggaggatttctaccgctccacgacgcccagcgaggacatctggaagaaattcgagttggtgccgccgccctgggacttgggtcccgcagccgggaacccagccctcagctttggtctcctggaaccgtggccggtagggtgcgctggggacgagacggaatcccaggactactggaaagcttgggacgcgaactacgcctccctcatccgccgtgactgcatgtggagcggcttctccacccaggagccgctggagagagcggtgagtgacctgcttgccgttggcgcgccctcgggatactcgcccaaggagttcgccacccccgactacactcccgagctcgaagccggcaacctagcgcccatcttcccctgtttgttgggcgagcccaagatccaggcctgctccaggtctgagagcccaagcgactccgagggtgaagaaatcgacgtgacagtaaagaagaggcagtctttgagtacgcggaagccagtcatcatcgcggtgcgtgcagaccttctggatccccgcatgaatctcttccacatctccatccaccagcaacagcacaactatgctgccccttttcctccagaaagctgcttccaagaaggggctccaaagaggatgcccccaaaagaggctctagagagagaagctccagggggaaaggatgataaggaagatgaagagattgtgagcctcccacctgtagaaagtgaggctgcccagtcctgccagcccaaacccatccattatgatactgagaattggaccaagaagaagtaccacagctacctggagcgcaagagacggaatgatcaacgttcgcggttcttggccctgagggacgaggtacccgccctggccagctgctctagggtttccaaagtaatgatcctagtcaaggccacggaatacttacatgaactggcggaagccgaggagaggatggctacggagaaaaggcagctcgaatgccagcgacggcaattgcagaaaagaattgagtacctcagtagctactgaccaaaaagcctgaccattctgtcttaaaaagacacaagttttctttttgatctccctctcccctttagtaacttgtacatttttgttacagcaggacactctggacagtagattgcagaatgcattgcagccagtgcacaaacaatataaaggcttgcattcttggaaactttgaaacccagctctctctcttccctgacttatgggagtgctttgtgttttctggcacctttggcttctcagcaggcagctgactgaggagacttggggtcttcctggctcactatctccaaagaaaaggctgacagatggtatgcaacaggtggtggatgttgttgggggctccagcctggaggaaatctcacactctacatgaactttaggctaggaaaggatgtctctggggtgatgcaaggacagctgggtgtggacgctctccctgcggctccatttttttccaggagacacacaagctgccttgggtgaaaacaagctcagagacttgatcaacgtggaccattacctcactgtcagacactacagtagctgaggagttggaaaccttacatatatgtatatatgtatatatatatgtatgtatatatgtatatatgtatatatatatgtatgtatatatgtatatatgtatatatatatgtatgtatatatgtatatatgtatatatatatgtatgtatatatgtatatattatgatgttggctgacccccttcctcccactctcaatgctgtgactcagaacatttaagagaacttcgtctgtaagtaatttgtcttaaagccctctgggctctcttctctgagtgagggaactttctgtcttcacaagggactttgtctcattctgcctctgttatgcaatgggttctacagcaccctttcccgcaggttagaaatatttccctaagacacagggaaatgggtcttagcctggggcctggggaaagttcccaagccctggctcatgaactcaatccctgcccaggtgttttctgaggggcccttgaggcccaatcttttctcaagacaggtgtgaggcaccttagaagggagaactgtaacactttctctttcgcacctgcctctcatctcaatccttgactgatgaatttgaagttctactagaaccatgaaaacttgttcctttcgtgcatctccaaggagcttgctggctctgcagccacgcttgggccctcgcaccagcctgcaatgagtcagatgtctgtcacagaatctgggcctctctgaagttttctggagagctgttgggactcatccagtgctccacaacgtggacttgcctcctggtgtgttttaaaggatcctccaggagctctgcttagccaatcatcatgatggatttttttttttttttttgagacggagtctcactcttgtcgcccaggctggaggttaatggcatgatctcggctcactgcaacctctgcctcccgggttcaagcgattctcctgcctgagccttccgagtagctgggatcgcaggcgcctgccaccacgcctagctaatttctgtatttttagtagagatggggtttcaccacattggccaggctggtcttgacctcctgacctcaggtgatccacctgcctccatgatagattttgccccagctggactctgcagctccacgtggaatccaggtgctgcctccagtctgggaaagtcacccaaccccgcagttgtcatgtgggtaacttctgaaacccctaagcc

SEQ ID NO: 640 - DNA, 825 bp, Homo sapiens
cggcctccctatactggctgctatctctaagccacaggacagacaagagaaaaacaattagtcatcccaggttttgcccaccttccccaccgcccctgttattctaaacacaatcaccatagaaaacaagctgtggtgagaagccaagcaggcacctacaggtctgaaagacttgaagactttttccaggacttcgtggagcgtcttcttgccgcaggaggagatgtaatcctgtgctagctgcaagaaaggcaggcagtcctcgctctcactccacacgtgctgcgtgcccacgggcgacggaaggagaaaacaaagacacacagtcactacactcagtgtgaagttcagaaaagccaagcagattttcttaataacatcaatttgaagaaggcctccattctacagtaaaattcatacatgcgttcttgatttgtttgcgttgaaagggaagaaaaaatgtctaatctatagaagcccccgagcttttggtccatacctcacctgctctgttcatcatcagatctgctcctacacagtaaagagggcagtgggtggccattcctcaccaatgatttccactgttcaccttgtgcaggctaagggcggttttcagacatggggaaggagaaaccagagcctttgccttcaaaatccttaactttgctttcagctacggctgaaagattaattaagcatagtttgtaagcattaacttggaacaagacattctttacccagatcggcctgtgagtaggcgtggtggtaaatttacttccaaatgcaaataacttaagagaacccaccaagtcaccactatgtcac

SEQ ID NO: 641 - DNA, 2613 bp, Homo sapiens
gtcatctgtctggacgcgctgggtggatgcggggggctcctgggaactgtgttggagccgagcaagcgctagccaggcgcaagcgcgcacagactgtagccatccgaggacacccccgcccccccggcccacccggagacacccgcgcagaatcgcctccggatcccctgcagtcggcgggagtgttggaggtcggcgccggcccccgccttccgcgccccccacgggaaggaagcacccccggtattaaaacgaacggggcggaaagaagccctcagtcgccggccgggaggcgagccgatgccgagctgctccacgtccaccatgccgggcatgatctgcaagaacccagacctcgagtttgactcgctacagccctgcttctacccggacgaagatgacttctacttcggcggccccgactcgacccccccgggggaggacatctggaagaagtttgagctgctgcccacgcccccgctgtcgcccagccgtggcttcgcggagcacagctccgagcccccgagctgggtcacggagatgctgcttgagaacgagctgtggggcagcccggccgaggaggacgcgttcggcctggggggactgggtggcctcacccccaacccggtcatcctccaggactgcatgtggagcggcttctccgcccgcgagaagctggagcgcgccgtgagcgagaagctgcagcacggccgcgggccgccaaccgccggttccaccgcccagtccccgggagccggcgccgccagccctgcgggtcgcgggcacggcggggctgcgggagccggccgcgccggggccgccctgcccgccgagctcgcccacccggccgccgagtgcgtggatcccgccgtggtcttcccctttcccgtgaacaagcgcgagccagcgcccgtgcccgcagccccggccagtgccccggcggcgggccctgcggtcgcctcgggggcgggtattgccgccccagccggggccccgggggtcgcccctccgcgcccaggcggccgccagaccagcggcggcgaccacaaggccctcagtacctccggagaggacaccctgagcgattcagatgatgaagatgatgaagaggaagatgaagaggaagaaatcgacgtggtcactgtggagaagcggcgttcctcctccaacaccaaggctgtcaccacattcaccatcactgtgcgtcccaagaacgcagccctgggtcccgggagggctcagtccagcgagctgatcctcaaacgatgccttcccatccaccagcagcacaactatgccgccccctctccctacgtggagagtgaggatgcacccccacagaagaagataaagagcgaggcgtccccacgtccgctcaagagtgtcatccccccaaaggctaagagcttgagcccccgaaactctgactcggaggacagtgagcgtcgcagaaaccacaacatcctggagcgccagcgccgcaacgaccttcggtccagctttctcacgctcagggaccacgtgccggagttggtaaagaatgagaaggccgccaaggtggtcattttgaaaaaggccactgagtatgtccactccctccaggccgaggagcaccagcttttgctggaaaaggaaaaattgcaggcaagacagcagcagttgctaaagaaaattgaacacgctcggacttgctagacgcttctcaaaactggacagtcactgccactttgcacattttgattttttttttaaacaaacattgtgttgacattaagaatgttggtttactttcaaatcggtcccctgtcgagttcggctctgggtgggcagtaggaccaccagtgtggggttctgctgggaccttggagagcctgcatcccaggatgctgggtggccctgcagcctcctccacctcacctccatgacagcgctaaacgttggtgacggttgggagcctctggggctgttgaagtcaccttgtgtgttccaagtttccaaacaacagaaagtcattccttctttttaaaatggtgcttaagttccagcagatgccacataaggggtttgccatttgatacccctggggaacatttctgtaaataccattgacacatccgccttttgtatacatcctgggtaatgagaggtggcttttgcggccagtattagactggaagttcatacctaagtactgtaataatacctcaatgtttgaggagcatgttttgtatacaaatatattgttaatctctgttatgtactgtactaattcttacactgcctgtatactttagtatgacgctgatacataactaaatttgatacttatattttcgtatgaaaatgagttgtgaaagttttgagtagatattactttatcactttttgaactaagaaacttttgtaaagaaatttactatatatatatgcctttttcctagcctgtttcttcctgttaatgtatttgttcatgtttggtgcatagaactgggtaaatgcaaagttctgtgtttaatttcttcaaaatgtatatatttagtgctgcatcttatagcactttgaaatacctcatgtttatgaaaataaatagcttaaaattaaatgaaaaaaaaa

SEQ ID NO: 642 - DNA, 1520 bp, Homo sapiens
tctgcccttgttaattaccggagcgacagactagggagctccgcccgggatttgcccatcggcggaggcgccaggctcccgtttctccccatccctctcgctgccgtccaggtgcaccgcctgcctctcagcaggatggacgtgatggatggctgccagttctcaccttctgagtacttctacgacggctcctgcataccgtcccccgagggtgaatttggggacgagtttgtgccgcgagtggctgccttcggagcgcacaaagcagagctgcagggctcagatgaggacgagcacgtgcgagcgcctaccggccaccaccaggctggtcactgcctcatgtgggcctgcaaagcctgcaagaggaagtccaccaccatggatcggcggaaggcagccactatgcgcgagcggaggcgcctgaagaaggtcaaccaggctttcgaaaccctcaagaggtgtaccacgaccaaccccaaccagaggctgcccaaggtggagatcctcaggaatgccatccgctacatcgagagcctgcaggagttgctgagagagcaggtggagaactactatagcctgccgggacagagctgctcggagcccaccagccccacctccaactgctctgatggcatgcccgaatgtaacagtcctgtctggtccagaaagagcagtacttttgacagcatctactgtcctgatgtatcaaatgtatatgccacagataaaaactccttatccagcttggattgcttatccaacatagtggaccggatcacctcctcagagcaacctgggttgcctctccaggatctggcttctctctctccagttgccagcaccgattcacagcctgcaactccaggggcttctagttccaggcttatctatcatgtgctatgaactaattttctggtctatatgacttcttccaggagggcctaatacacaggaagaagaaggcttcaaaaagtcccaaaccaagacaacatgtacataaagatttcttttcagttgtaaatttgtaaagattaccttgccactttataagaaagtgtatttaactaaaaagtcatcattgcaaataatactttcttcttctttattattctttgcttagatattaatacatagttccagtaatactatttctgatagggggccattgattgagggtagcttgttgcaatgcttaacttatatatacatatatatatattataaatattgctcatcaaaatgtctctggtgtttagagctttatttttttctttaaaacattaaaacagctgagaatcagttaaatggaattttaaatatatttaactatttcttttctctttaatcctttagttatattgtattaaataaaaatataatactgcctaatgtatatattttgatcttttcttgtaagaaatgtatcttttaaatgtaagcacaaaatagtactttgtggatcatttcaagatataagaaattttggaaattccaccataaataaaattttttactacaag

SEQ ID NO: 643 - DNA, 1294 bp, Homo sapiens
gtttttgagtccatcacccagttcagatcgagtcagaggccaaggaggagaacatgatgatggacctttttgaaactggctcctatttcttctacttggatggggaaaatgttactctgcagccattagaagtggcagaaggctctcctttgtatccagggagtgatggtaccttgtccccctgccaggaccaaatgcccccggaagcggggagcgacagcagcggagaggaacatgtcctggcgcccccgggcctgcagcctccacactgccccggccagtgtctgatctgggcttgcaagacctgcaagagaaaatctgcccccactgaccggcgaaaagccgccaccctgcgcgaaaggaggaggctaaagaaaatcaacgaggccttcgaggcactgaagcggcgaactgtggccaaccccaaccagaggctgcccaaggtggagattctgcggagcgccatcagctatattgagcggctgcaggacctgctgcaccggctggatcagcaggagaagatgcaggagctgggggtggaccccttcagctacagacccaaacaagaaaatcttgagggtgcggatttcctgcgcacctgcagctcccagtggccaagtgtttccgatcattccagggggctcgtgataacggctaaggaaggaggagcaagtattgattcgtcagcctcgagtagccttcgatgcctttcttccatcgtggacagtatttcctcggaggaacgcaaactcccctgcgtggaggaagtggtggagaagtaactgagcctgcgcttgagaccttctccacgcagcaggaagatcccaccgacccttcctggcctaatcctttagattaggtcacattacattaacatttaggaacccagaccgaaaagttgctgaaagggaaggagacacattcacaaagaaaagttgcgaaaattgcgaaatctgttgtgcacgctcaaatgaaaacgcctttcggctttgggcttttatttttttggaactgcgagtggcttaggtctagcctcattttgtttttgtttggttggttttatactatattaacttttattacggtgatccttttgtgccatgttcaaaagaagttcattcctgtctgaagtgggaaagttgcatttaatgttaggggtatttaatgtatttttgtaaatagtttagcactttctttttttacgtaaacctgaaatatattttaaatgtggaatgatgtatataaaatgtgcgaggatcctggtattgtaatattaaaaagaagtttctatatg

SEQ ID NO: 644 - DNA, 3178 bp, Homo sapiens
ggcttcaggagagaggcccgcggtgctgtgctgccgggcctcggcgcagagccccggcagagcgccagacgctgactgccggcaccagaatgctcgcgatgaggaagacaggcggagcgctgcgagctagcgagccctcagctctcgtatccatgacgcctgctgcttcgggggacccctggcatgctggggagtgggtctctgtggtacatcctgtaccgccctggccggcgccggacccccatggccccagaacctcccgcactgccacgggaagacagagccggacgtgacgccaccgtggaaggaagggaggggcggagcgtggctcggtgacgtcctcccaagatggcggagacagagtgaagaaactgtgttccccccttgggttgctatcgatcaagggtaaaattccattctgatatcaaaatgcagtattcgcaccactgtgagcaccttttagagagactgaacaaacagcgggaagcaggttttctctgtgactgtaccatagtgattggggaattccagtttaaagctcataggaatgtgctggcctcctttagtgagtattttggtgcgatctacagaagcacttctgagaacaatgtctttcttgatcagagtcaggtgaaggctgatggatttcagaaactgttggagtttatatacacaggaactttaaatcttgacagttggaatgttaaagaaattcatcaggctgctgactatctcaaagtggaagaggtggtcactaaatgcaaaataaagatggaagattttgcttttattgctaatccttcttctacagagatatctagtattactggaaacattgaattgaatcaacagacttgtcttcttactctgcgagattataataatcgagagaaatcagaagtatctacagatttgattcaggcaaatcctaaacaaggcgcgttagcgaaaaagtcatctcaaacgaaaaagaagaagaaggctttcaactccccgaaaacagggcagaataaaacagtgcaatatcccagtgacatcttagagaatgcatctgttgaattattcctagatgcaaataaactgcccacacctgtagtagaacaagttgcacaaataaatgataattcagaactcgagttgacatcagttgtggaaaatacttttccagcacaagatattgtgcacactgttacagtgaaacggaaacgtggaaaatcacagccaaactgtgctctgaaagaacactctatgtctaatatagccagcgtcaagagtccttatgaggcggagaactccggggaagagctggatcagaggtattccaaggccaagccaatgtgtaacacatgtgggaaagtgttttcagaagccagcagtttgagaaggcacatgagaatacataaaggagtcaaaccttacgtctgccacttatgtggaaaggcatttacccaatgtaaccagctgaaaacgcatgtaagaactcatacaggtgagaagccatacaaatgtgaattgtgtgataaaggatttgctcagaaatgtcagctagtcttccatagtcgcatgcatcatggtgaagaaaaaccctataaatgtgatgtatgcaacttacagtttgcgacttctagcaatctcaagattcatgcaaggaagcatagtggagagaagccatatgtctgtgataggtgtggacagagatttgctcaagccagcacactgacctatcatgtccgtaggcatactggagaaaagccttatgtatgtgatacctgtgggaaggcatttgctgtctctagttctcttatcactcattctcgaaaacatacaggtgaaaaaccatacatatgtggtatttgtgggaaaagttttatttcctcaggagagctcaacaaacactttcggtcccatacaggagaaagaccatttatctgcgaattatgtggaaattcttacacagatattaaaaatttaaagaagcacaaaacaaaagtccattctggtgcagataaaactctagactccagtgcagaggatcatactttgagtgaacaggattccatacaaaaaagtcctttatcagaaactatggatgtgaagccttctgatatgactttaccattagctcttccacttgggactgaggaccatcacatgcttctgcctgtcacggatactcagtctcctacatcagatacattgttgaggtcaactgtgaatgggtattcagaaccacagttgatttttttacaacaattatactgactttgtaaggaatatggaattgctaagatatcattggtagcaaacatctctggtaaggtgcatatattcatattaaattcccattcatttgagttgtgaccattatttttcattcactgaagtaaaagcacctgatgctgcatcacaactgcaatgtttgtttttatttttggctttatgtctatactccacagagagctttttaagtaatgaattatgtagcactattttgggtggatgagttttattttcttttaaagctgccttaattccatttttattttgcattttagaattgcccttcatttactaaatcagccagttaatgtgattcagttgtgacctgtgggattttaaaattttcctgccctcataatttaagcaaaatccacgatagtatcagcccaagagtgtgttgctatttgtaagccccatggatcaatacataaactatgcataaaaataaaatttcatattttcgctcgtaaaaatttaggcgctgaataagaattgtgctatttctctattaatatattgttagaaataacttttctaatgaaacaaaaatgtttctcaaaatctagaaaagtgcatataaatttttgttcatttagaactgagtattctggagaaaaccaatggtcagcacttttggtttgagttatctgagattgtattttcaaaatgaattttaagtagatatttggtgtttttatcttgtcaaagacagtttcaaaatttgattcagtttatgttttattccgttctaaaatattggagatgaggaaaatgtacttgagttttgaaatattttggtaagcctctcttactcctgttatgcactttttaaaataaatactgaattccagaaaaaaaaaaaaaaaaaaaaaaaaaaaaaaaaaaaaaaaaaaaaaaa

SEQ ID NO: 645 - DNA, 1823 bp, Homo sapiens
gagaagctaggggtgaggaagccctggggcgctgccgccgctttccttaaccacaaatcaggccggacaggagagggaggggtgggggacagtgggtgggcattcagactgccagcactttgctatctacagccggggctcccgagcggcagaaagttccggccactctctgccgcttgggttgggcgaagccaggaccgtgccgcgccaccgccaggatatggagctactgtcgccaccgctccgcgacgtagacctgacggcccccgacggctctctctgctcctttgccacaacggacgacttctatgacgacccgtgtttcgactccccggacctgcgcttcttcgaagacctggacccgcgcctgatgcacgtgggcgcgctcctgaaacccgaagagcactcgcacttccccgcggcggtgcacccggccccgggcgcacgtgaggacgagcatgtgcgcgcgcccagcgggcaccaccaggcgggccgctgcctactgtgggcctgcaaggcgtgcaagcgcaagaccaccaacgccgaccgccgcaaggccgccaccatgcgcgagcggcgccgcctgagcaaagtaaatgaggcctttgagacactcaagcgctgcacgtcgagcaatccaaaccagcggttgcccaaggtggagatcctgcgcaacgccatccgctatatcgagggcctgcaggctctgctgcgcgaccaggacgccgcgccccctggcgccgcagccgccttctatgcgccgggcccgctgcccccgggccgcggcggcgagcactacagcggcgactccgacgcgtccagcccgcgctccaactgctccgacggcatgatggactacagcggccccccgagcggcgcccggcggcggaactgctacgaaggcgcctactacaacgaggcgcccagcgaacccaggcccgggaagagtgcggcggtgtcgagcctagactgcctgtccagcatcgtggagcgcatctccaccgagagccctgcggcgcccgccctcctgctggcggacgtgccttctgagtcgcctccgcgcaggcaagaggctgccgcccccagcgagggagagagcagcggcgaccccacccagtcaccggacgccgccccgcagtgccctgcgggtgcgaaccccaacccgatataccaggtgctctgaggggatggtggccgcccacccgcccgagggatggtgcccctagggtccctcgcgcccaaaagattgaacttaaatgcccccctcccaacagcgctttaaaagcgacctctcttgaggtaggagaggcgggagaactgaagtttccgcccccgccccacagggcaaggacacagcgcggttttttccacgcagcacccttctcggagacccattgcgatggccgctccgtgttcctcggtgggccagagctgaaccttgaggggctaggttcagctttctcgcgccctcccccatgggggtgagaccctcgcagacctaagccctgccccgggatgcaccggttatttgggggggcgtgagacccagtgcactccggtcccaaatgtagcaggtgtaaccgtaacccacccccaacccgtttcccggttcaggaccactttttgtaatacttttgtaatctattcctgtaaataagagttgctttgccagagcaggagcccctggggctgtatttatctctgaggcatggtgtgtggtgctacagggaatttgtacgtttataccgcaggcgggcgagccgcgggcgctcgctcaggtgatcaaaataaaggcgctaatttataaaaaaaaaaaaaaaaaa

SEQ ID NO: 646 - DNA, 1744 bp, Homo sapiens
tacacccgacggcctcccgacccgtgcacaggagcccgcctgggccaggggcaggctggcagggtggggtgggggccatgcgggagaaagaaggggaatcacatctaatccactgtaaacgccttgatgtgcagcaacagcttagagggggctcaggtttctgtggcgttggctatatttatctctggttccatgccagcggggagggtttaaatggcacccagcagttggcgtgaggggctgctggagcttgggggctggtggcaggaacaagccttttccgaccccatggagctgtatgagacatccccctacttctaccaggaaccccgcttctatgatggggaaaactacctgcctgtccacctccagggcttcgaaccaccaggctacgagcggacggagctcaccctgagccccgaggccccagggccccttgaggacaaggggctggggacccccgagcactgtccaggccagtgcctgccgtgggcgtgtaaggtgtgtaagaggaagtcggtgtccgtggaccggcggcgggcggccacactgagggagaagcgcaggctcaagaaggtgaatgaggccttcgaggccctgaagagaagcaccctgctcaaccccaaccagcggctgcccaaggtggagatcctgcgcagtgccatccagtacatcgagcgcctccaggccctgctcagctccctcaaccaggaggagcgtgacctccgctaccggggcgggggcgggccccagccaggggtgcccagcgaatgcagctctcacagcgcctcctgcagtccagagtggggcagtgcactggagttcagcgccaacccaggggatcatctgctcacggctgaccctacagatgcccacaacctgcactccctcacctccatcgtggacagcatcacagtggaagatgtgtctgtggccttcccagatgaaaccatgcccaactgagattgtcttccaagccgggcatccttgcgagccccccaagctggccacagatgccactacttctgtagcaggggcctcctaagccaggctgccctgatgctaggaagccagctctggggtgccataggccagactatccccttcctcatccatgtaaggttaacccaccccccagcaagggactggacgccctcattcagctgcctccttagaggagagggcatcccctttccagggaggtaaagcaggggaccagagcgccccctcgtgtatgccccagctcagggggcaaactcaggagcttcctttttatcataacgcggcctctaattccaccccccaagtgaaacggtttgagagacgcagtgccctgacctggacaagctgtgcacgtctcctgttctggtctcttcccgatgccagtggctgggctgggcctgccctgaattgagagagaagaaggggagaggaacagccctctgttcccaagtccctggggggccaaacttttgcagtgaatattgggaaccttccagtggttttatgttttgttttgtttcgtgtgttgtttgtaaagctgccatccgaccaaggtctcctgtgctgaagttgccggggacaggcagggaaaaggggttggggcctcttgggggtgatttcttttgttaacaaagcattgtgtggttttgccattgttttgtattttttttttttttttttttttttgctaacttatttggatttccttttttaaaaaatgaataaagactggttgccagaa

SEQ ID NO: 647 - DNA, 5550 bp, Homo sapiens
ctccgccagcccgtgccaccgctgctaatgagagcagtcattaagtaaatgagacgtcgcctttagctggcttaggagttcgcacactaaggggagaagatatttaattgaaacccgcacgcaggcttccccacatgtgaccgctgtacgggaggcagctgccttccctctcctcccccagtccaccctgcaccccccatgtaaatttcatgattgctttccgtgatgtcattttgaaagaggacagacaatagctgtggggaaagaaaatgagttccgaggtgagctgttaaatcagaggtggacacacggaggcaaggccagcagctgcaggacctcaagacacctgggcagacactgcaagatgagcttagaaaatgaagacaagcgagctcgcacccgatccaaggccctgcgaggacccccagagaccacagctgcagacctcagctgccccaccccaggatgcacaggctcagggcacgtccggggcaagtactccaggcaccgaagtttacagagctgccccctggccaagaagaggaagctggagggcgctgaggctgagcacctggtgtccaagaggaagtcacaccccctgaagctggctctggacgagggctatggtgtggacagcgacggcagtgaggacactgaggtgaaggacgcctctgtttcggatgaatcggaaggaactctggagggggccgaggctgagacgtcaggacaggacgagattcatcgccccgagacagctgaaggaaggagccccgtcaagtcccattttggatccaaccccatcggcagcgccactgcctcctccaagggcagctacagcagctaccagggaatcatcgcaacttctctcctgaacttgggtcaaattgctgaagagaccctggtggaagaggacttgggccaggcggccaagccaggtcctggcattgtgcacctgcttcaggaggctgcagagggagctgccagcgaggagggtgaaaagggcctcttcatccagccagaggatgccgaggaggtcgtcgaagtcaccaccgagcgctcccaggacctgtgtccccagtccctggaggatgcagccagtgaggagtccagcaagcagaaaggcatcctgagtcacgaagaggaggacgaggaggaggaggaggaggaagaggaggaggaggaggatgaagaagaggaagaggaagaggaggaggaagaggaagaggaggaggaggaagaggaagaggaggaggaagaggaagaggaagaggaggaggaggaggcagctcctgatgtgatctttcaggaagacacctctcacacctctgcccagaaggcccctgagctccggggcccagaatcacccagtcccaagcctgagtactctgttattgtggaggtccgctcggatgatgacaaggacgaggacacccactcccggaagtcaacagtcactgacgagtcggagatgcaggacatgatgacccggggaaacctgggcctcctggagcaggccatcgccctgaaggctgaacaggtgcgcacagtctgcgagccgggctgcccgcctgccgagcagagccagctgggcctgggagagccagggaaggcagcaaagcccctggacactgtgcggaagagttactacagtaaagatccttcaagagctgagaagcgtgagatcaagtgtccaacaccaggctgtgatggcactggccacgttaccgggttgtaccctcaccaccgcagcctttctggctgtccccacaaggataggatccccccagagatcttagccatgcatgagaacgtgctgaagtgccccactcctggctgcacaggccagggtcacgtgaacagcaaccgcaacacgcacagaagtttgtctgggtgtcccattgctgccgccgaaaaattagccaaatcccatgagaagcagcagccgcagacaggagatccttccaagagtagctccaattccgatcggatcctcaggcccatgtgcttcgtgaagcagctcgaggtccctccatatgggagctaccggcccaacgtggcccccgccacacccagggccaacttggccaaggagctggagaagttctccaaggtcacctttgactacgcaagtttcgatgctcaggtttttggcaaacgcatgcttgccccaaagattcagaccagcgaaacctcacctaaagcctttcaatgctttgactactcgcaggacgccgaggctgcacacatggctgccactgccatcctgaacctctccacgcgctgctgggagatgcctgagaacctcagcacgaagccacaggacctccccagcaagtctgtggatatcgaggtagacgaaaatggaaccctggacttgagcatgcacaaacaccgcaaacgagaaaatgctttccccagcagcagcagctgcagcagcagccccggtgtgaagtctcccgacgcctcccagcgccacagcagcaccagcgcccccagcagctccatgacctctccccagtccagccaggcctcccgccaggacgagtgggaccggcccctggactacaccaagcctagccgcctgagagaggaggaacctgaggagtcagagccagcagcccattcttttgcttcttctgaagcagatgaccaggaagtgtcggaagagaattttgaggagcggaagtatccgggggaagtcaccctgaccaactttaagctgaagtttctctccaaggacataaagaaggagctgctcacctgtcccacccctggctgtgacggcagcggccacatcaccgggaactacgcctcccaccgcagcctctctggttgccctcttgctgacaagagcctcagaaacctcatggctgcccactctgctgacctcaagtgccccacgcccggctgtgacggctctggccacatcacagggaactacgcttcacaccggagcttgtccggctgccctcgtgcaaagaaaagtggagtcaaggtggcacccaccaaggacgacaaggaggaccccgagctgatgaagtgcccagttccaggctgtgtggggctcggtcacatcagcgggaaatacgcctctcacaggagcgcatccggctgcccactggccgcccgcaggcagaaggaagggtccctcaatggctcgtcattctcctggaagtccctgaagaatgaaggaccgacctgccccaccccgggctgtgacggctctggccacgccaatgggagtttcctcacccaccggagtttgtcaggctgtcccagagcaacctttgctggaaagaagggaaaactgtcaggggatgaggtcctcagtccaaagttcaagactagcgacgtgttggagaatgatgaggagatcaagcagctgaaccaggagatccgagacctgaacgagtccaactcggagatggaggctgccatggtgcagctgcagtcccagatctcctccatggagaagaacctgaagaacatcgaggaggagaacaagctcattgaggagcagaatgaagccctgtttctggagctgtccggcctgagccaggccctcatccaaagtctcgccaatatccgccttccgcacatggagccaatatgcgaacagaatttcgatgcctatgtgagcaccctcaccgacatgtactccaaccaggacccggagaacaaggacctcctggagagcatcaagcaggctgtgaggggcatccaggtctaggccgtgtggtacccagaagtgtcccagcccaccacaccgtttacctccctcgccctgccccgcaccgtggggatgcccaactcacagtgacttcccgtttggggcccggtgtggccgcgggcgggtttatccaaagggatggctggaaattggccgctcccacgaggctccctccaggcttggggccgtggtggccctatctgtgtgcataggggcactgaagaattacaaagtgatttatttttgttttctgaaagaaatctgaagagcagctcaaagtctccagtggaagctcatggacaaggttctcagggaagttttggagtttgcaaccacagtattcctttgtctgtcgaggctgggagggtagccgtgagcgtggtgggtgggtggtgtgagtggcatcttggcctggaggacacgcctggggcagcgtgtctgtgctcagtgagggccgatgaagaaagtgcgttttctgttttcatttaattcagttttgtgttaagggtggaacaaagctctgttctagagggaaagttaggaataggcctcccagaggatactccagacagttgacaagcatcgcagcccctgtcaggtcaaggaattttaacctgggagactcctgaaaatcagcctaatgtctgggggcagctggcgctgaggctgtgcagatgtgtatggccttgggtcacagctccctactggggctgcagcctttagaccctgggtctgggatccacgtctagggaccactctggcttctgtgcatccacccaggcccccgacccatcactgccacattctccgggtcatggccgagcttgacctctgcatccatggtgacggaggtggcaatgacatcatcaaggtcagagggtaaattcctaacaggagaccacaaaggtttcacttcttttagatccatccaatatgcgaaaaaagggtacattttaatttaatgtgttaaaaacacaatgtccctaccgtgtaaatagaatccaagtcaattgtgactgcaattccaagttagtatttaaaaatagagaaattgcacttcctggaaaaaattaaaaagtagttagtttaattattctgtaaattatttaattttgtcaagatgtaagtatttatattcacagcctcttatgttaacgtttgctatttatttaacatttttatttattaattttatactatttcaactagaccccacaccagggcaccctaagaggggaaaaaagtgaattcaaagcaaaaataactatttgactataatataggccacaaaaaatcttgatataactcctagttataattttgatgcaaccaagttattttttatatattttgttatttattcttttaataatggaatttttttaaaaagtattttgtaactgaggaattttgataatttggggattttgttttcccttggtctaatggagagaaagacattttggttttctttttccattttgggttccttttgtttcaggcacggataacagcaaatggaattctgtatttattattatttaagtgtagcgcagatgtgtgtgcttgggcgtgtttctcgtgtcgcgtttgcgtgtcggctcttgcggtggagtcctgttgctgtgagggagtgctggccgcaggcagcctcgagtcaccgccaggctcacaggctgtgccacccgtccctccgacagctccaatactgtgaccctccttcctcaggaagcgcgttgaacccacagcactccgtggtgtgtttgcagggtgatttcctaataaaagtccactctgactgtgaaaaaaaaaaaaaaaaa

SEQ ID NO: 648 - DNA, 4662 bp, Homo sapiens
ctgttgccgcgccgggtgggtgcattttaattttttcattccctgaactatgggttatgatatccatactcactgaagacaaaaagccaccttttctgcgtcttggtggcatgcatgtgtctcatcatcctttcaaacttgtggtggaacagggttttcttccctgtctgtgtattttgagccagcacagttaccaaaattgaacttgtctttcgcttgtgaacggttgtggtcattgtgagggcgggtcatgaggaggctgtagccaaggacgaggtgtgtgcggctgttgcctggacgtttgtccaatccacgttgacatttgagggatcacagcgtgtgaaaatgaactcagaggagaattggtgaattcctatccagtgggcattttcaaaccctggtcgacggcggaagaatatcaggtcctgagatcacccacccggcgcggcaacagtgcagagtggccacatctggtggaagaagaaaaaaatgtagttattgaattcaatcaagtgtttgcatctttcaagctatcaacaaaattccatcaagaaaggttccagttggtctcacagacgtatggatatccgaggagccacctaaagatggagaaatcaaggcatagagagattaagtgactttgccacagtcacaagctggagaggaccaggagtagagcttagagcgagcccctgactctgggcctgcgtcctgccaggagtcacgctgcctccgttcctaggagagaagacttcctgtaagatggaggtggacaccgaggagaagcggcatcgcacgcggtccaaaggggttcgagttcccgtggaaccagccatacaagagctgttcagctgtcccacccctggctgtgacggcagtggtcatgtcagtggcaaatatgcaagacacagaagtgtatatggttgtcccttggcgaaaaaaagaaaaacacaagataaacagccccaggaacctgctcctaaacgaaagccatttgccgtgaaagcagacagctcctcagtggatgagtgtgacgacagtgatgggactgaggacatggatgagaaggaggaggatgagggggaggagtactccgaggacaatgacgagccaggggatgaggacgaggaggacgaggagggggaccgggaggaggaggaggagatcgaggaggaggatgaggacgatgacgaggatggagaagatgtggaggatgaagaagaggaagaggaggaggaggaggaggaggaagaggaagaagaaaacgaagaccatcaaatgaattgtcacaatactcgaataatgcaagacacagaaaaggatgataacaatagtgacgaatatgacaattacgatgaactggtggccaagtcattgttaaacctcggcaaaatcgctgaggatgcagcctaccgggccaggactgagtcagaaatgaacagcaatacctccaatagtctggaagacgatagtgacaaaaacgaaaacctgggtcggaaaagtgagttgagtttagacttagacagtgatgttgttagagaaacagtggactcccttaaactattagcccaaggacacggtgttgtgctctcagaaaacatgaatgacagaaattatgcagacagcatgtcgcagcaagacagtagaaatatgaattacgtcatgttggggaagcccatgaacaacggactcatggaaaagatggtggaggagagcgatgaggaggtgtgtctgagcagtctggagtgtttgaggaatcagtgcttcgacctggccaggaagctcagtgagaccaacccgcaggagaggaatccgcagcagaacatgaacatccgtcagcatgtccggccagaagaggacttcccaggaaggacgccggacagaaactactcggacatgctgaacctcatgcggctggaggagcagttgagcccccggtcgagagtgtttgccagctgtgcgaaggaggatgggtgtcatgagcgggacgacgataccacctctgtgaactcggacaggtctgaagaggtgttcgacatgaccaaggggaacctgaccctgctggagaaagccatcgctttggaaacggaaagagcaaaggccatgagggagaagatggccatggaagctgggaggagggacaatatgaggtcatatgaggaccagtctccgagacaacttcccggggaggacagaaagcctaaatccagtgacagccatgtcaaaaagccatactatggtaaagatccctcaagaacagaaaagaaagagagcaagtgtccaacccccgggtgtgatggaaccggccacgtaactgggctgtacccacatcaccgcagcctgtccggatgcccgcacaaagatagggtccctccagaaatccttgccatgcatgaaagtgtcctcaagtgccccactccgggctgcacggggcgcgggcatgtcaacagcaacaggaactcccaccgaagcctctccggatgcccgatcgctgcagcagagaaactggccaaggcacaggaaaagcaccagagctgcgacgtgtccaagtccagccaggcctcggaccgcgtgctcaggccaatgtgctttgtgaagcagctggagattcctcagtatggctacagaaacaatgtccccacaactacgccgcgttccaacctggccaaggagctcgagaaatattccaagacctcgtttgaatacaacagttacgacaaccatacttatggcaagcgagccatagctcccaaggtgcaaaccagggatatatcccccaaaggatatgatgatgcgaagcggtactgcaaggaccccagccccagcagcagcagcaccagcagctacgcgcccagcagcagcagcaacctgagctgcggcgggggcagcagcgccagcagcacgtgcagcaagagcagcttcgactacacgcacgacatggaggcggcccacatggcggccaccgccatcctcaacctgtccacgcgctgccgcgagatgccgcagaacctgagcaccaagccgcaggacctgtgcgccacgcggaaccctgacatggaagtggatgagaacgggaccctggacctcagcatgaacaagcagaggccgcgggacagctgctgccccatcctgacccctctggagcccatgtccccccagcagcaggcagtgatgaacaaccggtgtttccagctgggcgagggcgactgctgggacttgcccgtagactacaccaaaatgaaaccccggaggatagacgaggacgagtccaaagacattactccagaagacttggacccattccaggaggctctagaagaaagacggtatcccggggaggtgaccatcccaagtcccaaacccaagtaccctcagtgcaaggagagcaaaaaggacttaataactctgtctggctgccccctggcggacaaaagcattcgaagtatgctggccaccagctcccaagaactcaagtgccccacgcctggctgtgatggttctggacatatcaccggcaattatgcttctcatcggagcctttcaggttgcccaagagcaaagaaaagaggtatcaggatagcacagagcaaagaagataaagaagatcaagaacccatcaggtgtccggtccccgggtgcgacggccagggccacatcactgggaagtacgcgtcccatcgcagcgcctccgggtgccccttggcggccaagaggcagaaagaggggtacctgaatggctcccagttctcctggaagtcggtcaagacggaaggcatgtcctgccccacgccaggttgcgacggctcaggccacgtcagcggcagcttcctcacacaccgcagcttgtcaggatgcccgagagccacgtcagcgatgaagaaggcaaagctttctggagagcagatgctgaccatcaaacagcgggccagcaacggtatagaaaatgatgaagaaatcaaacagttagatgaagaaatcaaggagctaaatgaatccaattcccagatggaagccgatatgattaaactcagaactcagattaccacgatggagagcaacctgaagaccatcgaagaggagaacaaagtagttgagcagcagaacgagtctctcctccacgagctggcgaacctgagccagtctctgatccacagcctggctaacatccagctgccgcacatggatccaatcaatgaacaaaattttgatgcttacgtgactactttgacggaaatgtatacaaatcaagatcgttatcagagtccagaaaataaagccctactggaaaatataaagcaggctgtgagaggaattcaattcaggtctgaacagctgctgtagtgatgaaactcttgcttaaaaaggatgcctcttgttttttgctgctgtaacttaccagaaagtgttctatatttatttctgtttgaatttgaaacagtgttatgcttacaagacttcataatgattttatgtcttgctttaaagatagtacctgcagaatagtttttgaatacacccacattttgtacgtttccatgtaagctgacatagtgttctgccatgtaatgtttatagctgctgatgtatgcacatttgggggtatatctatttctgaagaggtaagctgatcaaaataaatagagtgtaaattctttttaatgc

SEQ ID NO: 649 - DNA, 2295 bp, Homo sapiens
tattttagttagcgaaaggacataatcatcaatgtttataatctggagtgcgttatcatggtttatagcaattagttcatttgcatttatgtttttatattcatcagcaaaattgcaatgggtatttggattgattggaattagtcagatacttttatggctactaatatggcgtttttcacgttcagacaagaacggtagcgattaaaatatttcggcagacatgtgcgtacatttatagcgtccgctttgttagcatgtattagacgttaacgaacgattcgcttacatcaaatttgaacgatacggttgctacatggtataattttgttagaagaattgtggtttggagtcttatcttcaatccagagcttgtcgtctgtcaacgatgagctttttttgtgcaaaaaaatagccccgtcctgtcaaacgaggcacttgtattagcgacgattgtcgaaatacttttgcaacaagattaatactaagccagcaaaaatctgccaaagtgtggcttggagctgttgcattagaaggattgcggtttgcatggagtctcacctcccttctgggcgtctaatctcaacgccacgagaaatagtataccatgactttaaaatggcttagaacgcaaataagagccgtttaagagtatttaagtttgcggtggtatcttcgtatcggtggcgcgaccaaagggaagcagacgacacacagcaggacactccaagtgtccagtgtgctggggtgccgttaagaaatgacgaccagtcattttaggcatctcgtccttgccgatatggagataccacctctaggcgaaatgaggagagctctgctcgacgattggagactttttgacgggaggcgatcagcgccagaaaaaaccggctgttactaacagccgaacagcccgctagaggtttcctttaggtaaccgcacaaccaaaaaagcagtcagaatgacaagccaaataactagtaattcgcccgtaaaatggaaacgtagaactcgtcatgacacttgtggtaaaataacattattcgccttgcaaaaaacgatgtactttgacaatttaagcacaaaaaaacacaacctcgacaatttagagttagagaggtcgtgttttgagattagtgagactatggatagttcattaagtattataacatactcaatgagtgtacatagtctccagaaaaatggagaacccatgaaacaagaaaaacagcagtttataaaaacggattggacgattgacatgataaatcgtcggcaatttgagaaatatgccattgatattctcacagctactaaggatattcatcgcggtggatgggtagaacgaattgataataaggcttggcagtatgtcagagtttatgaaaatggcgacattgaagttttaattacacttcagataataagattccacaaatattttgatacaccagtttggttacagtttaacccgaatcatcttttacccgcagattatgtgcaacttgatcatgtgatgaaatatgttgatcactcacatttaactcgcgccgatttagcaaatgatatttataacatcaacttgcaacgttacgattttggattgtttggagtaactagagatatctatcgtagtttatctggtgatttagaaacacggtattggggacgccgaaaaagtgagcgccaaattcgtctttatgacaaaatgcgcgagatgaaaaaacatggcaaagcagatgatattccagacggtattactgattggtggcgtttagaatttcaatttagaggtggcaaggttgagtcatggcaagaagaagtaatggacaaaatgcagtcgttccatgttcttgctgttgatgataatgatgatttaagtgaaatagataaagccattttagcacgtgttaatgccgataaatttgattttaaaagagtcggtaaacgttatgctgcaaaaattcggaaaatggtacgtgaaaacgttggttttgatacgaccgttgcagaattatctctcaaaacattcaacgaacaaaaagatgagttgcagagacaactagatagcatgcttgcaaaatataatatcggtgcacaaacagaagaaatgacagcatattttgaggaagagcttaaacaaacaggtaatcttgatttttctgttgttgagagtgaatctgcgttagagcgtaatgtgatacgaaatattgctaaaacttggcgtgaagaaaatagtttaacgcacagaactaatactaatagttgatgcgtattttttatttttctaatat

SEQ ID NO: 650 - DNA, 4499 bp, Homo sapiens
gccgccgccgcggccaagcgagcgccgtcggggcgggtgggcgggaagaagcggcgggcccgaggtgggggggagcagagagagcgcgcccaccaccttcccttcccccctcgatgggagcgggggcgtcccggctcctgcagccgccagaggagggagagccgggggccgtcgcttcggagttggggctgagcagtcctcggggagagcgcgccaagaccgctgcagccgctggctgacggaaggagagttttacatggaagtggcttacagaaacttggcgctgaggtgcagggaagccagaaactctttgtgtctctaaggccgatgaggaatttggaaacacatgtgggacatacaagcgttggatatagaggactgagcagggggaggaacatttaagctgatggaagtggaagtggaagttgctgtacattggcagcaaggcctccgagttagcttttgaatgcagttaactggtttctcttaactgtggaattcattgaaaagtcagactccgagtggtcgttccaggatatcttgaaaagcccaggttaaacccatccagagtaatggctgcggccttacccaggaccctgggggagttgcagctgtatagaatattacaaaaagccaatctactttcttattttgatgcctttatccaacaaggtggtgatgatgtccagcaactctgtgaagcaggagaagaggagtttttggaaatcatggcactcgtgggcatggctagcaagccccttcatgttagaaggctgcagaaggctttgagagactgggtcacaaaccctgggcttttcaatcagccactgacttcccttcctgtcagtagcatacccatctataaattaccagagggatcaccaacatggctgggaatatcctgcagtagttatgaaaggagtagcaatgcccgggaacctcatttaaaaatccccaaatgtgctgccaccacctgtgtgcagagcttgggacaggggaagtcagatgtggttgggagcctagcactgcagagtgttggtgagtccagactctggcaaggccaccatgccactgagagcgagcacagcctctccccagcagacctgggctcccccgcgtccccaaaggagagcagtgaggcgctggatgctgctgctgcgctctctgtggctgagtgtgtggagcggatggcccccacactgccaaaaagtgacttgaatgaagtgaaagagctgctaaaaaccaacaagaagttggccaaaatgattggtcacatctttgagatgaacgatgatgatccacacaaagaggaggaaattcggaaatacagtgcaatatatggcagatttgactcaaagaggaaggatgggaaacatctcacacttcatgagctcactgttaatgaagcggctgctcaactctgtgtgaaggataatgccctgctgacaagaagagatgagctttttgccttggctcgacagatttctcgagaagtcacctataaatatacttacagaaccaccaagtcaaaatgtggagaaagagatgaattatccccaaagagaattaaagtggaggatgggtttccagatttccaggattctgtgcaaacactcttccagcaggctagagctaagagtgaagaacttgcagctcttagttcacagcagcctgaaaaggtgatggcaaagcagatggagttcctttgcaaccaagctggctatgagagactgcagcatgccgagaggaggttgtctgcagggctttacaggcagagctcagaagagcacagtcctaacggcttgacttccgataactcagatggacaaggagaaagacctttgaatctccgaatgcctaatttacagaacagacaaccccatcattttgtggtggatggggagctgagcagactttaccccagtgaggcaaagtcccactcatcagagagccttgggattttaaaagactaccctcattcagcttttaccttagaaaagaaagtcatcaaaacagagcctgaagattcaagatagctgtgatttctctcaccgttctctggaaatggcatcagatttaaggataatactccatcatagaaataagccttaataaccagtgttgcctcattcagctcaaacagatttcatagccaaagcaaaaggactggtacggtagtctgtggaaaccaggaagataaaacaacagccacaaaagagaaaatcaagagtgttgcaatctataacagtaatattgattcattcacattcctgtgttaagtcattttatatggaaaggcttacaaatcaatattgtaagcattcattatttaagaatgtacaatgtatttgtgtaatttatagaagtaaaatctagatgttgagacctgtttggtctaatagatgtggatacagtttattttacttgaaattttgttgtctactttgtgtgtttaacgtaaatatatgtcagagtttagaatctgcctgcagttgtgaaaaagaaagcttaagtgatgcagttattggcaagattgcaatgattatggaaaaatagaaagcgaatactcagtttaagccaaggaaaatattgtggatttaatatttgataaaactgattttgtttaacaggaaatttttagcattcagtcatataacatctggttatcaatgcacgtttacacaataaatacttgagtggaggaaagttaaaaagatgagcaatagagtagaaaatatatcttaaactagttgacctagattgtattaatagctacttaagatgtttcaaagataggaagctattgcttggacagagaacttgaaataagtggacccatgtataaaagctttgacttaaacattgatatttcagaatgtgttaaatagattaagacacagtaagttaaccctacatgttataaagatggcgactgttaacaaaggctgtaacagattaagtactattttatatccagaaagtcttctctatgtagagaagtcagagagactagatgctttcactagggaatgtcttcccacccagccatcacaaatgtggacaatcactgcatccacatctgtaggcatatttctatggaagtttaattgacagctatattcattatttattttacaatttcatttttctacacctttgagatttatgaatgcagttttttcttaaaatttattttaacttgacagtatgtttttagttcccccaatttaattaatggaccatgtgcatatatatgggagtgtgcttacatgttaataatttacttgcatacttatgagaatttcacattggaattcataatggtaaaacaacatacatctgccaatatacgttttttctgttggtttaagagaagataactgacagctttacctacttcctacagatgcatctaaacccagatattactgagaagagtgtattgactctgagtgtaagagagtatgtgtttttttgtttttagttctgctctagatcataattgtaaaaaatattaagtcataatctgttacactaaaatttgtcagccaaatgttagatgaaatgtctgcactgtagtctcagatcactgtcacgtatataaattgcttcttcattttaatttgtagaagtactttacagtaggaaacgccagtaaacaacttttatactgttaaaaggcttttttccccttcctaaatgttttaattgtaccatagtgttttgctcactgaagaagcttcttatggaccttgcaactttgttgctagcttgaggttgattattgtggttgtattgttcactgtgtgtagaaatagtatgagtacgatttcaatagactgttcagtttttaatattagccatagcactggttagtatatctcagtagtttcatgaaacgtttcctgtattctaatctattttgaaacattttgtttttttttaattgtgtcttacagtcaagtttgtagattttcataagccacaattttaaaagatgcagtaatcttccaacttccaatatttatccattcgttgtggacccacagattgcatctttaaattcataataagtttccttaactatcttatgtttctagtctttcaagcttagtgataaggtggaagcacaagaaaaatttcagtagaatacagtttttattttgtaaacactaatgtattaaacttgctatacattaaagcaaataatatatatttttatttgaattgtatatgtgaattggaagttataattagttgattttttcattttgttagaggtattttcactgaacaaggtcaattggttacctcagtattacagccaatatagtccaagggaccatttctccccgagtctcttacactttattgtgcgatgtccacgtttttgtgactcttcaagctgttggtgaggtgggacgaatgcacttgcttcctgtggcaataaagattttctgtgcctcacaaaaaaaaaaaaaaaaaaaaaaaaaaaaaaa

SEQ ID NO: 651 - DNA, 2725 bp, Homo sapiens
ctctcccagtctctaagccgcggcgtctccgcggccgagaggccccagcgcccgcctccccggcccccgcccccacccccgcccccggctctgcccacgccctccgcccgccagcccggcagccagcgcagctccgggcctcgctccctgtgcgtcctgcgggggcggaggcgcggagaggcggcaagcgcagccggggagggtgggggggcagaggcacagacagaggcgcggaggctcggagagagaagacgtggagggagggacagagcctggacagcggtggacacggcatcgtgcgcggggaagagggcagcacgcagcaggcgccgagcgccgggcaccgagaagggcagcccgggtgatctccggccgtccatgcacagagcgccttcccccacagccgagcagccgccgggcggaggggacagcgcccgccggaccctgcagcccagactcaagcccagtgcccgagccatggcactgcctcggacgctgggggagctgcagctgtaccgggtcctgcagcgcgccaacctcctttcctactatgagaccttcatccagcagggaggggacgacgtgcagcagctgtgtgaggcgggtgaggaggagtttctggagatcatggcacttgtgggcatggccaccaagcccctccatgtccggcgcctgcagaaggcactgagagagtgggccaccaatccagggctcttcagtcaaccagtgcctgctgttcccgtctccagcatcccgctcttcaagatctctgagactgcgggtacccggaaagggagcatgagcaatgggcatggcagcccaggggaaaaggcaggcagtgcccgcagttttagccccaagagcccccttgaacttggagagaagctatcaccactgcctgggggacctggggcaggggacccccggatctggccaggccggagcactccagagtcggacgttggggcaggaggagaagaggaggctggctcgccccccttctccccccctgcagggggaggagtccctgaggggactggggctggggggctggcagcaggtgggactgggggtggtccagaccgactggagccagagatggtacgcatggtggtggaaagtgtggagaggatcttccggagcttcccaaggggggatgctggggaggtcacatccctgctaaagctgaataagaagctggcacggagcgttgggcacatctttgagatggatgataatgacagccagaaggaagaggagatccgcaaatacagcatcatctatggccgtttcgactctaagcggcgggagggcaagcagctcagcctgcacgagctcaccatcaacgaggctgctgcccagttctgcatgagggacaacacgctcttattacggagagtggagctcttctctttgtcccgccaagtagcccgagagagcacctacttgtcctccttgaagggctccaggcttcaccctgaagaactgggaggccctccactgaagaagctgaaacaagaggttggagaacagagtcaccctgaaatccagcagcctcccccaggccctgagtcctatgtacccccataccgccccagcctggaggaggacagcgccagcctgtctggggagagtctggatggacatttgcaggctgtggggtcatgtccaaggctgacgccgccccctgctgacctgcctctggcattgccagcccatgggctatggagccgacacatcctgcagcagacactgatggacgaggggctgcggctcgcccgcctcgtctcccacgaccgcgtgggccgcctcagcccctgtgtgcctgcgaagccacctctcgcagagttcgaggaagggctgctggacagatgtcctgccccaggaccccatcccgcgctggtggagggtcgcaggagcagcgtgaaagtggaggctgaggccagccggcagtgagggttggactggtgtcttcagacccaggacctcagacttctggctcacacagacccccacgctctccatccccggaatctagtcacaaccctggatccttcctctgcccttctcctgcctccccacctgctccatgggcataagactgtggggcttcaagcaataacaagcagaggcctggagagaggacacaaggagggtgcgtggtgccctcacccctgcccagagcgagggggcaaggactctgcctccagggcatctggggttttcccctccctcacacaacacactcccattctctttaggtttgcaccagtggtgtgagcagttggactcagtttggacaagggggaaagggggacttccctgggaaggtccagctaaaagtggcaacatttgcccccagaattgggggcctgggaacactggacctgctccttctcccctctccttccccgtttttgtgcttctggtttgtttctttaattaatttaacaagtgctgcagtttgccctcccattcccatctatcccccaagtcctttgcaatttcttccctgccctacataggggcggtgggtgtgggatcccttcactggccccctcgggaggcctgggttggactcagggtctcctccagctgggggctggaccgcagcacctatctgagcagttagagcgtctttcttttcagattgtgtacagtagattatttattttgttattttggaataaaatttattttatggcttaggaaaaaaaaaaaaaaa

SEQ ID NO: 652 - DNA, 3735 bp, Homo sapiens
agtcacaacttcgggggttgaggttgtcaaggagctgtccgtgatggttctatggtgtgtgcgtacacacatactctctctctcacacacacacaccacagtgacagatgacctattgaaataatttcagagccggtctgtggttgctacgacaaccaatgatctcttggctttcatctggccatgtgacagggactttgacgtcagctagaggcagagtctgtggctgagtccacacagtcaaaggcttgtgagaatctggtggatgctggaccttgctgctgctgctactgctgtttccaggggctgcagagcatggactgttaaatcttgcacttcttctgagtgagctgaattcttgccgccaggatggggaaacagaacagcaagctgcgcccggaggtcatgcaggacttgctggaaagcacagactttacagagcatgagatccaggaatggtataaaggcttcttgagagactgccccagtggacatttgtcaatggaagagtttaagaaaatatatgggaactttttcccttatggggatgcttccaaatttgcagagcatgtcttccgcaccttcgatgcaaatggagatgggacaatagactttagagaattcatcatcgccttgagtgtaacttcgagggggaagctggagcagaagctgaaatgggccttcagcatgtacgacctggacggaaatggctatatcagcaaggcagagatgctagagatcgtgcaggcaatctataagatggtttcctctgtaatgaaaatgcctgaagatgagtcaaccccagagaaaagaacagaaaagatcttccgccagatggacaccaatagagacggaaaactctccctggaagagttcatccgaggagccaaaagcgacccgtccattgtgcgcctcctgcagtgcgacccgagcagtgccggccagttctgagccctgcgcccaccaatcgaattgtagagctgcttgtgttcccttttgattcttctttttaacaatttttttttttttttgccaaacaatatcaatggtgatgccgtcccctgtgcggtctgatgcgccttcctccgtgacgccttcagcttcttttgtcgtggatgcttcgtgggaatgcccagagccccagtgtgcttgtggagagcatggacagacttcgtggtgttcattgtttgatgatttttaatcgttactattatttttttttattctaatgtctctgttctaaaacgtaagactcgggggttggggcaaaagaagggaaacccatccagtcctgtgattctattgcaagcttcaaggggcttttgtttgaaagacaaaactccccacctgaatctgttgtcacacgtgccgtaggggtgatggatggcaccggatgctggattccccaagaacaagttaccctctggggtgaggctattccagcgagctgggacatttccccatgggggcccactcccctctcttccccagcaggctgtagtttctaagctgtgaacatttcaagataaattaacagaggagaggaaaaagatggctcagctattttttcacaggtttacactagttgagctaatatgcgtgtctttggaaattaaacacaaatggtaacatattccaaaaccagacccatcttgttgcctattgtgataaaataaaaagacggctgtatataacatattgggtaatgcagaccaaattaagtgttttgccttgtttaaatgaaatgcatgtttagtgagcactaatacaatcttattccagaagactgtttttagtagcttattgtgaagtaagacaactataatgaatgtctgtcttgtttggaagtcatatctgtctttgcacaaatgtaccaatcgacaagtatattttatatattccataaaaatacaaagtaaccctgactagggcccaactttaattttgaatgcatttccagagtggccatgcctagagggcagatgcagagcaggtggtagtgggacaggacaattggagcacaggaatgttaacatgtatgacaggggaccagtagggtggtttccctctcaggcccagcagcccattgacagcattagactggcggcatggtgcttttctgagcagatcaatactctgcagactcgaaaaaacatcacatacattcttggaacttcccagtggtttaatctatgtgcatggttagggagccaggtctggaatattcagtttccctgcccctgttaaagaatcagaggttgggcagtcatcaaattcatcataaagacatgggcaagtgtgtctgtggtttccaaggcccccctatggagaatccaaaagtattttccattgccgtgctctttgaatgcagacttctatttccagaagtgacagcacaagtctgagttgctgtttggtctggtgacctcagacacactaatttgaattgaaagctaagagtaaaaatttgctggttacaggcgagtcatactcttgcaagtagttagcaaagggaggcccaaattctcaaggttgttgatggggaacttgccactaagagaaggcagagaggtccctagtgggtatatttgctgccaagccacttgccaaagaagaggaaccacagaaagagagacatcatgaccaggagaaaaatgtgactagacatgctaacctccaggtttttatatatgacttgagtctgctgtaattggcagcagaaatccaaatttgtatggtagaccaaaaagaaccaaatccatagggtgaaattttgagacctagactctgtaaaaataatcctagtcttcctccaggggtcagttcctcacagtggttctgtaccaaaacttgccaaattcctccatggccaagtgttaaaatctgtgtttggaaaatagcgaattaacctaagacacagaaggcagactgggtgaggagacctagcatgccctattggcagtgctcaggagctgcatcccacttttccctgctctgaatcgaagtcctagttccttcctttgattctcctttggtaggtggaatcagttaatgttttgagaaacctgcctgggctctgcccttagtcatgacatctcgctgagccagacccactctgttccttggaacctagagctggagtgaggagtagaggtctccggctattccagaaagaaaagtgagccacatgcaggctgatgaatgccgacacttccagaatgtatagaaatagtccctgtcctggcctgccactgaccctgtctgtattttctcggaggttgtttttctccttctccttcccaggaaggtctttgtatgtcgaatccagtgcactcaagtttggccaagggactccacagcacccagaagactgcatgcctcaaggtttatgtcactcctctgctgggctgttcattgtcattgctgtgttcagggacctttggaaataaaacctgttctgtcccaaataaaaccagcctgtgatgttcaagggactggaataaagtggcttacgacctgaaggattctacagagtgctcaactgttcatacatcattcagagtgggagggagctgggggtgctgtcccatcccatctgtatgcccacggtggatttaataatatataatttataaatcatagcctatggagtggcccgtaaatcagttgactgtgtagctcttgcctggcattaaagcatgtttttggtttaacatgaaaaaaaaaaaaaaaaaa

SEQ ID NO: 653 - DNA, 6895 bp, Homo sapiens
ttccagttacagctatatcagagaatgagttaatctcctcagaaatcactaaatactactctgaggggcttagaaattaacaggttgtttatataattggccttaaatgaggtgagagtgaagagactagagccatctctggaaaacatcattatcccattccccgggaagctaccctctggaactcaagatttgaccatatctgttttgaggattcattatgaacaaagaagtctcccaggtgtgaagtttttcaacatgagtggcctcggggacagttcatccgaccctgctaacccagactcacataagaggaaaggatcgccatgtgacacactggcatcaagcacggaaaagaggcgcagggagcaagaaaataaatatttagaagaactagctgagttactgtctgccaacattagtgacattgacagcttgagtgtaaaaccagacaaatgcaagattttgaagaaaacagtcgatcagatacagctaatgaagagaatggaacaagagaaatcaacaactgatgacgatgtacagaaatcagacatctcatcaagtagtcaaggagtgatagaaaaggaatccttgggacctcttcttttggaggctttggatggatttttctttgttgtgaactgtgaagggagaattgtatttgtgtcagagaatgtaaccagctacttaggttacaatcaggaggaattaatgaatacgagcgtctacagcatactgcacgtgggggatcatgcagaatttgtgaagaatctgctaccaaaatcactagtaaatggagttccttggcctcaagaggcaacacgacgaaatagccatacctttaactgcaggatgctaattcaccctccagatgagccagggaccgagaaccaagaagcttgccagcgttatgaagtaatgcagtgtttcactgtgtcacagccaaaatcaattcaagaggatggagaagatttccagtcatgtctgatttgtattgcacggcgattacctcggcctccagctattacgggtgtagaatcctttatgaccaagcaagatactacaggtaaaatcatctctattgatactagttccctgagagctgctggcagaactggttgggaagatttagtgaggaagtgcatttatgcttttttccaacctcagggcagagaaccatcttatgccagacagctgttccaagaagtgatgactcgtggcactgcctccagcccctcctatagattcatattgaatgatgggacaatgcttagcgcccacaccaagtgtaaactttgctaccctcaaagtccagacatgcaacctttcatcatgggaattcatatcatcgacagggagcacagtgggctttctcctcaagatgacactaattctggaatgtcaattccccgagtaaatccctcggtcaatcctagtatctctccagctcatggtgtggctcgttcatccacattgccaccatccaacagcaacatggtatccaccagaataaaccgccagcagagctcagaccttcatagcagcagtcatagtaattctagcaacagccaaggaagtttcggatgctcacccggaagtcagattgtagccaatgttgccttaaaccaaggacaggccagttcacagagcagtaatccctctttaaacctcaataattctcctatggaaggtacaggaatatccctagcacagttcatgtctccaaggagacaggttacttctggattggcaacaaggcccaggatgccaaacaattcctttcctcctaatatttcgacattaagctctcccgttggcatgacaagtagtgcctgtaataataataaccgatcttattcaaacatcccagtaacatctttacagggtatgaatgaaggacccaataactccgttggcttctctgccagttctccagtcctcaggcagatgagctcacagaattcacctagcagattaaatatacaaccagcaaaagctgagtccaaagataacaaagagattgcctcaattttaaatgaaatgattcaatctgacaacagctctagtgatggcaaacctctggattcagggcttctgcataacaatgacagactttcagatggagacagtaaatactctcaaaccagtcacaaactagtgcagcttttgacaacaactgccgaacagcagttacggcatgctgatatagacacaagctgcaaagatgtcctgtcttgcacaggcacttccaactctgcctctgctaactcttcaggaggttcttgtccctcttctcatagctcattgacagaacggcataaaattctacaccggctcttacaggagggtagcccctcagatatcaccactttgtctgtcgagcctgataaaaaggacagtgcatctacttctgtgtcagtgactggacaggtacaaggaaactccagtataaaactagaactggatgcttcaaagaaaaaagaatcaaaagaccatcagctcctacgctatcttttagataaagatgagaaagatttaagatcaactccaaacctgagcctggatgatgtaaaggtgaaagtggaaaagaaagaacagatggatccatgtaatacaaacccaaccccaatgaccaaacccactcctgaggaaataaaactggaggcccagagccagtttacagctgaccttgaccagtttgatcagttactgcccacgctggagaaggcagcacagttgccaggcttatgtgagacagacaggatggatggtgcggtcaccagtgtaaccatcaaatcggagatcctgccagcttcacttcagtccgccactgccagacccacttccaggctaaatagattacctgagctggaattggaagcaattgataaccaatttggacaaccaggaacaggcgatcagattccatggacaaataatacagtgacagctataaatcagagtaaatcagaagaccagtgtattagctcacaattagatgagcttctctgtccacccacaacagtagaagggagaaatgatgagaaggctcttcttgaacagctggtatccttccttagtggcaaagatgaaactgagctagctgaactagacagagctctgggaattgacaaacttgttcaggggggtggattagatgtattatcagagagatttccaccacaacaagcaacgccacctttgatcatggaagaaagacccaacctttattcccagccttactcttctccttctcctactgccaatctccctagccctttccaaggcatggtcaggcaaaaaccttcactggggacgatgcctgttcaagtaacacctccccgaggtgctttttcacctggcatgggcatgcagcccaggcaaactctaaacagacctccggctgcacctaaccagcttcgacttcaactacagcagcgattacagggacaacagcagttgatacaccaaaatcggcaagctatcttaaaccagtttgcagcaactgctcctgttggcatcaatatgagatcaggcatgcaacagcaaattacacctcagccacccctgaatgctcaaatgttggcacaacgtcagcgggaactgtacagtcaacagcaccgacagaggcagctaatacagcagcaaagagccatgcttatgaggcagcaaagctttgggaacaacctccctccctcatctggactaccagttcaaatggggaacccccgtcttcctcagggtgctccacagcaattcccctatccaccaaactatggtacaaatccaggaaccccacctgcttctaccagcccgttttcacaactagcagcaaatcctgaagcatccttggccaaccgcaacagcatggtgagcagaggcatgacaggaaacataggaggacagtttggcactggaatcaatcctcagatgcagcagaatgtcttccagtatccaggagcaggaatggttccccaaggtgaggccaactttgctccatctctaagccctgggagctccatggtgccgatgccaatccctcctcctcagagttctcttctccagcaaactccacctgcctccgggtatcagtcaccagacatgaaggcctggcagcaaggagcgataggaaacaacaatgtgttcagtcaagctgtccagaaccagcccacgcctgcacagccaggagtatacaacaacatgagcatcaccgtttccatggcaggtggaaatacgaatgttcagaacatgaacccaatgatggcccagatgcagatgagctctttgcagatgccaggaatgaacactgtgtgccctgagcagataaatgatcccgcactgagacacacaggcctctactgcaaccagctctcatccactgaccttctcaaaacagaagcagatggaacccagcaggtgcaacaggttcaggtgtttgctgacgtccagtgtacagtgaatctggtaggcggggacccttacctgaaccagcctggtccactgggaactcaaaagcccacgtcaggaccacagaccccccaggcccagcagaagagcctccttcagcagctactgactgaataaccacttttaaaggaatgtgaaatttaaataatagacatacagagatatacaaatatattatatatttttctgagatttttgatatctcaatctgcagccattcttcaggtcgtagcatttggagcaaaaaaaaaaaaaaaaaaaaaaaaaggagtttgcttttgtcgggagattgaaagatgtttttgtttctttctttgtaaaggccttggatattgaaaaaataccaaggcagaacagttggacaatctatttcttgagccaaatttaattattcttatttttgtaatcagtcattggcttcttatctggatgaaggcttttggaggagaaccaaaacgacaagttccaagaagaagatgaagctccgcctccgccgcttagtcccaaccctgcccaggaagaagggcccgtggggctttgcctgtgcccgtccaccaaaggctgtcatgtgtctcgaaatcagcagccctccccatcccaatcccaggcagcttgtgtgtacaatcagcttctctagcaactctgtatctgttggcttcaagagaatattttgcctccacatatgtaccccttctcctttttttaaagatggatttaaaccaagatgcctccaggaaagaggacgaaatgagtatattcacagaggaatccaaaaaatacagtttgggggaaaatgcaataatttttgatgagatgggtgaaggacaagaagtgagttgtgtcaattattgtagatacaattttctgattaaatctggaaaaataaaaggcagcctgttttttctgcttttattgtattaacagctgaggtagctaaagttatttaaaataaaattaaatttatgatccaagtagcttatttttccctttaaatctcattgtaaatatatttgatttcttgtagaaattgatttccttctgtttaattttatgcttttattatactcttgatttttctaaatttgtgtgtgaaatataacattgattgaattgcagttacatttggttagtaatatttcattattttaataactgtgatgtcatgtatggatttactttggggttcaaatcaaaatgtcactgccagaaagagctgttccagctgatctagagcatactgccctagagtgtccctgggatcatctgaacagaagtgcacaggctacttgtacagagaaaaaattaatactcaaaggaaatcttcattttttagattgactttgggaatttgaattttcatcagtgcaaatataaatttctctatcctgctctgaggctaattggtaccatattttccctttgtgtcttgtgactctgccacatcccatctcatcctggcctctgagtcaagaacccagtgaactgactttctagttctagaagttccgctgcaaggccaggaaagcttgagaaaggtattgtggaagaagcaaaggtagacccccatcactcacctttgtctgcatccctgggcctgtgaatgatgacagcacctgacattctgcaccagctacctctgcctccatggcagagaaaaggccataagaacagtggaagaggagcatggactcagacttcaaggaagaagccatttccccaggtccttccttctgcatctcaccacccctagttacaaataactccattgaacagcatctattcagaaactatgccgaataaaaagattggtggaagggctcatgtggttagcaactatgaaacagaaataggacactcagttacaaacattatctcctttagtttttcagaaaatgcatccctgatttcattcatttccagcttgaaagccagccatattactctagtccctaccaaactgctctagaaggtcatttccattttgtttgtgatatttagacgcgcagacttcaggaagttcacctttaacttcagcattccagatgaagtttcctgactcagtgcttttgcataaggaactagaaaaaaaaagtaaggaaaattggagatgctaacatcctcccccatcccaactgcaccttaaaatatgcatgtcaccttcaaggttttataattgcactgtttgttttatgtatgtacagattaaaattattgctacatttgaggaaaataaaattgcttgcttctatgtaattcctgtcattccacaggaaattcacttttccagctactgaatagaatttgtttaacaacctcatgggttgcctcttcatttacagggaagaaatgaaatgtacatctgcagaaattgccaaagcccaaattaacgagtattataaaaggataataaagcatccctgaagccaaa

SEQ ID NO: 654 - DNA, 778 bp, Homo sapiens
agggggtggtggcgaggctccgcaactttggaaactgccatttcattcacacaaggcactgcctgggggagggggctgttcctggctgcagaattctagctctcacgagcacgcagacaaccgcactcgcagcggtgtggggccggctgctcaggggaagccccaggctctccgacccagctaccgggaatggggcaccctttggagaagaaccccagcctggggtggggacgcaccggctctccgacagctcaaacacagacagatcttctagagccgagggaatttcttttcgcagaagccattactccccccgagagaaggctgcaaagctgggaagcccagggtgtgctcctcccgcccttttggacccccgggcttgcaccggctgcactctgagaaccagctgcgcgcggagcggtgcaatgcagcacccaccctgcgagcctggcaattgcttgtcattaaaagaaaaaaaaattacggagggctccgggggtgtgtgttggggaggggagaccgatgcttctaacccagcccccgctttgactgcgtgttgtgcagctgagcgcgaggccaacgttgagcaaggccttgcagggaggttgctcctgtgtaattacgaaagaaggctagtccgaaggtgcaaaatagcagggagaggacgcgcccccttaggaacaagacctctggatgtttccagtttcaaattgaaagaagaggggcgccccccttgtttgaaaataaataaataaataagtgcgagctacaaaaaaaa

SEQ ID NO: 655 - DNA, 2227 bp, Homo sapiens
gtgctcccgccccccgggaatgaatggatgggcggcctcagcgcccgcccgaccgctgggaggaccgacccggcggggacctgctgggggcaggacccggggagcaagatggccactgtcatccctggccccctgagcctaggcgaggacttctaccgcgaggccatcgagcactgccgcagttacaacgcgcgcctgtgcgccgagcgcagcctgcgactgcccttcctcgactcgcagaccggcgtggcccagaacaactgctacatctggatggagaagacccaccgcgggccgggtttggccccgggacagatttacacgtaccccgcccgctgttggaggaagaaacggagactcaacatcctggaggaccccagactcaggccctgcgagtacaagatcgactgtgaagcacccctgaagaaggagggtggcctcccggaagggccggtcctcgaggctctactgtgtgcagagacgggggagaagaagattgagctgaaggaggaggagaccattatggactgtcagaaacagcagttgctggagtttccgcatgacctcgaggtggaagacttggaggatgacattcccaggaggaagaacagggccaaaggaaaggcatatggcatcgggggtctccggaaacgccaggacaccgcttccctggaggaccgagacaagccgtatgtctgtgataagttttacaaagaattggcctgggtccctgaggcacaaaggaaacacacagccaagaaggcgcccgacggcactgtcatccccaacggctactgtgacttctgcctggggggctccaagaagacggggtgtcccgaggacctcatctcctgtgcggactgtgggcgatcaggacacccctcgtgtttacaattcacggtgaacatgacggcagccgtgcggacctaccgctggcagtgcatcgagtgcaaatcctgcagcctgtgcggaacctccgagaacgacggtgccagctgggcgggtctcaccccccaggaccagctgctgttttgtgatgactgcgatcggggttaccacatgtactgcctgagtccccccatggcggagcccccggaagggagctggagctgtcacctctgtctccggcacctgaaggaaaaggcttctgcttacatcaccctcacctaggccggctcggctcgccgcgactctggggtggtgctcgcctacctgcctctccgagctcctcaattctcccccaccctgaacatcccgcagggggagggggagagggggaagccgagagggggctgggccaccccctcccctctgtgcaagtggaatgtctgccctgtgggtgggtgggcccggccagggcctctccctccctccctccctctctgtcccttggcaaatggacaccaggggcttctcccctcaaagccataccccgcctctgggcgggcatggggggtggtgggtgccagccaggggcatggacagagcctttttctaaagaaaaagacaaaaagttaaaaaaaaaaaaaagaagaaaagaaaagaagttaatatatacaaagagtcctccaaggcctggctgggtggaggggcgctgctgagagtgtccaccgggcacccgcctctgccggccccccgccgggcgccccaaccccaatttctggagctgcagccgtcccgcgccccacccaaggtgggcgccttcccctcttgtgcccagggcggtgggcgtggtgtccacccgcccctcctggtgcccacggtggatactgcatgatgtgaaccttggttttgaactctgttcctgcccctccccgaccgccccagcctgtgcccgccccgtgcctgccgtggctggtgggtggcggtggtggggccgggtgggcccccgcccagcgcctgctggaatgagaagcacagactccgccacggactccttttctctccctcctcccgccccgccaggcctggcggcccccgcccccctcgctggccattttgggggagtgagggggcgtggttgtttcttgtggttgtgtgtgtttgttgttcgggttttaaaaaagggaaactgagactgcaggtgggggaggtggtgggttttggggggatgtcccctaatccaggagtgccccctcacttgtcaccgagtctcctctattgcctgcctctgctgtgaattaacttgttctgtgtattaaactgggcctgacccctctgcccaaaa

SEQ ID NO: 656 - DNA, 2641 bp, Homo sapiens
gagaacggggagcgcacagcctggacgcgtgcgcaggcgtcaggcgcatagacctgctagcccctcagctagcggccccgcccgcgcttagcatcactaactgggctatataacctgagcgcccgcgcggccacgacacgaggaattcgcccacgcaggaggcgcggcgtccggaggccccagggttatgagactatcactgctcaggacctactaacaacaaaggaaatcgaaacatgaccaaatcgtacagcgagagtgggctgatgggcgagcctcagccccaaggtcctccaagctggacagacgagtgtctcagttctcaggacgaggagcacgaggcagacaagaaggaggacgacctcgaagccatgaacgcagaggaggactcactgaggaacgggggagaggaggaggacgaagatgaggacctggaagaggaggaagaagaggaagaggaggatgacgatcaaaagcccaagagacgcggccccaaaaagaagaagatgactaaggctcgcctggagcgttttaaattgagacgcatgaaggctaacgcccgggagcggaaccgcatgcacggactgaacgcggcgctagacaacctgcgcaaggtggtgccttgctattctaagacgcagaagctgtccaaaatcgagactctgcgcttggccaagaactacatctgggctctgtcggagatcctgcgctcaggcaaaagcccagacctggtctccttcgttcagacgctttgcaagggcttatcccaacccaccaccaacctggttgcgggctgcctgcaactcaatcctcggacttttctgcctgagcagaaccaggacatgcccccccacctgccgacggccagcgcttccttccctgtacacccctactcctaccagtcgcctgggctgcccagtccgccttacggtaccatggacagctcccatgtcttccacgttaagcctccgccgcacgcctacagcgcagcgctggagcccttctttgaaagccctctgactgattgcaccagcccttcctttgatggacccctcagcccgccgctcagcatcaatggcaacttctctttcaaacacgaaccgtccgccgagtttgagaaaaattatgcctttaccatgcactatcctgcagcgacactggcaggggcccaaagccacggatcaatcttctcaggcaccgctgcccctcgctgcgagatccccatagacaatattatgtccttcgatagccattcacatcatgagcgagtcatgagtgcccagctcaatgccatatttcatgattagaggcacgccagtttcaccatttccgggaaacgaacccactgtgcttacagtgactgtcgtgtttacaaaaggcagccctttgggtactactgctgcaaagtgcaaatactccaagcttcaagtgatatatgtatttattgtcattactgcctttggaagaaacaggggatcaaagttcctgttcaccttatgtattattttctatagctcttctatttaaaaaataaaaaaatacagtaaagtttaaaaaatacaccacgaatttggtgtggctgtattcagatcgtattaattatctgatcgggataacaaaatcacaagcaataattaggatctatgcaatttttaaactagtaatgggccaattaaaatatatataaatatatatttttcaaccagcattttactacttgttacctttcccatgctgaattattttgttgtgattttgtacagaatttttaatgactttttataatgtggatttcctattttaaaaccatgcagcttcatcaatttttatacatatcagaaaagtagaattatatctaatttatacaaaataatttaactaatttaaaccagcagaaaagtgcttagaaagttattgtgttgccttagcacttctttcctctccaattgtaaaaaaaaaaaaaaaaaaaaaaaaaaaaaaaaaattgcacaatttgagcaattcatttcactttaaagtctttccgtctccctaaaataaaaaccagaatcataattttcaagagaagaaaaaattaagagatacattccctatcaaaacatatcaattcaacacattacttgcacaagcttgtatatacatattataaataaatgccaacatacccttctttaaatcaaaagctgcttgactatcacatacaatttgcactgttactttttagtcttttactcctttgcattccatgattttacagagaatctgaagctattgatgtttccagaaaatataaatgcatgattttatacatagtcacaaaaatggtggtttgtcatatattcatgtaataaatctgagcctaaatctaatcaggttgttaatgttgggatttatatctatagtagtcaattagtacagtagcttaaataaattcaaaccatttaattcataattagaacaatagctattgcatgtaaaatgcagtccagaataagtgctgtttgagatgtgatgctggtaccactggaatcgatctgtactgtaattttgtttgtaatcctgtatattatggtgtaatgcacaatttagaaaacattcatccagttgcaataaaatagtattgaaagtgaaaaaaaaaaaa

SEQ ID NO: 657 - DNA, 3048 bp, Homo sapiens
gtagagatgccacactcgctccgcggttcgcatggcgctctgaagacgccggcgcccgccgccttgaggagccgctgcccccgctccctgaagatgggggaacaatgaaataagcgagaagatccctcttctcccccctctctctcttgccccctccccccctcccctcccctctccccttgactcctctccgaggcaccatgctgacccgcctgttcagcgagcccggccttctctcggacgtgcccaagttcgccagctggggcgacggcgaagacgacgagccgaggagcgacaagggcgacgcgccgccaccgccaccgcctgcgcccgggccaggggctccggggccagcccgggcggccaagccagtccctctccgtggagaagaggggacggaggccacgttggccgaggtcaaggaggaaggcgagctggggggagaggaggaggaggaagaggaggaggaagaaggactggacgaggcggagggcgagcggcccaagaagcgcgggcccaagaagcgcaagatgaccaaggcgcgcttggagcgctccaagcttcggcggcagaaggcgaacgcgcgggagcgcaaccgcatgcacgacctgaacgcagccctggacaacctgcgcaaggtggtgccctgctactccaagacgcagaagctgtccaagatcgagacgctgcgcctagccaagaactatatctgggcgctctcggagatcctgcgctccggcaagcggccagacctagtgtcctacgtgcagactctgtgcaagggtctgtcgcagcccaccaccaatctggtggccggctgtctgcagctcaactctcgcaacttcctcacggagcaaggcgccgacggtgccggccgcttccacggctcgggcggcccgttcgccatgcacccctacccgtacccgtgctcgcgcctggcgggcgcacagtgccaggcggccggcggcctgggcggcggcgcggcgcacgccctgcggacccacggctactgcgccgcctacgagacgctgtatgcggcggcaggcggtggcggcgcgagcccggactacaacagctccgagtacgagggcccgctcagccccccgctctgtctcaatggcaacttctcactcaagcaggactcctcgcccgaccacgagaaaagctaccactactctatgcactactcggcgctgcccggttcgcggcccacgggccacgggctagtcttcggctcgtcggctgtgcgcgggggcgtccactcggagaatctcttgtcttacgatatgcaccttcaccacgaccggggccccatgtacgaggagctcaatgcgttttttcataactgagacttcgcgccggctcccttctttttcttttgcctttgcccgcccccctgtccccagcccccagagcgcagggacacccccatcctaccccggcgccgggcgcggggagcgggccaccggtcctgccgctctcctggggcagcgcagtcctgttacctgtgggtggcctgtcccaggggcctcgcttcccccaggggactcgccttctctctccccaaggggttccctcctcctctctcccaaggagtgcttctccagggacctctctccgggggctccctggaggcacccctcccccattcccaatatcttcgctgaggtttcctcctccccctcctccctgcaggcccaaggcgttggtaagggggcagctgagcaatggaacgcgtttccccctctcattattattttaaaaacagacacccagctgccgaggcaaaaaggagccaggcgctccctctttcttgaagagggtagaagttagggcgccggagcccgggcctggaacgccctcacccccaacctccagtctccgcgttttgcgattttaattttggcgggaggggaagtggattgagaggaaagagagaggccaagacaatttgtaactagaatccgtttttcccttttcctttttttaaacaaacaaacatacaaaaaaaaaaaaaaaaaaaaaaaaaaaaaaaaaaaaaaaagctaagaggcgacggaagccgaacgcagagtccggatcggagagaaaacgcagtaaggacttttagaagcaataaaaggcaaaaaaaacaaaaaacaaaaaaacaaacaaaaaaaaaccactactaccaataatcaaagacacaaatatctatgcaaggaggctccactgagcctcgcggcccggcccggccccgggatgccccgcccggcctgcgggccgccccgcccgagcgcggatctgtgcactttggtgaagtgggggcccgcgccgccccctccccctccccaggttcttacaatcagtgactcggagatttggggccccagtgccactgccctcccccgccccgtccccgttgtgcgtcatgctgttttttaaaaacctgtttccaaatttgtatggaatggcaaactgttggggggtcggtttggggagggagggtttgcatgaaagacacacgcacaccacaccgcacgcacaagcaggcccggcgccggcgtccggggggcagaaggaggtgagctcgccggctcctcctccccgcggccattctgtcccctcctggggtgaggggtggggatggagacctgggggcagccccacccctgcccggactgtgcctcggtgggtgccacctggcgatttccggtgtctggagagagtattttttggtccaaggagtcctcttggctttagctggtgggtgggcggggagaggtctgagggctcctactggaggttcccccaaaaaggggcaaaaggagaccctctgcccaccggaggcaggggatcaggcatccaaatacacgatgcaaaaatgcaatcccacaggcgacacacccacacactcacccacacacacgcaattttaccttcctcttgtagcgaagatgaaactcccgtcggacacccgaagtgcattgcgtgtttctgttcagtttaatgacgattaataaatatttatgtaaatgagatgcaaagccggaaaaaaaaaaaaaaaaa

SEQ ID NO: 658 - DNA, 3971 bp, Homo sapiens
aaaactgcagcaagtcagaggctccggccagagagcaggagctgcccagaggcttgtggtcctgaaagctcctctccggggagctaaccagggagaggaggtactgaagagcgactaaactggctgcagcggagagatcagcccgaaggcgtccttgaggagcatacggaactccaaggaaggagtagaataaggagcaggcagagaaaccagacccggtggaatctctaagaggtaacaaccgggtttgacatggatcgctgaaagcgtctcttctaccatctggatggtcagggagacttggcttctctgactgtcctctaagacgcagattcacagagttcactccaggaacggccagtgaccgagagtctggaaatgtcaaaaacttttgtaaaatccaaggagatgggagagctagtcaacacaccatcctggatggataaaggtctgggctcccaaaatgaggtgaaggaggaagagagcagaccaggtacttatgggatgctcagcagcttaactgaagagcatgacagtattgaggaagaagaagaagaggaagaagatggggagaaacctaagagaaggggtcccaagaaaaagaagatgaccaaagctcgccttgagagattcagggctcgaagagtcaaggctaatgccagagaacggacccggatgcatggcctgaatgacgccctggataacctgaggcgagtcatgccatgctactctaaaacccaaaaactttccaagatagagactcttagactggccaggaactatatttgggctttatctgaagtcctggagactggccagacacctgaagggaaaggctttgtggagatgctgtgtaaagggctctctcagcccacaagcaacctggtggctggatgtctccaactgggccctcagtctgtcctcctggagaagcacgaggataaatctcctatttgtgactctgccatctctgtccacaacttcaactatcagtctccggggcttcctagccctccttatggtcatatggaaacacatctccttcatctcaagccccaagtattcaagagtttgggagaatcgtcctttgggagccatctgcctgactgcagtacacccccttatgagggcccactcactccacccctgagcatcagtgggaacttctccttgaagcaagatgggtctcctgacctagaaaaatcctacagcttcatgccacattacccttcttcaagtctaagctcagggcatgtgcattcaactccttttcaggctggtaccccccgttatgatgttcctatagacatgtcctatgattcctacccccatcatggtattgggacccaactcaatacagtcttcactgagtgaggcagttaagttcaatgtttcagagaatgacgtggagacattttccataattcaagtggttgagctaaagattcaatgaccttaaaggatccctatggatatatatcaaacaatagttcaagtccatttaggctttccttcacctatcacctcttttctcatcaccttctcacattgcattgatttctttatagagtcctcaagtgaaaatatttgatgatttaacaaccatgtgaaaatagaacagaagacctgggccctattccagtggtgccaaaaactcattgcataatctgtgccaattaattttccatttctggcctttgtttatttactagcaattgtaaataaacaaattgtatttatatgaggcaactattctaagtccagatgatttctaaagtccttcacagttctgaaatgctataactgtggtgatcactcttgacaatttcttgaaactgaaagaatagagaaataataggaaagggatgctatgcatagaatgatcaaattgaattatcagagggatcacaaggtacatgtctcttggctcacagaatgcaaagcttgtttggatttaatgataggacctctttgtatctattgaaaaatagcttctggaagctaaaagtctaacatggctgtcactgtgaagaacaaaacatgttcgttaagagactaactctatttgttattagactaaaagttgaacatatcttccttatgatttgaagaaccataatagagaaccataatagaggcctcatgccaactttattcttgataatatttcaaaaccatttttctcagtactagaggtagggcaaacaagtcactgaagcctcagactcctataactaatgggacatagagaagtcttttagaccatgacctccataaccagagggctctggaacttctgatgaagctcaggtgctgctgttagaatcagcacacaacacaggtttatattaaagagcaataaaatagctattggctataataactactatagttcagggactctctccagctcacagttgcccatgggaaaaaccaatggatttttttttaagcaagatgaatttcatttggttaaacgtgattaaaaccatccacctctgtccacaccaatatattttccagaagcacaagcaccaatcaatttattgatcaaggttaaatttttccaacatatatgtagttccttatctctccccctacactaattgttacctcttcctcacttctaagatagaatatgttattatatattgtaaataacatttcaggtgaccaaacttaaggatgcagaaatgaaatccaaggttggtgaatatttttaccaactatgtcttcatcacaggtttaacccaatttgcagagtgtttatttttctttatgtaactcctttttcctttatatcaatgctaacttcatcaaatttgtattttttttcagaaaatgggacctgagaaattttcctatcttgttcaatcagccaggacagttatttaagtcaaaccagagcctgaatggcttatttgatagtagattaggtcctgctcctgccagaaaggataagtttaacatgcagggtacatcaatagggccaatttaaaaaatgataacacatattagtatgtcattttctatagctcagctatcccctaaaatctgccaactatatgtgtatcttgtctgtttacctctcttatttattatctccatacagtataagttattttttttccattttgctctcagcacttaccctgctgtattttgcacccttggtttgtaaattcacttgaaagtagccttgcagagagatcttaagccccatcagtcaccaaagtggttcccttcatcacaatctgccctagaggaaataggcaagtaaaatgatatataaagccatactatgtgctttctgagtatatactgcacttacctttgtgagcggctgtaggagggtctatcctcgaagctagcattttctggcatttaagtttgtagataatcactgttgtttgagttatttattagatattatttatttaatttatttctctcttcctttcacgaaaattcctttagccccatagatgtgcttgcaaacccttcctaaaattttatttggaaagtagctcataattttgctaagaactgctgagttttggagtgaggggaaaggaaaaaatagagaattacctctgtgataatttttataaaaagcagcaataattcgaatggctatgcaagttaatgtttttagagtcttttcttcagtctaaaatgagccagagttattctttaataatctgctgtttatgcctttggggagtatggtacccatgagccaagcctccctgaaattgtacagagggattttataattgaattaaaatttaggaatgcaatagcttgtaaagagcctgctctccaacatagggtggtctcattcttctggagacttttttagataaagtaaaataattgtttaaatattttgtttaaaatatgactgtttttcctccctttttcctagcagaaataaagctgtaagtcttattagaaaaaaaaaaaaaaaa

SEQ ID NO: 659 - DNA, 2175 bp, Homo sapiens
tgaaatgctggtgcagatttttttcctatcagtctaaccttctgtgttgatgcatgaaggctggtacccacttacagggatgccagatgatcagtgcagaatgaaggtcccaagagagaggatcacatggctctctctgccctgtgacgtcactagcagatggcatgggtaccagctctggcagttggcatcaatgtcactttttagagatcaatgagatagtgcagatatacacagatctagagactccaggagacgatgcgacactcagcctgaaaagatttggaagacccaaaatgaaaactgattattgaatgaaattaaaacctaaggtaatttaagattagagaaccatgttaacactaccgtttgatgagtctgttgtaatgccagaatcccagatgtgcagaaagttttctagagaatgcgaggaccagaagcaaattaagaagccagaaagcttttccaaacagattgtccttcgaggaaagagcatcaaaagggcccctggagaagaaaccgagaaagaagaagaggaggaagacagggaagaggaagatgaaaatgggttgcctagaaggaggggtcttaggaaaaaaaagacaacaaagctgcgattggaaagggtcaagttcaggagacaggaagcgaacgcgcgcgagaggaacaggatgcacggcctcaacgacgctctggacaacttaagaaaagtggtcccctgttattctaaaacccagaaactgtccaaaatagagactttacgactggccaaaaactacatctgggcactttctgaaattctgagaatcggcaagagaccagatctgctcacattcgtccaaaacttatgcaaaggtctttcccagccaactacaaacttggtggcaggctgcttgcagctcaacgccaggagtttcctgatgggtcagggtggggaggctgcacaccacacaaggtcaccctactctaccttctacccaccctaccacagccctgagctcaccactcccccagggcatgggactcttgataattccaagtccatgaaaccctacaattattgcagtgcgtatgaatccttctatgaaagtacttcccctgagtgtgccagccctcagtttgaaggtcccttaagtcctcccccaattaactataatgggatattttccctgaagcaagaagaaaccttggactatggtaaaaattacaattacggcatgcattactgtgcagtgccacccaggggtccccttgggcagggtgccatgttcaggttgcccaccgacagccacttcccttacgacttacatctgcgcagccaatctctcacaatgcaagatgaattaaatgcagtttttcataattaatgaggaaaatgaaaataaacagtggtcattcacctcccctgtctaattaagacaaagcagatgcttgtgggctgagtaattggcacaactctatctaaggtgtttactagtttctgaagtgtgtttcaactattgtgagaattttctatgtaataataaatctcttttcgtatgagaacttcttttcctttccttttgtctgtgaagcactgtgattctgtttctactggaaagatttttttctttttaattttcttttaaacttatttaatttgtttgaacaaggtgtctaagaatatactgttgaataaagacatgcacacagcataattcaatgtctattttggttgtacagtaattataaaatgcatgttattaaaaccagatgagtaaaatgatgtgtttataattattaggaattatatattatgtatcttttaaaaattgaaattttaaaatatggagaatatcactaagctgacaatgatattgggagatgaatttgcaacaatataaaaagctatgcaattttctttttattaaggatgaatctaaatgcattcaattggtaactattcctcttcaagtatttgcagatggggcaacatgatatttgggtagctgatgtcataattcggggacaattatctcaatcatcaagaaaaaaatttcagcacttgttttgtattattcagaaattaactgtacaggtttgttatcacaatgtataattgtgtttttccaccccacatttttaaggcaattaaatatagatatttccactcgtaaaaaaaaaaaaaaaaaaaaa

SEQ ID NO: 660 - DNA, 1717 bp, Homo sapiens
cacacgagctgatctgatcgccggcgacatcactcaggagaccggccgggcgcgtggcccctgcaggcgaggcgaggaggccaggccaagttctccgtgcgcccctgcacccttccaggctctcgcacccgcaactggcacagagtaacaaccccaggctgttgggaacgtaagtgcgccctggcggctctgccctcagtccgggctgcagcgctctgagcgcctttctatctgtccgtcggtcctgcacagcgcaacgatgccagcccgccttgagacctgcatctccgacctcgactgcgccagcagcagcggcagtgacctatccggcttcctcaccgacgaggaagactgtgccagactccaacaggcagcctccgcttcggggccgcccgcgccggcccgcaggggcgcgcccaatatctcccgggcgtctgaggttccaggggcacaggacgacgagcaggagaggcggcggcgccgcggccggacgcgggtccgctccgaggcgctgctgcactcgctgcgcaggagccggcgcgtcaaggccaacgatcgcgagcgcaaccgcatgcacaacttgaacgcggccctggacgcactgcgcagcgtgctgccctcgttccccgacgacaccaagctcaccaaaatcgagacgctgcgcttcgcctacaactacatctgggctctggccgagacactgcgcctggcggatcaagggctgcccggaggcggtgcccgggagcgcctcctgccgccgcagtgcgtcccctgcctgcccggtcccccaagccccgccagcgacgcggagtcctggggctcaggtgccgccgccgcctccccgctctctgaccccagtagcccagccgcctccgaagacttcacctaccgccccggcgaccctgttttctccttcccaagcctgcccaaagacttgctccacacaacgccctgtttcattccttaccactaggccctttgtagacactgttactttccccctcccctagtcagcaggcaatagatggggccccagctgccgcctcgggaccccctctccaggcggagggaggaagcgggagctttaaagcagtcggggatacctgagccgcttgttaggtcgccgcaccctcgcggcggatgtctcttggtctgtttctccggccctcagcccagcgcccctcctgcccgcccctagacggcctttccttttgcactttctgaactccacaaaacctcctttgtgactggctcagaactgaccccagccaccacttcagtgtgatttagaaaagggacagatcagcccctgaagacgaggtgaaaagtcaattttacaatttgtagaactctaatgaagaaaaacgagcatgaaaattcggtttgagccggctgacaatacaatgaaaaggcttaaaaagcagagacaaggagtgggcttcatgcattatggatcccgacccccaccactgcagactcgctctaggaagaactggagactcttgcttagctattcaggcacagggctggagagtactttaatttattcaagatgcttcattcatatgaaaatgtatttttgtacataaagagtttattctattatgagctatcaaagtttacatttttgtactgcagacgcttcatgtaaataaaaactaaaaataaaaaaaaaaaaaaaaaaaaaaaaaaaaaaaaaaaaaaaaaaaaaaaaaaa

SEQ ID NO: 661 - DNA, 6123 bp, Homo sapiens
ggcctcccccgccttggcggccctgaccccgctgtcatccagcgccgacgaagaagaggaggaggagccgggcgcgtcaggcggggcgcgtcggcagcgcggggctgaggccgggcagggggcgcggggcggcgtggctgcgggtgcggagggctgccggcccgcacggctgctgggtctggtacacgattgcaaacggcgcccttcccgggcgcgggccgtctcccgaggcgccaagacggccgagacggtgcagcgcatcaagaagacccgtagactgaaggccaacaaccgcgagcgaaaccgcatgcacaacctcaacgcggcactggacgcgctgcgcgaggtgctccccacgttccccgaggacgccaagctcaccaagatcgagaccctgcgcttcgcccacaactacatctgggcactcaccgagaccctgcgcctggcggatcactgcgggggcggcggcgggggcctgccgggggcgctcttctccgaggcagtgttgctgagcccgggaggagccagcgccgccctgagcagcagcggagacagcccctcgcccgcctccacgtggagttgcaccaacagccccgcgccgtcctcctccgtgtcctccaattccacctccccctacagctgcactttatcgcccgccagcccggccgggtcagacatggactattggcagcccccacctcccgacaagcaccgctatgcacctcacctccccatagccagggattgtatctagagctgccatttctgctacccacgccaggccttagtgggttccctttcctgtccccagtcgagccctcctcccttcccctgcccctcctttccacgccctggaaaccatctcacttcacagggcaggtgtagcctttctgattcctcggttgtttcttgcatttcttggctttgggtatccttcattcagacgggctctgatttactgaaggtgtgatggagcttattgtcaaagccaagggtggcgttttgggggcgcttcttgagacgaaaaagaccctgggaagagatgatggtggcatatctaaagagtttgcagagcggactgacgctcctcccctttctctttaacgccgaaggacttggtgcagttcgtgtgaatctcacagggggaatgcaactggttcctgtgatctcttcacctttgcttctacatagagatgttaatgtcgagtagaaagaaatgtatcttagcatctgaatgattttgctggtaataatattatccacagatttgcaatggctggcatctgctttattcccattgctgtctgcaggctgtgggaatttcacctgtcaaaccaaacttccctctctgatgtgcactttgttctgtttcccagattcgtcacaatgcctattgtcctgtccttctctttcctttttcttccccattttgccatctgtctcttatgatttataaggggaaaaaaacttgttttgttagaggggcaggttagaagtcattgtataatttgtaggctttgtaatgattgaatgcaagcgtggaaatttaggctgaactctctatcaaaaggaaaaatgtggaggaaaagggaaaaatcaggagggaggattgcctcatgtattatttatttcgaccttttaggggagaaggaactcccccattctttcaagagattaaaaataaatcaacagtctgaaaacctaagcagacacggagcattatccggatcagccacacacgtgttcccttctatttattataaagaaatttttcatgggaaaatatgtattttttgtatattctacagagtttattctagtatgtatttacatcttgaagaacaagaaagttgttcttgtgattaaactataaataaactatctaattttcataagtttgtgtgttgtattctacctttttcttgcttatgtgatttttagatgccaaatgagttgtgtttttttgaaattcttcccatgtcaaattgaatatagtacttgtatttttgggcaatgctttgtgtagaatatcactaagaaatcacaaaaagctgaatcatatttgagacactaatattgaaaataagagtgtaactttctatttttaagataaacacacaatttatttctaagaataaatttctgagcaaacaagataagcaaaaaaggggagaagaatttaaatgataattaagtcatgataagctccaagttcagaaaaccttgatttgaaaaaaagtgaagttgaaatttcttggtggagtgtgtagaaatttgttttttgtgcaactcgtttggcttcaattctcatctgtaaactgaagggattggacatgacctccaagggtgctccctttccagctctaacatctgtgatgtaacagtacgtataaattcattattagaagcagatttcctattaggcattttaacaagctagttgcttttaaaagcagactcccagaataaagcagatatttagagtgaactggaattgaaaatatatacagaaatagctccgctttcccaatatttgttaaagcaattacatagtcaaaacttcttcaaagagaaagcaaaaatggtttaacttgcacctcaatctccaaagcagaaatgaatgacctttgattggctttgggtcaaaaatgaccaaatgaaggttgaccacattctatgcttaatccccttggggaagagtgtctatgacaacacaagctaaaaaatatcacattaaaacttggtcgttcacagcacccacctccccacgaatgtcttacctgcatctggttgggctaaaactccactcttctgcacaatgcaataataatttctcctgaggtgtctatctgaaaccactcctctctaataactccattttaatcaaaggaagaactaactcagggtttttgtttcattttttatagccaagcatgagataccttttggtaaatcccttttaatttaaagattgtgttactcttagctgctctttgattatctgacatggggagaaagtgatatttctcttatattcacatttatgtttctaatgtttaaaaagccaagccagcaagcaaaggaattgtaatatgatagtttgaaaacatcagttttggtgctgaacaatgcttcttctggtgatacatttgatgatacatggtgcttcttttggaaacttgccaaagaaatagttcatgacaaaatctcagatgcagctactcctccaactatgggaaaccttctcaattggtgaagccatcccataaaaagatgaccctaatggctaaggtggagaggcagggatggatagatgattcaataatcctagctctgagcaagactaatacagctaatacagacttcactcttgacctagcggactctacacacttcttccaggtccagagtcttgttcaagttctcaaagctggagcttgcaggtccccattacacacaagcagatatatcctaagtgcccgggctttcatctgccatttgcaattcacactcaggctttcccttccccatctagaacacaccttattttacactaaattggcgcaattattttttatggcatctaatcatcttaagcgggtaagaatggtgttctgactgcctcagcgccgagattctctcccctaatccgttgcaaccttcacagccggtggcctgaggcccagtcgttctcttcccttcctagtaggaatgagtacaattagagggtcaaagccgctgcttctgcagtaggcaacaaggtagtatttccattttattcatttccctcccgacattgtgaccgcgctgtgatgagctgcatctgtgtgcaccaagtaggtttgcaggcctcggagccacgccattttatttctggtggctctggtgagagacacttcaaacaacgctgtggagattttcttccggtgacagacacagactctcagtgttgctagatctttccaacgccagctagcgcgctgcggcgcgttttcctaagtgcggagaggcgcgaaggtgggtcctgttctcattggagcgtcgctttagcgcggccggcgttccgggactggctgtatttatttgttctaaagtgctcaggccttgttacggctcatttttccttcactagattttaaatacatccatctgagtgccaagaaggaggaaaaaaaaagtagagaggcggactgccaaccgctgggcccgccacgggagccggacctaggctcagccggaggcaggaggaggggctgaggcttcccgggcccgcagcacctggaccagagccggatgggcgctcctggtgtcccagctgaggcgaaggccctgggcggctttggccaggagggaggaaggacccattcggcacttcccaaagcctagtccgatggcccaggaagggcgtttagacccaaggccggcttcagctgcccacccgccagtctgggtcacaggctgctaaagggccgggcttgagggcgaggctgggagctgcggcgcccccacccgctgggtacacccccctgcattgcacacccttgagctggttgtgacttctgggcaccgacacctggaaccggttaaaagcgcctcctcctcaccgccagcctcggtcttccccgagccccctcgggctcccaagcgagctttgaatgtattaattaaataaagcgggcagctcttgaatcgcgccaatgcagtgcgctcccgggagcgtgaaagtcccggcctccgaatctgcaaaagaaatgtgtgaaaagagaattagtgaaattaggttagaccaataaaacgtgagggctccaatacccccctttctcgctcccccagcctggggctagaagggctatctggtctgatctattgtttcctgccctggcagggggttcattgtgtgataaataattccccctccattttcttttattcttaaaaaaaatgggtatttgcataatcagtgctttgatgtggccagaaatcggaggtttggtctccccaagtctgctattggtagcgaagcaacaaagctagatccagatctttcacttcgctgacagtgtgtggggcagattgtcagaaatagcagcgttaagctgctgccttcttttttaaggaccactttaatgattaaacttaaggaatgtccaaaaaaggagggatgaaagaccagctttctcatcactccacggacacaccccgccccccgcccccccccccatgcttcttattattctctgcagtttcttttccaaagcgcttggtttgggggatggtgcatctcccttggggccgccccacgtggcaccgagtgggcatcggcaggggtcccctagggccaaggaggggccaggtctgcaggagcggttctccttgcccccaacgcgtttttccttccccagtttgatttttccagccgggatggggttcatcttatggaggacgttgaagtgagtcgctctttagtccccgagtggaatgagtgggggttggggggttccctgggaacgcagcttggaggcagtttcagatggtccccgacaggagaggcgagcaaagaaattcagtcatccggaaagcagaacgcgaaagccagtgtggccggacctattatttccctgcaaggtggcgtgagtcgggaggatggaatggggaagaatcctgatggtgtgtgcgttacaacaaacgacttttttccccctctcggtgccagggtcgggggaggggagacaggggtggttctgtctgctttcgctagcattctctgcttctccagctgctcagagcgcgaagggggaaatgccaacttggattactgactgagaacaccgcgtgaaaggccaggcctccctgattacccgggcaggcgccggcttcgcgctccagcctggagaggtgtcaaccgcgtgagagatgctcggcctcccgggatccaaattggagatggaatcagagatggaagggggaaaggaggaggatccttgaaacacctgcacgcccacggtcccactccttctcctcctcggccccgcatctcaccgaactgaccccaggccattcttcagatgtcccagcagcttttggatcgcagagcttcagcggtagttagctcatcgtgaattc

SEQ ID NO: 662 - DNA, 1167 bp, Homo sapiens
cctcggaccccattctctcttcttttctcctttggggctggggcaactcccaggcgggggcgcctgcagctcagctgaacttggcgaccagaagcccgctgagctccccacggccctcgctgctcatcgctctctattcttttgcgccggtagaaaggatgacgcctcaaccctcgggtgcgcccactgtccaagtgacccgtgagacggagcggtccttccccagagcctcggaagacgaagtgacctgccccacgtccgccccgcccagccccactcgcacacgggggaactgcgcagaggcggaagagggaggctgccgaggggccccgaggaagctccgggcacggcgcgggggacgcagccggcctaagagcgagttggcactgagcaagcagcgacggagtcggcgaaagaaggccaacgaccgcgagcgcaatcgaatgcacaacctcaactcggcactggacgccctgcgcggtgtcctgcccaccttcccagacgacgcgaagctcaccaagatcgagacgctgcgcttcgcccacaactacatctgggcgctgactcaaacgctgcgcatagcggaccacagcttgtacgcgctggagccgccggcgccgcactgcggggagctgggcagcccaggcggttcccccggggactgggggtccctctactccccagtctcccaggctggcagcctgagtcccgccgcgtcgctggaggagcgacccgggctgctgggggccaccttttccgcctgcttgagcccaggcagtctggctttctcagattttctgtgaaaggacctgtctgtcgctgggctgtgggtgctaagggtaagggagagggagggagccgggagccgtagagggtggccgacggcggcggccctcaaaagcacttgttccttctgcttctccctggctgacccctggccggcccaggcctccacgggggcggcaggctgggttcattccccggccctccgagccgcgccaacgcacgcaacccttgctgctgcccgcgcgaagtgggcattgcaaagtgcgctcattttaggcctcctctctgccaccaccccataatctcattcaaagaatactagaatggtagcactacccggccggagccgcccaccgtcttgggtcgccctaccctcactca

SEQ ID NO: 663 - DNA, 14123 bp, Homo sapiens
tgcaacggaaacttttggctccacgaacagaaaagcaagagcaaaaactcagttaaatgcgttcttcctccatctttgcctagtccaaaaggaaaaaaaaagaaacagaaaaaagaaaaactgtttggaagagtagcgttgaggtttgctttttacctgtttttcctctagaacagccaggtggattcacatgatccaattttttaattgtcttctatgtcccactccgaataacccggatgccccagcacaatcagagagatcgttttttttaaaaaaaatttcagcctccaaaggtaggaggggagtgttaggggagaaagtactttaattaaaaatcaataactcgaggtttttgggatacggtttgccatttcctaattaagaaatgggtttgacagtccctttgtacacactgctatgcaaaccccaaagggttggcggctgtccgggcgatgacactccggtcccctgcgagaccccgggccagccaggcccgtccgccgccggcctctggggtccgtccccggctcgcgcagacctctcgcttctctcggctctgtctcctgcgctcagctctgctcggggccggccgcctcaggctcgccgccaccaggtcgttgcaaataccttttccctccccggggccccagcgcgcggccacctcccagcctccccccctcccaccctggcagcggggccctttcccggctcaggaacagcagcagcccgggccgcgccggcaggaagcgaggcccatgttgctgctgttccctggcgcgcctccccgccctccgggggccgccacggctcttccgcgctcccgggcacccccctccgcgcctgcgctgtgccccacgggggcggggctcagattcctgtcagcggcggcggcggtggcggcgaccgtcagttttcgctgaggagaaacacgaaacggaccctttggctctcccccttccccttccccgtcctgaacccctctcctggtcaccgagaatcagtccccgtggagttccccctccacctcgccatcgtttcctcggtcctcggcccagtggaagtcactaccctcgaggaggaggcagcggcagccgccctcgcgtcgccgcccccggttcggtgcccgcggtcccggagaggaggtgccgccgccaccgccgctccccccctcccgctgccctcgggccgggctgggtcgagctgcgatgccctcggacttcatctcattgctcagcgcggacctagacctggaatcgcccaagtccctctactcgcgagaatctgtctatgatcttctcccaaaggagttacagttacctccatctagagaaacatctgtagcatcaatgagtcagacaagcggtggtgaggcaggctcgcctcctccagctgttgttgctgctgatgcttcttcagctccctcctcttcctccatgggcggtgcttgcagctcctttaccacctcttccagccctaccatttattctacctcagtcaccgacagcaaggctatgcaagtggagagctgctcctcagccgtgggggtaagtaacagaggggtaagtgaaaagcagttaaccagtaacacagttcagcagcatccatcaacaccgaagaggcacacagtcttgtacatctcaccaccacctgaggacttgctggataacagtcggatgtcctgccaggatgaggggtgtggattggaatctgagcagagctgcagtatgtggatggaggattccccctccaacttcagtaacatgagcaccagttcctacaatgataacactgaggtacctcgtaaatcacgaaaacgaaatccaaagcagaggccgggggtcaaacgacgagattgtgaagaatctaatatggatatatttgatgccgacagtgccaaagcacctcactatgtgctttctcagcttaccacggacaacaaaggcaactcaaaagcgggaaatggaacattggaaaaccaaaaaggaactggagtaaagaagagccctatgttgtgtggacaatatcctgttaaaagtgagggaaaggagctgaagatagttgtacaacctgagacacagcaccgagctcggtacctgactgagggcagccgtggctcagtgaaagatagaacacagcaaggctttcctacagtaaagctggaaggccataatgaacctgtagtgttgcaagtgtttgtgggcaacgactctggacgagtgaaaccacatggattttatcaggcctgcagagtaactggacgaaatacaactccttgcaaagaagtggacattgaaggcactactgttatagaagtcggccttgatcctagcaacaacatgacactggcggtggactgcgtagggatattgaaattgaggaatgctgatgtcgaagccagaataggaattgctggttccaagaagaaaagcactcgtgccagattggtttttcgagttaatatcatgaggaaagatggctccactttgacactgcaaacaccctcttctccaattttgtgtactcagccagcaggagtgccagaaatcttaaagaaaagcttgcatagctgttcagtgaaaggagaagaagaagtgtttttaatcggcaagaactttctgaaaggaactaaagttattttccaagaaaatgtttctgatgaaaactcttggaagtcagaagctgaaattgatatggaactatttcatcagaatcatcttattgtgaaggttcctccctatcatgaccaacatataactttgcctgtgtcagtgggaatatatgtagtgacaaatgctggaagatctcatgatgttcaaccattcacttacactccagacccagcagcagctggtgctttgaatgtaaatgtgaagaaggaaatatctagtccagcaagaccttgctcttttgaagaggccatgaaagcaatgaaaactactggatgtaatttagataaggtaaatattatccctaatgccctgatgactccactcataccaagcagtatgattaagagtgaagatgttactccaatggaagtaacagcagaaaaaagatcttccactatttttaagactacaaagtctgttggatcaactcagcaaacattagaaaacatctcaaacatagcaggaaatggctctttttcatcaccatcatcttcccacctaccttctgaaaatgaaaaacagcagcagattcagcccaaggcatacaacccagagaccctgacaactattcaaacccaggacatctcacagcctggtacttttccagcagtttctgcttctagtcagctgcccaacagcgatgcactattgcagcaggctacacagtttcagacaagagaaactcagtctagagagatattacagtcagatggtacagtggttaatttgtcacaactgactgaggcatcacaacaacagcagcagtcaccactacaagaacaagcacagactttacagcagcagatttcatcaaatatttttccatcaccaaatagtgtgagtcagcttcagaatactattcagcagctgcaagcagggagtttcacaggcagtactgctagtggcagcagtggaagtgttgacttggtccaacaagttttagaggcacagcagcagttatcttcagttttattttctgctccagatggtaatgagaatgttcaagagcagcttagtgcagatatttttcaacaagtcagtcaaattcagagtggtgtaagccctggaatgttttcctcaacagagccaacagtccataccagaccagataatttattacctggaagagctgaaagtgttcatccacagtctgaaaacacgttatctaatcaacagcagcagcagcagcagcaacagcaagtgatggaatcttcagccgcaatggtgatggagatgcaacagagtatctgccaggcagctgcccagattcagtcagagttattcccttcaactgcttcagcaaatggaaaccttcagcaatcgccagtttaccagcagacttctcacatgatgagtgcattgtctaccaatgaggatatgcaaatgcagtgtgaattgttttcttctcctcctgcagtttctggaaatgaaacttctacaactaccacacagcaggttgcaacccctggcactaccatgtttcagacatcaagttcaggagatggagaagaaactggaacacaagcaaaacagattcagaacagtgtctttcagaccatggtccaaatgcaacatagtggggacaatcaacctcaagttaaccttttttcatccacaaaaagtatgatgagtgttcagaatagtggtacccaacaacaaggtaatggtttattccagcaagggaatgagatgatgtcacttcaatctggaaattttttgcagcagtcttctcattcacaggcccaactttttcatcctcaaaatcctattgccgatgctcagaacctttcccaggaaactcaaggttctctctttcatagtccaaatcctattgtccacagtcagacttctacaacctcctctgaacaaatgcagcctccaatgtttcactctcaaagtaccattgctgtgttacagggctcttcagttcctcaagaccagcagtcaaccaacatatttctttcccagagtcccatgaataatcttcagactaacacagtagcccaagaagcattttttgcagcaccgaactcaatttctccacttcagtcaacatcaaacagtgaacaacaagctgctttccaacagcaagctccaatatcacacatccagactcctatgctttcccaagaacaggcacaacccccgcagcagggtttatttcagcctcaggtggccctgggctcccttccacctaatccaatgcctcaaagccaacaaggaaccatgttccagtcacagcactcaatagttgccatgcagagtaactctccatcccaggaacagcagcagcagcagcaacagcagcagcaacagcagcagcaacaacaacagagcattttattcagtaatcagaataccatggctacaatggcgtctccaaagcaaccaccaccaaacatgatattcaacccaaatcaaaatccaatggctaatcaggagcaacagaaccagtcaatttttcaccaacaaagtaacatggccccaatgaatcaagagcaacagcccatgcaatttcagagtcagtccacagtttcctcacttcagaacccaggtcctacccagtcggaatcatcacagacccccttgttccatagctctcctcagattcagttggtacaagggtcacctagttctcaagagcagcaagtaactctcttcttatctccagcatccatgtctgccttgcagaccagtataaatcaacaagatatgcaacagtctcctctttattcccctcagaacaacatgcctggaattcaaggagccacatcttcgcctcaaccacaggctactttatttcacaacacagcaggaggcacaatgaaccaactgcagaattctcctggctcatctcagcagacatcaggaatgttcttatttggcattcaaaataactgtagtcagcttttaacctctggaccagctacattgcctgatcagttgatggccataagtcagccaggccaaccacaaaacgagggccagccacctgtgacaacacttctttctcagcaaatgccagagaattctccactggcatcctctataaacaccaaccagaacatcgaaaagattgatttgcttgtttcattgcaaaaccaagggaacaacttgactggctccttttaactggatataaattccacgaagaaaatcctgattccaagatgtcctgagatcttgtggttccatgagaattattactttaaaaacaaaacaaaatataaaaaactgtgtttgagtaaactgatagattttactctgactgcaaaagagcacacctatgctgcttgttgcagtaactaaccaccaatgttaacatcttcatattttatattcctaataacagtgatgactgagaatctatttgagtttccagctggcagaattaattgttattattttcctaggcgcaatttccttaaacgtacagtttaaattcaaggctggaccactcagttattattgctattagaaaataatatatcatgtttacttttgttcttcattattttctttcctgcattgttttagtcaagtaatggcttttgaaaaagtaaagttcaataataactaaggctgtgatttttttcaatataaaaggcacagctgttggccaaagtgaaggaatcttttttcagttttattggagaaactgaagggtaacattctaacaagtaaactgtatgtgcagataaaagtactcttgatttaacacaaaggcagatgatacacttataaaactgggaacagctggaatgcttcttgattttattttttcagagagttgttagttctctgggtttctactaaggggtttagccataactgtgcatagaaaaataattatctgtaaaaaatgaaggggataatatatgataaattatgttctgatatcctcctacagtagtttaaattgacagaaaaatttgaatgttttcttcttaacccagtcttaggctggtattccctttttatatatatctatattacttttcacctctttttcactttactttagagaactattaatatactactggcttcatgaccctgtagcatctttggccactttaatctagggtgacctagcaatcctgcagcacagggcagagagtactgtcttaggaattattaggagttgattcctgagaaacaacacatttttccccatgaacggtgctgttctgaagtcttcaaatttttccctctaataggaaacagtataaattttaattaaaaaaaaaaggcaaactaaaatttcttgaaatatcacttctccctgatctgcagtgagtataaattcacttgtcacctcagtgctttacagtttgaagtggtcacttacctgatggttcccacaagccttaggctttacagggttgtatcattgacttaaaatgaagaattaacttgtgttacatctataaagagcaaaataacacactccagaacttggcagttgtagcattagttatacagttttgggtgttcttgccacccgtgggatgcctgcttctcactaccacctgtgtctggacacatgcttatgtctcattttccttttggcatgtggaaagctgtcaatgcagtgtaaggccaacgtgtgtgtggcttctatgtgttgagataatgttttggtatccttgtccgtttcatttattttttaagtgtacaaaaaataacctgttaattgttgaaggctacttttctgttctttttttttttttttttctatcctgtacatttagttgaactgtgcggaattgtggtgttggttttgtttacacagccagatttttccttctttttgttttgtgatgatcttcctttgttctttgaatgtgctcttttgtctttttctcttttttctcatgttttcttccctccacctccacccctttctttctttctctctctgattgagaggcattgaattacgttttcagtagtacaggcttcttgccgatatgaagggaacttttcagaaagagacctactctgggtcatttaattttgaatacagttttcaatcgttcaagttttggatggtttatatctaatgtgtgtttcatttttttggaaagctatattttgtatttaggaaatggtatactattttgctatttgtactgagtgagtacattggcataaatatagaaatttatatatatacatatatataaactattcttttttgccacacatttttgtggtaaatttgtgagtttgtctgatgttctaccacaacgtggcgtctgataacagtgagggggggtggggtttgttatgtctttattgagtatttaagtatcttttgaaacaaatgacctgttcatctgtggccattccatcaggcagttagttccttgatgtcagtagtgggctaaaggcagcttactgtgtgtttgctggagctttcactcagccaagtgttagagtcaggaaacccattgaggcaatggcgtcaaatggtgtttcacaagaatgagccattcagtctttgctcactatatatttaatattttattattgttgttattgttattattaattggctttctgtattctatgccttttatttataaagacactaagaaaacccatgtttgtaattttaataacatttttcccatcttgtaatatccagagctactttataaattctctgaaccaaaagtattttcctcagtgtatctcttctcccccagcccctattgggaaaaattacccagtatagttcaggttatgaggaggatcagccacacaatccagtgcttcagtttgaaaatgtaaaattctaaccctaaagtagggttggttgaaatttcagacaaagcaaacccagcaggtataaaaagtagtataaatacaaatctgtaagttatttttgaattttctgaacttttttctaagagattacataggagactaaagaaatctatctgttcaagttctaattaggatgattgttaatactgcactgtggatgaagtggcgactggcttgtgtgctgacttctgtggtttagcaagaggtttattgttatcaaatgctaattggcaatgccaagtcactgggaccaattttctgttttataatatctaagtttagaacagaatatatacctgaactgtagtggtttgatcggatggagacagaaaacccgatttttattctcataaattttgtggttatttatacaagggctgtgctatgctaccatattcttgttcaataataataggtttgttgttttttttacattgttaaatgttccttacccctaaaggtcaatgttaagtacaacattctgaaaatacaatttggctacgaagagtattcatcttctttgaagctcagtggttgatatttgtgctaataatgcaatttcctgattactgttacaagttatagctacatatgggagagactcagtgagccagcaaaggccatagaaacaacaatttattaaatgtatttatggcagaaggacctaaataaactgtgagccaccttttcttctttatattgttacatttaagtgttcttgctttcagcaactcacattaatgcttggagcttatctctttctctctctctctctctctctctgtgtgtgtgtgtgtatgtgtgtgtgtgtgtgtgtgtgtttccttattgtcattccattatatatccacaccaacatgggtgacgataattcaaagtcatattttgcctctaagcttgatcatgttacctttatgattaaagtatcatgttatttagccaatgcaaatctgttttaaaacaaatagtttaaaaaaagaacaagtttttaagggctttattatagaagaagtattaatgaaggactttccttcctccctccctttcctcccctccctgcctcccttcttcccttccatctccccctcctccctgccttctttgtttctccttcccttattcctccctccctcctttctcccttccttcctttcttccattcatccttccttgccttttatttttattttttgtaatatcacatgtgctgtagtttggaattttattctagtgcatttcttgctcatcagaacctcagctaatctacctaggaaaaatagtatcaaaggaaatgagaaagttgtatctgagtccctccagaactaagataattctttttgaccatttaagcctttataaatgcgttttgaccatttaagcctttataaatgcttgttttaggaaagtgaatctgttagatgcatcaacaaataatgaccaggacaaaacgatttaataattaaagtctcaaatcaccatggttatacattttcaccagaaatagtaatcttacaatttttcatttttctgatgaagatttctgttccaatatctgtttcctaatagattttttaaattaattagctttcctctgctttatgaccacaggttttatccctaaccgagacagctgtcttatatctgcatgccttagactgtgtggagggactccatgaagaaagaccataggttagaaaaataactcatagtatataccctagtaagtgggttagtagaatctcataacatgtattaaaaagaggttttcttctctgcttgtttgtgtcactagagcaaaattgtagagataatgctcataatgcagtaaatatcagaataatatctacaatatcatttgtggatggtcccaggtcccagtgctctagttactttacttctttttttttttttgagatggagtcttgctctgtctctcaggctagagcagtgtgcgatctcagctcactgcagcctccacctcccaggttcaagcgattctcctgcctcagcctcccaagtagccaggattacaggcaccctccactaggcccggctaattttttttgtatttttttagtagagatggggttttgccatgttggccaggctggtttcgaactcctaacctccagtgatccacctgcctcggcgtcccaaagtgctaggattacaggcatgagccaccacatccggcctaattacttctttaatccccatttatttttatgccattctagcctcatttattaataaaattatgtttttactttctctttcaggaaattttttaaattaatattttatatctagatctaatgctatggaaaagtgcctttttatcatttataatttcatttttcactatttccaaaaacacataaacaaatagtttcagtaggtcccagcttttactttttccatttaaaccttcttttctccatttcttccctttggcttaagaataaaagaaaaggtacattgctagaattgtttctttgggagagggtaaaagattacagaattagactgttcagcctttatataaactaaatttgtcttcatctcaaccagctaatggtaggtcttatctgaatactcatgagaattttagcatctgtgaaactccatgcaccagatgtgtgtaaatttcaggaagaaagtgttgaaagcattttctctgatgttaattagatggaaataaatcactaaaacatagtttaggtaaagcctgattatgccacttttttttaactagacagggcaaagttgtttatgttagtgtacttcttgtctatcctcagttaatttacctagacaaaaagtgtcaaaggaaatgagaaaaaggttatatctgactccctccagacctaagataattccttttgatcagatacagtcagatggagtgccttggtttttgttaattttgcctctattccagctccttaccacagcggtggtgcttaaagaaaggatcatcagcaacaggtcaggatagttctacctttgggatagggctgctttccccgtgctagtatttctgtgactgttagtggcactgaggactgcaaacttttatgcaatattcttaataccctattgatattatgcactttaatcattccaaagaagccaagaatgctgtatagtgatgattccttcctaatgaattcatcttaactatttagaatgttatgtcccttttcttttggatagccaacttggtataaatgttatatggatttttctaaaatgactatataggacttaagactttgaaatgtaatttacttataaggggaaataattatgctttagcacatcattttagaaacgtcacattttagaaacattcagcttgctaacctacatgtttgggaattcattaaaaccagttgtctatatattttgtgccatgtatataagaacattacaatatatctttttctacatatgtagtatgtgcaaccagtggttctcagagtatggttctcagcccaccagctagtatcagtatcacctgggaactagttagaaatgtaaattctttggccccatcccagacatactgagtcagaaactctggaatagggcccccgcaatctgttttcacaagccctccaggtgattctgatgcacactttaaagtttaggaaccactgggctaagactctgttgagatatagagtttttcttccactcagactgatatagttatacattgttcttcatgtaaattcagcttaacctggttatctataatcttttattggcaaaagttaattctcagtactgcctatagagatacagtgtattttatgtacatacacaattagtctaattcttgataattcagttaatttagtttggcattttcctaccacttactaaaaggtttacattaaatgactgatttaaatatataggtgcaatgttctatgtttattttaattgttatgacatttaagtagctaatataattgaccggtgctaaagtctcctgtttatccataaaatgggtacattatgggcagtgtaatacaagctttcttttcattgcctagtactttaccagcagaccacagttttgccctggctagaccaaccctcagaacaaaatcatcattccttgtatttatatttgtatctgagatagtaaacaagatggctggccaggtcaacatggcaccttaacttatttttttaataggtaaaacttcttcaaaagtagcttgctttgtataagaactaagctatcagtatagatatagctatccttggagcttatgtttcagacaagaattatttactaaaataaataataaacaagataatgcattatacaatttgggcatttctcgtttctcaagtgtatgcatcatggtaaatataaactaaccacaagataggtagattgattcatttcattttaatctccttgtgtaattcagtacctccataattgttctaatcttcttcccactgtttacaaattaccagttaattaactcgtgaaagaaaaattcacatatcagaataaaaataaatgtatactcactttataaaaatcaccactgctgtctttccttaatactagcagtggaaatgtaagtggcttactctacaaattttggtgctggcaaatacataggcaaactgttgggagctgctctagttacattcctcccttcttattccctttttctcttcctcactttattgcataacatattcctgtacccaaagcattctaccacagttctatttgactcccacttgtaataactcctttaaaaaattccatgtttaaccatatgaccctgcttgcttactcatattctccctccctctccccttcctttctctctcttccagaagtcatttgcctggtttgaaatattttgtagggattgcttattatattattttagctgatgaacctcaggacaacgtctacacacacacacatacatacacgcacacaaaatctcagctgttgaagagtgggcttggaatcagacttctgtgtccagtaaaaaactcctgcactgaagtcattgtgacttgagtagttacagactgattccagtgaacttgatctaatttcttttgatctaatgaatgtgtctgcttaccttgtttccttttaattgataagctccaagtagttgctaattttttgacaactttaaatgagtttcattcacttcttttacttaatgttttaagtatagtaccaataatttcattaacctgttctcaagtggtttagctaccattctgccatttttaatttttatttaattttatttgcttgagcacactgatcaaccactgaactgccttcttccattgtcctgcaatgatataagggttacatttttgtgtatatggctttcatagttgggatttcagagcactgataccagatattttcagtttgttctctgggggaatttcatttgcatctatgtttttagctatctgtgataacttgttaaatattaaaaagatattttgcttctattggaacatttgtatactcgcaactatatttctgtaaacagctgcagtcaaaaataaaacactgaaagttaaaaaaaaaaaaaaaaaaaa

SEQ ID NO: 664 - DNA, 4762 bp, Homo sapiens
ggcgggcgctcggcgactcgtccccggggccccgcgcgggcccgggcagcaggggcgtgatgtcacggcagggagggggcgcgggagccgccgggccggcggggaggcgggggaggtgttttccagctttaaaaaggcaggaggcagagcgcggccctgcgtcagagcgagactcagaggctccgaactcgccggcggagtcgccgcgccagatcccagcagcagggcgcgggcaccggggcgcgggcagggctcggagccaccgcgcaggtcctagggccgcggccgggccccgccacgcgcgcacacgcccctcgatgactttcctccggggcgcgcggcgctgagcccggggcgagggctgtcttcccggagacccgaccccggcagcgcggggcggccgcttctcctgtgcctccgcccgccgctccactccccgccgccgccgcgcggatgccaagcaccagctttccagtcccttccaagtttccacttggccctgcggctgcggtcttcgggagaggagaaactttggggcccgcgccgcgcgccggcggcaccatgaagtcagcggaggaagaacactatggctatgcatcctccaacgtcagccccgccctgccgctccccacggcgcactccaccctgccggccccgtgccacaaccttcagacctccacaccgggcatcatcccgccggcggatcacccctcggggtacggagcagctttggacggtgggcccgcgggctacttcctctcctccggccacaccaggcctgatggggcccctgccctggagagtcctcgcatcgagataacctcgtgcttgggcctgtaccacaacaataaccagtttttccacgatgtggaggtggaagacgtcctccctagctccaaacggtccccctccacggccacgctgagtctgcccagcctggaggcctacagagacccctcgtgcctgagcccggccagcagcctgtcctcccggagctgcaactcagaggcctcctcctacgagtccaactactcgtacccgtacgcgtccccccagacgtcgccatggcagtctccctgcgtgtctcccaagaccacggaccccgaggagggctttccccgcgggctgggggcctgcacactgctgggttccccgcggcactccccctccacctcgccccgcgccagcgtcactgaggagagctggctgggtgcccgctcctccagacccgcgtccccttgcaacaagaggaagtacagcctcaacggccggcagccgccctactcaccccaccactcgcccacgccgtccccgcacggctccccgcgggtcagcgtgaccgacgactcgtggttgggcaacaccacccagtacaccagctcggccatcgtggccgccatcaacgcgctgaccaccgacagcagcctggacctgggagatggcgtccctgtcaagtcccgcaagaccaccctggagcagccgccctcagtggcgctcaaggtggagcccgtcggggaggacctgggcagccccccgcccccggccgacttcgcgcccgaagactactcctctttccagcacatcaggaagggcggcttctgcgaccagtacctggcggtgccgcagcacccctaccagtgggcgaagcccaagcccctgtcccctacgtcctacatgagcccgaccctgcccgccctggactggcagctgccgtcccactcaggcccgtatgagcttcggattgaggtgcagcccaagtcccaccaccgagcccactacgagacggagggcagccggggggccgtgaaggcgtcggccggaggacaccccatcgtgcagctgcatggctacttggagaatgagccgctgatgctgcagcttttcattgggacggcggacgaccgcctgctgcgcccgcacgccttctaccaggtgcaccgcatcacagggaagaccgtgtccaccaccagccacgaggccatcctctccaacaccaaagtcctggagatcccactcctgccggagaacagcatgcgagccgtcattgactgtgccggaatcctgaaactcagaaactccgacattgaacttcggaaaggagagacggacatcgggaggaagaacacacgggtacggctggtgttccgcgttcacgtcccgcaacccagcggccgcacgctgtccctgcaggtggcctccaaccccatcgaatgctcccagcgctcagctcaggagctgcctctggtggagaagcagagcacggacagctatccggtcgtgggcgggaagaagatggtcctgtctggccacaacttcctgcaggactccaaggtcattttcgtggagaaagccccagatggccaccatgtctgggagatggaagcgaaaactgaccgggacctgtgcaagccgaattctctggtggttgagatcccgccatttcggaatcagaggataaccagccccgttcacgtcagtttctacgtctgcaacgggaagagaaagcgaagccagtaccagcgtttcacctaccttcccgccaacgttccaattataaaaacagaacccactgatgattatgagcctgctccaacctgtggaccggtgagccaggggttaagtcctctcccaagaccatactacagccagcagctcgcgatgccacccgaccccagctcctgcctcgtggccggcttcccgccctgtccgcagagaagcaccctgatgccagcggcccctggcgtgagccccaagctccacgacctttctcccgctgcctacaccaagggcgttgccagcccgggccactgtcacctcggactcccgcagccggccggagaggcccccgccgtccaggacgtgcccaggccagtggccacgcaccccggctcgcccgggcagccacccccggccctgctgccacagcagtaaatgaaataatacgaaatgacctctccagcacgagcacccactcctagttgccacattggagcactcagttcagcaggggtatgctgacttcagcagacaaagacttttgaataaataaactgaactcacacctggtaccactcagaacctccaactgactgaatgccaggagctgaacattaatatgtgcaaagattggctctccaacaagaaggaaagcagggaggaagggagaccactgtgtcacctggaggagaagtcatctcatgacaacagaagggaggtggccgggctgagcacgggagacccaccgtgcaggggcctttcatgggaacggcccacacgcagtttgaccccacgcccagcccttctggcacccctggggttcaatactggaagtgccttatttaaccagaccatcagggcatcatagaattgagcattgaatttgctactgtaggagtatttttaggagcagaaactgcaaacacatttcattgtgaggttttaccctctgtatgaatgaagagaacgctggaaggctgcgagaggactctagtatgagtctccaacatttggaacgtttcctgggctgtcacgtacactcctgctgccttacacagtgcattttagaatcttccagtctgtcatctcagctcttttgtaacatgcttcccttgtctgcgcggttgaaaccgtaggcttgttcatagtcgcatgctcgcatctttgtttttaatctggcttcgaacatagcacaagtaacttgaatagcacatcaataggttactggacaaaagcagaaaaacctgttacaggatagcctgcatttgcatgtgtgtacatatctaggcatctatttatgtataaataataacagagccgacgtgtcctcgcccaggagggcttccctgtcagcaataaccggcatccgttttggaacctgcgtctggggctccagtcgctgctcttgctggcgtccatcgccgcctcggacggccgtgcattttctcgtctcacgcagttcgaggaggaccctagaaagccaggagctgtgattgacagtagctgtaggttaccagacggcaacattagaaagtgattgtaaataacatgcaacctaagtgtaatatatttgttcagttataagatgattgtttcacagaagccttaccactctctgcttcatctaagaaaaccaataccaaaaacgccactttaatgctcagccctgcgttgtgtgttttcagatgagttactgttaacaggtaggtttgtgtaggccttgctgggcactctgtacaattagttgcttattacgtatgattactcacagcgatctattgttccatataaccaaaaagcatggtttattcattgaaacacggttgacctgaactcgtgccttaggaattaatgcccccttatggaacctgcctgaattgcacctgcgggtggaggctccggctgtgaagtcactgaacagaacgtcgctgatggagaaagggctcccgcagaaggaacggcctgtaccgtgcgctccggcacaatcgcgtctcttgtgtctcactcacggaaagaaacaacctgaaggccatcccgtcggtctgcacgtaaccgtgaagacgtgtggccgcgtcccacctgcggctgggtaccctgcacccggcactgtaggagtcacgtgcagcctttctcaggggactgtcattgaaaaggaaacgtttgatgtctgtgtcagctgtctttgtagttaggaaatagatccaataaagccgtatttttttgctggaaaaaaaaaaaaaaaaaaaaaaaaaaaaaaaaaaaaaaa

SEQ ID NO: 665 - DNA, 3254 bp, Homo sapiens
agcaggaagctcgcgccgccgtcgccgccgccgctcagcttccccgggcgcgtccaggacccgctgcgccaggcgcgccgtccccggacccggcgtgcgtccctacgaggaaagggaccccgccgctcgagccgcctccgccagccccactgcgaggggtcccagagccagccgcgcccgccctcgcccccggccccgcagccttcccgccctgcgcgccatgaacgcccccgagcggcagccccaacccgacggcggggacgccccaggccacgagcctgggggcagcccccaagacgagcttgacttctccatcctcttcgactatgagtatttgaatccgaacgaagaagagccgaatgcacataaggtcgccagcccaccctccggacccgcataccccgatgatgtcctggactatggcctcaagccatacagcccccttgctagtctctctggcgagccccccggccgattcggagagccggatagggtagggccgcagaagtttctgagcgcggccaagccagcaggggcctcgggcctgagccctcggatcgagatcactccgtcccacgaactgatccaggcagtggggcccctccgcatgagagacgcgggcctcctggtggagcagccgcccctggccggggtggccgccagcccgaggttcaccctgcccgtgcccggcttcgagggctaccgcgagccgctttgcttgagccccgctagcagcggctcctctgccagcttcatttctgacaccttctccccctacacctcgccctgcgtctcgcccaataacggcgggcccgacgacctgtgtccgcagtttcaaaacatccctgctcattattcccccagaacctcgccaataatgtcacctcgaaccagcctcgccgaggacagctgcctgggccgccactcgcccgtgccccgtccggcctcccgctcctcatcgcctggtgccaagcggaggcattcgtgcgccgaggccttggttgccctgccgcccggagcctcaccccagcgctcccggagcccctcgccgcagccctcatctcacgtggcaccccaggaccacggctccccggctgggtacccccctgtggctggctctgccgtgatcatggatgccctgaacagcctcgccacggactcgccttgtgggatcccccccaagatgtggaagaccagccctgacccctcgccggtgtctgccgccccatccaaggccggcctgcctcgccacatctacccggccgtggagttcctggggccctgcgagcagggcgagaggagaaactcggctccagaatccatcctgctggttccgcccacttggcccaagccgctggtgcctgccattcccatctgcagcatcccagtgactgcatccctccctccacttgagtggccgctgtccagtcagtcaggctcttacgagctgcggatcgaggtgcagcccaagccacatcaccgggcccactatgagacagaaggcagccgaggggctgtcaaagctccaactggaggccaccctgtggttcagctccatggctacatggaaaacaagcctctgggacttcagatcttcattgggacagctgatgagcggatccttaagccgcacgccttctaccaggtgcaccgaatcacggggaaaactgtcaccaccaccagctatgagaagatagtgggcaacaccaaagtcctggagatacccttggagcccaaaaacaacatgagggcaaccatcgactgtgcggggatcttgaagcttagaaacgccgacattgagctgcggaaaggcgagacggacattggaagaaagaacacgcgggtgagactggttttccgagttcacatcccagagtccagtggcagaatcgtctctttacagactgcatctaaccccatcgagtgctcccagcgatctgctcacgagctgcccatggttgaaagacaagacacagacagctgcctggtctatggcggccagcaaatgatcctcacggggcagaactttacatccgagtccaaagttgtgtttactgagaagaccacagatggacagcaaatttgggagatggaagccacggtggataaggacaagagccagcccaacatgctttttgttgagatccctgaatatcggaacaagcatatccgcacacctgtaaaagtgaacttctacgtcatcaatgggaagagaaaacgaagtcagcctcagcactttacctaccacccagtcccagccatcaagacggagcccacggatgaatatgaccccactctgatctgcagccccacccatggaggcctggggagccagccttactacccccagcacccgatggtggccgagtccccctcctgcctcgtggccaccatggctccctgccagcagttccgcacggggctctcatcccctgacgcccgctaccagcaacagaacccagcggccgtactctaccagcggagcaagagcctgagccccagcctgctgggctatcagcagccggccctcatggccgccccgctgtcccttgcggacgctcaccgctctgtgctggtgcacgccggctcccagggccagagctcagccctgctccacccctctccgaccaaccagcaggcctcgcctgtgatccactactcacccaccaaccagcagctgcgctgcggaagccaccaggagttccagcacatcatgtactgcgagaatttcgcaccaggcaccaccagacctggcccgcccccggtcagtcaaggtcagaggctgagcccgggttcctaccccacagtcattcagcagcagaatgccacgagccaaagagccgccaaaaacggacccccggtcagtgaccaaaaggaagtattacctgcgggggtgaccattaaacaggagcagaacttggaccagacctacttggatgatgagctgatagacacacaccttagctggatacaaaacatattatgaaacagaatgactgtgatctttgatccgagaaatcaaagttaaagttaatgaaattatcaggaaggagttttcaggacctcctgccagaaatcagacgtaaaagaagccattatagcaagacaccttctgtatctgacccctcggagccctccacagcccctcaccttctgtctcctttcatgttcatctcccagcccggagtccacacgcggatcaatgtatgggcactaagcggactctcacttaaggagctcgccacctccctcta

SEQ ID NO: 666 - DNA, 4005 bp, Homo sapiens
cggctgcggttcctggtgctgctcggcgcgcggccagctttcggaacggaacgctcggcgtcgcgggccccgcccggaaagtttgccgtggagtcgcgacctcttggcccgcgcggcccggcatgaagcggcgttgaggagctgctgccgccgcttgccgctgccgccgccgccgcctgaggaggagctgcagcaccctgggccacgccgatgactactgcaaactgtggcgcccacgacgagctcgacttcaaactcgtctttggcgaggacggggcgccggcgccgccgcccccgggctcgcggcctgcagatcttgagccagatgattgtgcatccatttacatctttaatgtagatccacctccatctactttaaccacaccactttgcttaccacatcatggattaccgtctcactcttctgttttgtcaccatcgtttcagctccaaagtcacaaaaactatgaaggaacttgtgagattcctgaatctaaatatagcccattaggtggtcccaaaccctttgagtgcccaagtattcaaattacatctatctctcctaactgtcatcaagaattagatgcacatgaagatgacctacagataaatgacccagaacgggaatttttggaaaggccttctagagatcatctctatcttcctcttgagccatcctaccgggagtcttctcttagtcctagtcctgccagcagcatctcttctaggagttggttctctgatgcatcttcttgtgaatcgctttcacatatttatgatgatgtggactcagagttgaatgaagctgcagcccgatttacccttggatcccctctgacttctcctggtggctctccagggggctgccctggagaagaaacttggcatcaacagtatggacttggacactcattatcacccaggcaatctccttgccactctcctagatccagtgtcactgatgagaattggctgagccccaggccagcctcaggaccctcatcaaggcccacatccccctgtgggaaacggaggcactccagtgctgaagtttgttatgctgggtccctttcaccccatcactcacctgttccttcacctggtcactcccccaggggaagtgtgacagaagatacgtggctcaatgcttctgtccatggtgggtcaggccttggccctgcagtttttccatttcagtactgtgtagagactgacatccctctcaaaacaaggaaaacttctgaagatcaagctgccatactaccaggaaaattagagctgtgttcagatgaccaagggagtttatcaccagcccgggagacttcaatagatgatggccttggatctcagtatcctttaaagaaagattcatgtggtgatcagtttctttcagttccttcaccctttacctggagcaaaccaaagcctggccacacccctatatttcgcacatcttcattacctccactagactggcctttaccagctcattttggacaatgtgaactgaaaatagaagtgcaacctaaaactcatcatcgagcccattatgaaactgaaggtagccgaggggcagtaaaagcatctactgggggacatcctgttgtgaagctcctgggctataacgaaaagccaataaatctacaaatgtttattgggacagcagatgatcgatatttacgacctcatgcattttaccaggtgcatcgaatcactgggaagacagtcgctactgcaagccaagagataataattgccagtacaaaagttctggaaattccacttcttcctgaaaataatatgtcagccagtattgattgtgcaggtattttgaaactccgcaattcagatatagaacttcgaaaaggagaaactgatattggcagaaagaatactagagtacgacttgtgtttcgtgtacacatcccacagcccagtggaaaagtcctttctctgcagatagcctctatacccgttgagtgctcccagcggtctgctcaagaacttcctcatattgagaagtacagtatcaacagttgttctgtaaatggaggtcatgaaatggttgtgactggatctaattttcttccagaatccaaaatcatttttcttgaaaaaggacaagatggacgacctcagtgggaggtagaagggaagataatcagggaaaaatgtcaaggggctcacattgtccttgaagttcctccatatcataacccagcagttacagctgcagtgcaggtgcacttttatctttgcaatggcaagaggaaaaaaagccagtctcaacgttttacttatacaccagttttgatgaagcaagaacacagagaagagattgatttgtcttcagttccatctttgcctgtgcctcatcctgctcagacccagaggccttcctctgattcagggtgttcacatgacagtgtactgtcaggacagagaagtttgatttgctccatcccacaaacatatgcatccatggtgacctcatcccatctgccacagttgcagtgtagagatgagagtgttagtaaagaacagcatatgattccttctccaattgtacaccagccttttcaagtcacaccaacacctcctgtggggtcttcctatcagcctatgcaaactaatgttgtgtacaatggaccaacttgtcttcctattaatgctgcctctagtcaagaatttgattcagttttgtttcagcaggatgcaactctttctggtttagtgaatcttggctgtcaaccactgtcatccataccatttcattcttcaaattcaggctcaacaggacatctcttagcccatacacctcattctgtgcataccctgcctcatctgcaatcaatgggatatcattgttcaaatacaggacaaagatctctttcttctccagtggctgaccagattacaggtcagccttcgtctcagttacaacctattacatatggtccttcacattcagggtctgctacaacagcttccccagcagcttctcatcccttggctagttcaccgctttctgggccaccatctcctcagcttcagcctatgccttaccaatctcctagctcaggaactgcctcatcaccgtctccagccaccagaatgcattctggacagcactcaactcaagcacaaagtacgggccaggggggtctttctgcaccttcatccttaatatgtcacagtttgtgtgatccagcgtcatttccacctgatggggcaactgtgagcattaaacctgaaccagaagatcgagagcctaactttgcaaccattggtctgcaggacatcactttagatgatgaccaatttatatctgacttggaacaccagccatcaggttcagcagagaaatggcctaaccacagtgtgctctcatgtccagctcctttctggagaatctagaggtgaacgagataattgggagagacatgtcccagatttctgtttcccaaggagcaggggtgagcaggcaggctcccctcccgagtcctgagtccctggatttaggaagatctgatgggctctaacagtgcttactgcagccttgtgtccaccaccaacttctcagcatgtttctctccttggaccttgggtttccaactctgcagccttcaggtctggggccaggagtgggacccaccatttgtggggaaagtagcattcctccacctcaggccttgggtagatttggcaaaagaacaggagcagcataggctgtttgagctttggggaaatgaactttgctttttatatttaactaggatacttttatatgatgggtgctttgagtgtgaatgcagcaggctctcttgtttccgaggtgctgcttttgcaggtgacctggttacttagctaggattggtgatttgtactgctttatggtcatttgaagggccctttagtttttatgataatttttaaaataggaacttttgataagaccttctagaagcaaaaaaaaaaaaaaaaaaaaaaaaaagaaaaaaaaag

SEQ ID NO: 667 - DNA, 4976 bp, Homo sapiens
gaagagaggacagagggagggagggtgggggaggacgaggggcgcgtggttttcccatctcatccctggaggaggggctggagcatccccggcagccaatcagggacaggctgggggggggaccgctttgaagaagtttgggggaaaaaagtttggaaaagtttctataataacgagggggcttctggagggaggcggcagcgacggaggagggggcttctcagagaaagggagggagggagccacccgggtgaagatacagcagcctcctgaactcccccctcccacccaggccgggacctgggggctcctgccggatccatgggggcggccagctgcgaggatgaggagctggaatttaagctggtgttcggggaggaaaaggaggcccccccgctgggcgcggggggattgggggaagaactggactcagaggatgccccgccatgctgccgtctggccttgggagagccccctccctatggcgctgcacctatcggtattccccgacctccaccccctcggcctggcatgcattcgccaccgccgcgaccagccccctcacctggcacctgggagagccagcccgccaggtcggtgaggctgggaggaccaggagggggtgctgggggtgctgggggtggccgtgttctcgagtgtcccagcatccgcatcacctccatctctcccacgccggagccgccagcagcgctggaggacaaccctgatgcctggggggacggctctcctagagattaccccccaccagaaggctttgggggctacagagaagcagggggccagggtgggggggccttcttcagcccaagccctggcagcagcagcctgtcctcgtggagcttcttctccgatgcctctgacgaggcagccctgtatgcagcctgcgacgaggtggagtctgagctaaatgaggcggcctcccgctttggcctgggctccccgctgccctcgccccgggcctcccctcggccatggacccccgaagatccctggagcctgtatggtccaagccccggaggccgagggccagaggatagctggctactcctcagtgctcctgggcccaccccagcctccccgcggcctgcctctccatgtggcaagcggcgctattccagctcgggaaccccatcttcagcctccccagctctgtcccgccgtggcagcctgggggaagaggggtctgagccacctccaccacccccattgcctctggcccgggacccgggctcccctggtccctttgactatgtgggggccccaccagctgagagcatccctcagaagacacggcggacttccagcgagcaggcagtggctctgcctcggtctgaggagcctgcctcatgcaatgggaagctgcccttgggagcagaggagtctgtggctcctccaggaggttcccggaaggaggtggctggcatggactacctggcagtgccctccccactcgcttggtccaaggcccggattgggggacacagccctatcttcaggacctctgccctacccccactggactggcctctgcccagccaatatgagcagctggagctgaggatcgaggtacagcctagagcccaccaccgggcccactatgagacagaaggcagccgtggagctgtcaaagctgcccctggcggtcaccccgtagtcaagctcctaggctacagtgagaagccactgaccctacagatgttcatcggcactgcagatgaaaggaacctgcggcctcatgccttctatcaggtgcaccgtatcacaggcaagatggtggccacggccagctatgaagccgtagtcagtggcaccaaggtgttggagatgactctgctgcctgagaacaacatggcggccaacattgactgcgcgggaatcctgaagcttcggaattcagacattgagcttcggaagggtgagacggacatcgggcgcaaaaacacacgtgtacggctggtgttccgggtacacgtgccccagggcggcgggaaggtcgtctcagtacaggcagcatcggtgcccatcgagtgctcccagcgctcagcccaggagctgccccaggtggaggcctacagccccagtgcctgctctgtgagaggaggcgaggaactggtactgactggctccaacttcctgccagactccaaggtggtgttcattgagaggggtcctgatgggaagctgcaatgggaggaggaggccacagtgaaccgactgcagagcaacgaggtgacgctgaccctgactgtccccgagtacagcaacaagagggtttcccggccagtccaggtctacttttatgtctccaatgggcggaggaaacgcagtcctacccagagtttcaggtttctgcctgtgatctgcaaagaggagcccctaccggactcatctctgcggggtttcccttcagcatcggcaaccccctttggcactgacatggacttctcaccacccaggcccccctacccctcctatccccatgaagaccctgcttgcgaaactccttacctatcagaaggcttcggctatggcatgccccctctgtacccccagacggggcccccaccatcctacagaccgggcctgcggatgttccctgagactaggggtaccacaggttgtgcccaaccacctgcagtttccttccttccccgccccttccctagtgacccgtatggagggcggggctcctctttctccctggggctgccattctctccgccagccccctttcggccgcctcctcttcctgcatccccaccgcttgaaggccccttcccttcccagagtgatgtgcatcccctacctgctgagggatacaataaggtagggccaggctatggccctggggagggggctccggagcaggagaaatccaggggtggctacagcagcggcttccgagacagtgtccctatccagggtatcacgctggaggaagtgagtgagatcattggccgagacctgagtggcttccctgcacctcctggagaagagcctcctgcctgaaccacgtgaactgtcatcacctggcaaccccagccccagcctcagccctgccccctttccctccttcctggagtggtggctacagaagcttggggccaaccctggctcctctttccccagcttctgtctgtctcactgtcttccctcccctcccccagctgaggtgtggccctcaggcctggtgctgccttggagggctgggggaaggagtgtgtggaggagggaggagggtgaagactgaggctaggtgccagaatggactggagtgaaggcgtgtctagagtgtgggctggctgttgtgctggaaagctggggacaggttgatggtaataaactgctcaatgaccagtgcttcaggctccagagctctttggagagatgggttggggcagcttactccagccctggcccaaggaggcccagaagttggaaagagatggaatgtggctgggaacattgcatcccaaagagcttctcagtggaggaggctggggaaggcatgagggggctcagaggctccttgactgggaccaggattgggggccagggcttgagtaggcctctccactctcctccttgggggtccagattccttaggagctttgggatgaggcccaggaggctgcatttttccaggtccttagtcttgccaccacacagatgattctgattcatagccaagatgaggacacactgatgtagctgatctctcatttacagaggaggattctaaagttcagagagggaaaggggcttgcctgaggtcacgtagataatcagcagcacattgaacgctgcactcctgggctcctgtccccagcccccattcagacacgctgactcaggaggtccaggcctctaaggcttctctccctggagtgagggtggaggtgagggagagctggcacaagccctccctctggatcctccactcctggggattatgaagatattctggaaagatttgtgcttcagaggtagactgcagaaagcaaacagtctacccagcagctctgaatgtcacctgccctggggcttacagcactatatgagttcctggcctatcctgcaaatatgcccatgctggccttctaaatagctggtacatccatcaccactgacgggcctggcctggaaacctggtttgtcccctgtcttgatggcctacgagaggccaagttccactgggctgggaaaagtcactttgtctgtcttgttcacctggagcctgacacaccgtaggtactgagtacaaatagcttgatttggctaggcttggctgcagggggacgtgcctaaaagacattccgggcatttgcacttgggaaacttgcctcaccttcaggcttgtggggcctctctatgcccaatgagtccaggcagtcctagcaagtactcaggagagcaggggtgggtgtgacagaggctggctctggattgggggacaacagaaccagagtaactcctcgcctgttgctgctttgcaatgaatttcctttacctttctggaacacaagctgctgtgaaccaaactgatatcaagtgattagctcaccgggccttggttgcttttcaaagatccccttcagccccctgccagagtcactgccccataatcaccatgtcagaagggaccctagggcattcgtgtcctatttatcaatcttcagcaccacctctaagatctctgagagagggtggatcagcctctgtgtaaacaaaaagctgttaggacttgttgcctctcaaggtggactattctgttttctgccaggacactgccattcatgcattgtcagatatttattaaacagcagcaaagtgccagccaatttgtcctggaggaattcatagcctcatggggcaaaagtaaataaacagcttattacaattcaacaaaaaaaaaaaaaaaaaaaaaaaaaaaaaaaaaaaaaaaaaaaaaaaaa

SEQ ID NO: 668 - DNA, 1678 bp, Homo sapiens
gcatatactgtcatcatcttggaaagaaaaggctgagaacgtaaaactgaggacagaggaggaaagcagggtgacccctgatgttgccctagaaaatggaaaacaaaacacagcaaaacagaaaaacagaagatctgactctgcctttagccaggaaaacagtttgggggagtaaaaagtattagggaaaagagtgggcattttgcctggaaaaaaggtttctagagccatctgggctttccgggaacctggaccagactctggcccagtaggatgtccccgtgtcctccccagcagagcaggaacagggtgatacagctgtccacttcagagctaggagagatggaactgacttggcaggagatcatgtccatcaccgagctgcagggtctgaatgctccaagtgagccatcatttgagccccaagccccagctccataccttggacctccaccacccacaacttactgcccctgctcaatccacccagattctggcttcccacttcctccaccaccttatgagctcccagcatccacatcccatgtcccagatcccccatactcctatggcaacatggccataccagtctccaagccactgagcctctcaggcctgctcagtgagccgctccaagaccccttagccctcctggacattgggctgccagcagggccacctaagccccaagaagacccagaatccgactcaggattatccctcaactatagcgatgctgaatctcttgagctggaggggacagaggctggtcggcggcgcagcgaatatgtagagatgtacccagtggagtacccctactcactcatgcccaactccttggcccactccaactataccttgccagctgctgagacccccttggccttagagccctcctcaggccctgtgcgggctaagcccactgcacggggggaggcagggagtcgggatgaacgtcgggccttggccatgaagattccttttcctacggacaagattgtcaacttgccggtagatgactttaatgagctattggcaaggtacccgctgacagagagccagctagcgctagtccgggacatccgacgacggggcaaaaacaaggtggcagcccagaactgccgcaagaggaagctggaaaccattgtgcagctggagcgggagctggagcggctgaccaatgaacgggagcggcttctcagggcccgcggggaggcagaccggaccctggaggtcatgcgccaacagctgacagagctgtaccgtgacattttccagcaccttcgggatgaatcaggcaacagctactctcctgaagagtacgcgctgcaacaggctgccgatgggaccatcttccttgtgccccgggggaccaagatggaggccacagactgagctggcccagaggggtggaactgctgatgggatttccttcattcccttctgataaaggtactccccaaccctgagtcccagaaggagctgagttctctagaccagaagaggatgacaatggcaacaagtgtttggaagttccaaggtgtgttcaaagaggcttgccttgagggagggctggaatctgtcttccctgactcggctcctcaggtctttagcctccaccttgtctaagctttggtctataaagtgcgctacagaaaaaaaaaaaaaaaaaaaaaaa

SEQ ID NO: 669 - DNA, 4891 bp, Homo sapiens
tttccgagtgcggtagcaggagggggcggggaggtaagcggaggctccgagctctaggccggccggcggtggcggcggcgaggccgggactcgggcttagggcctgctgtggaggcagcggcggacgccgagctaagcagtttctctggaaacccccctggtaagtgtggaggaggcgggacactctgacccaagacgaaaggcctgtagctccagccaaagaaaataaaccttaggagggagaaggaaaaaaaaaatccatcagctgttcctgagaacagcctgcattggaatctacagagaggacaactaatgtgagtgaggaagtgactgtatgtggactgtggagaaagtaagtcacgtgggcccttgaggacctggactgggttaggaacagttgtactttcagaggtgaggtgtcgagaagggaaagtgaatgtggtctggagtgtgtccttggccttggctccacagggtgtgctttcctctggggccgtcagggagctcatcccttgtgttctgccagggtggggtacggggtttgacactgaggagggtaacctgctggctggagcggcagagcagtggccttgatttgtcttttggaagattttaaaaaccaaaaagcataaacattctggtccttcagcaatgctttctctgaagaaatacttaacggaaggacttctccagttcaccattctgctgagtttgattggggtacgggtggacgtggatacttacctgacctcacagcttcccccactccgggagatcatcctggggcccagttctgcctatactcagacccagttccacaacctgaggaataccttggatggctatggtatccaccccaagagcatagacctggacaattacttcactgcccggcggctcctcagtcaggtgagggccctggacaggttccaggtgccaaccactgaggtaaatgcctggctggttcaccgagacccagaggggtctgtctctggcagtcagcccaactcaggcctcgccctcgagagttccagtggcctccaagatgtgacaggcccagacaacggggtgcgagaaagcgaaacggagcagggattcggtgaagatttggaggatttgggggctgtagcccccccagtcagtggagacttaaccaaagaggacatagatctgattgacatcctttggcgacaggatattgatctgggggctgggcgtgaggtttttgactatagtcaccgccagaaggagcaggatgtggagaaggagctgcgagatggaggcgagcaggacacctgggcaggcgagggcgcggaagctctggcacggaacctgctagtggatggagagactggggagagcttccctgcacaggtgcctagtggggaggaccagacggccctgtccctggaagagtgccttaggctgctggaagccacctgcccctttggggagaatgctgagtttccagcagacatttccagcataacagaagcagtgcctagtgagagtgagccccctgctcttcaaaacaacctcttgtctcctcttctgaccgggacagagtcaccatttgatttggaacagcagtggcaagatctcatgtccatcatggaaatgcaggccatggaagtgaacacatcagcaagtgaaatcctgtacagtgcccctcctggagacccactgagcaccaactacagccttgcccccaacactcccatcaatcagaatgtcagcctgcatcaggcgtccctggggggctgcagccaggacttcttactcttcagccccgaggtggaaagcctgcctgtggccagtagctccacgctgctcccgttggcccccagcaattctaccagcctcaactccaccttcggctccaccaacctgacagggctcttctttccaccccagctcaatggcacagccaatgacacagcaggcccagagctgcctgaccctttggggggtctgttagatgaagctatgttggatgagatcagccttatggacctggccattgaagaaggctttaaccctgtgcaggcctcccagctggaggaggaatttgactctgactcaggcctttccttagactcgagccatagcccttcttccctaagcagctctgaaggcagttcttcctcttcttcctcctcctcttcctcttcttcctctgcttcttcctctgcctcttcctccttttctgaggaaggtgcggttggctacagctctgactctgagaccctggatctggaagaggccgagggtgctgtgggctaccagcctgagtattccaagttctgccgcatgagctaccaggatccagctcagctctcatgcctgccctacctggagcacgtgggccacaaccacacatacaacatggcacccagtgccctggactcagccgacctgccaccacccagtgccctcaagaaaggcagcaaggagaagcaggctgacttcctggacaagcagatgagccgggatgagcaccgagcccgagccatgaagatccctttcaccaatgacaaaatcatcaacctgcctgtggaggagttcaatgaactgctgtccaaataccagttgagtgaagcccagctgagcctcatccgagacatccggcgccggggcaagaacaagatggcggcgcagaactgccgcaagcgcaagctggacaccatcctgaatctggagcgtgatgtggaggacctgcagcgtgacaaagcccggctgctgcgggagaaagtggagttcctgcgctccctgcgacagatgaagcagaaggtccagagcctgtaccaggaggtgtttgggcggctgcgagatgagaacggacgaccctactcgcccagtcagtatgcgctccagtacgccggggacggcagtgtcctcctcatcccccgcacgatggccgaccagcaggcccggcggcaggagaggaagccaaaggaccggagaaagtgagcctggggaagaagggggtttgaagcccaccaagaccgaaactggagaagggctggacctggacctggacctggacctacagcggggacttaaatgccttcttatccaatatatcttctcagatgggatgactgcgggtcagtgtacaggaagaggcaggcactggctggctcagctccactcgggtggagtggaagtggccagaccatttagacggacagggtcctcaccctacccctttcctgtgaggcaggggtggtggtggagttgctggaggtagaggagctatgtggagcaaaggccgacagaggggaaggaatggacctgtgagaggaagggaaggtggcagaaagtctcatttcaggaaggagggatagaaggaaggaaggaaggaacccccccccccccgaaaaaaaaatcaaagcgggaagaaaatcagagggaaggttaaggttggctctggccaggattccaggcagcaggttggagtgactggtgggcctagatcactggtgtgataaaccccaattttcaccccggggggggtggggtacacagacacagggtgggggtggggagggacggtgttaactctttctgctccttgcattttgacatccctgaaggggagctcttggatatcattggccatgtttcaatcgaatggagccactgggccccaacactggctttgagatttagagtcaaagggtagagtgaacaggaaagggtcacgtggtcccatgttgcaacagccccaacatcacgcatgtcattcactgccttgccactccatctccctccgtgctccagccacccctgagctgaggctcccattgtctccatcagagcctgcatgtgtatgccgtcctcccctggtccggtgtttgtgttccccacccctcacagactgcctgagctcttctgtaagctggggtagggtgatggcagtgctccgggaactgggcctgcagccttcctcttctgggactgctgtgaggcagaggaatgatggagaatctagtgtagcagcctccaggcaggattcagcacaacactggggagtcacccttccctcgggcctctgcctaccaacaactgggcttatcactgggaaaacacaaaaaattacacaacccagcaacaacaaaagaactagtcctcttagaatttcttgcgctttgatttttttagggcttgtgccctgtttcacttatagggtctagaatgcttgtgttgagtaaaaaggagatgcccaatattcaaagctgctaaatgttctctttgccataaagactccgtgtaactgtgtgaacacttgggatttttctcctctgtcccgaggtcgtcgtctgctttcttttttgggtttctttctagaagattgagaagtgcatatgacaggctgagagcacctccccaaacacacaagctctcagccacaggcagcttctccacagccccagcttcgcacaggctcctggagggctgcctgggggaggcagacatgggagtgccaaggtggccagatggttccaggactacaatgtctttatttttaactgtttgccactgctgccctcacccctgcccggctctggagtaccgtctgccccagacaagtgggagtgaaatgggggtggggggaagcactgattcccagttagggggtgcctaactgagcagtagggatagaaggtgtgaacctgggagtgcttttataaattattttccttgtagattttatttttaatttatctctgtgacctgccagggagaggggagagagagagagatgctgttgagcacatgacaaaataaaataaaatggatgattcattcttaagtgcactttttccccactttgaatttaaattgagaataaaggaaatggactcattgtaaaaaaaaaaaaaaaaaa

SEQ ID NO: 670 - DNA, 2884 bp, Homo sapiens
aaatcagggaggcgcagctcctacaccaacgcctttccggggctccgggtgtgtttgttccaactgtttaaactgtttcaaagcgtccgaactccagcgaccttcgcaaacaactctttatctcgcgggcgagagcgctgcccttatttgcgggggagggcaaactgaacgccggcaccggggagctaacggagacctcctctaggtcccccgcctgctgggaccccagctggcagtcccttcccgcccccggaccgcgagcttcttgcgtcagccccggcgcgggtgggggattttcggaagctcagcccgcgcggccggcgggggaaggaagggcccggactcttgccccgcccttgtggggcgggaggcggagcggggcaggggcccgccggcgtgtagccgattaccgagtgccggggagcccggaggagccgccgacgcagccgccaccgccgccgccgccgccaccagagccgccctgtccgcgccgcgcctcggcagccggaacagggccgccgtcggggagccccaacacacggtccacagctcatcatgatggacttggagctgccgccgccgggactcccgtcccagcaggacatggatttgattgacatactttggaggcaagatatagatcttggagtaagtcgagaagtatttgacttcagtcagcgacggaaagagtatgagctggaaaaacagaaaaaacttgaaaaggaaagacaagaacaactccaaaaggagcaagagaaagcctttttcgctcagttacaactagatgaagagacaggtgaatttctcccaattcagccagcccagcacatccagtcagaaaccagtggatctgccaactactcccaggttgcccacattcccaaatcagatgctttgtactttgatgactgcatgcagcttttggcgcagacattcccgtttgtagatgacaatgaggtttcttcggctacgtttcagtcacttgttcctgatattcccggtcacatcgagagcccagtcttcattgctactaatcaggctcagtcacctgaaacttctgttgctcaggtagcccctgttgatttagacggtatgcaacaggacattgagcaagtttgggaggagctattatccattcctgagttacagtgtcttaatattgaaaatgacaagctggttgagactaccatggttccaagtccagaagccaaactgacagaagttgacaattatcatttttactcatctataccctcaatggaaaaagaagtaggtaactgtagtccacattttcttaatgcttttgaggattccttcagcagcatcctctccacagaagaccccaaccagttgacagtgaactcattaaattcagatgccacagtcaacacagattttggtgatgaattttattctgctttcatagctgagcccagtatcagcaacagcatgccctcacctgctactttaagccattcactctctgaacttctaaatgggcccattgatgtttctgatctatcactttgcaaagctttcaaccaaaaccaccctgaaagcacagcagaattcaatgattctgactccggcatttcactaaacacaagtcccagtgtggcatcaccagaacactcagtggaatcttccagctatggagacacactacttggcctcagtgattctgaagtggaagagctagatagtgcccctggaagtgtcaaacagaatggtcctaaaacaccagtacattcttctggggatatggtacaacccttgtcaccatctcaggggcagagcactcacgtgcatgatgcccaatgtgagaacacaccagagaaagaattgcctgtaagtcctggtcatcggaaaaccccattcacaaaagacaaacattcaagccgcttggaggctcatctcacaagagatgaacttagggcaaaagctctccatatcccattccctgtagaaaaaatcattaacctccctgttgttgacttcaacgaaatgatgtccaaagagcagttcaatgaagctcaacttgcattaattcgggatatacgtaggaggggtaagaataaagtggctgctcagaattgcagaaaaagaaaactggaaaatatagtagaactagagcaagatttagatcatttgaaagatgaaaaagaaaaattgctcaaagaaaaaggagaaaatgacaaaagccttcacctactgaaaaaacaactcagcaccttatatctcgaagttttcagcatgctacgtgatgaagatggaaaaccttattctcctagtgaatactccctgcagcaaacaagagatggcaatgttttccttgttcccaaaagtaagaagccagatgttaagaaaaactagatttaggaggatttgaccttttctgagctagtttttttgtactattatactaaaagctcctactgtgatgtgaaatgctcatactttataagtaattctatgcaaaatcatagccaaaactagtatagaaaataatacgaaactttaaaaagcattggagtgtcagtatgttgaatcagtagtttcactttaactgtaaacaatttcttaggacaccatttgggctagtttctgtgtaagtgtaaatactacaaaaacttatttatactgttcttatgtcatttgttatattcatagatttatatgatgatatgacatctggctaaaaagaaattattgcaaaactaaccactatgtacttttttataaatactgtatggacaaaaaatggcattttttatattaaattgtttagctctggcaaaaaaaaaaaattttaagagctggtactaataaaggattattatgactgttaaattaaaaaaaaaaaaaaaaaaaaaaaaaaaaaaaa

SEQ ID NO: 671 - DNA, 3720 bp, Homo sapiens
cggctgggcgaacgggctcggcgctcaggtggctccttcttcgcttctcccgatccccggcggtgccaggcacggtgccggctgccgagggaacgcctttgtgcccggtgctgggaacccgcgacggccgccacgcgccccggtccattgtttcgcttatctgggttccaggcaggtgcgggcggcgcgcggggtccgcacgtgtcaccccggcggctggggcgccgggacccgcgggcgccggcaggggcgttcccgggcgcgcggcggcgatgaagcacctgaagcggtggtggtcggccggcggcggcctcctgcacctcaccctcctgctgagcttggcggggctccgcgtagacctagatctttacctgctgctgccgccgcccaccctgctgcaggacgagctgctgttcctgggcggcccggccagctccgcctacgcgctcagccccttctcggcctcgggagggtgggggcgcgcgggccacttgcaccccaagggccgggagctggaccctgccgcgccgcccgagggccagctgctccgggaggtgcgcgcgctcggggtccccttcgtccctcgcaccagcgtggatgcatggctggtgcacagcgtggctgccgggagcgcggacgaggcccacgggctgctcggcgccgccgccgcctcgtccaccggaggagccggcgccagcgtggacggcggcagccaggctgtgcaggggggcggcggggacccccgagcggctcggagtggccccttggacgccggggaagaggagaaggcacccgcggaaccgacggctcaggtgccggacgctggcggatgtgcgagcgaggagaatggggtactaagagaaaagcacgaagctgtggatcatagttcccagcatgaggaaaatgaagaaagggtgtcagcccagaaggagaactcacttcagcagaatgatgatgatgaaaacaaaatagcagagaaacctgactgggaggcagaaaagaccactgaatctagaaatgagagacatctgaatgggacagatacttctttctctctggaagacttattccagttgctttcatcacagcctgaaaattcactggagggcatctcattgggagatattcctcttccaggcagtatcagtgatggcatgaattcttcagcacattatcatgtaaacttcagccaggctataagtcaggatgtgaatcttcatgaggccatcttgctttgtcccaacaatacatttagaagagatccaacagcaaggacttcacagtcacaagaaccatttctgcagttaaattctcataccaccaatcctgagcaaacccttcctggaactaatttgacaggatttctttcaccggttgacaatcatatgaggaatctaacaagccaagacctactgtatgaccttgacataaatatatttgatgagataaacttaatgtcattggccacagaagacaactttgatccaatcgatgtttctcagctttttgatgaaccagattctgattctggcctttctttagattcaagtcacaataatacctctgtcatcaagtctaattcctctcactctgtgtgtgatgaaggtgctataggttattgcactgaccatgaatctagttcccatcatgacttagaaggtgctgtaggtggctactacccagaacccagtaagctttgtcacttggatcaaagtgattctgatttccatggagatcttacatttcaacacgtatttcataaccacacttaccacttacagccaactgcaccagaatctacttctgaaccttttccgtggcctgggaagtcacagaagataaggagtagataccttgaagacacagatagaaacttgagccgtgatgaacagcgtgctaaagctttgcatatccctttttctgtagatgaaattgtcggcatgcctgttgattctttcaatagcatgttaagtagatattatctgacagacctacaagtctcacttatccgtgacatcagacgaagagggaaaaataaagttgctgcgcagaactgtcgtaaacgcaaattggacataattttgaatttagaagatgatgtatgtaacttgcaagcaaagaaggaaactcttaagagagagcaagcacaatgtaacaaagctattaacataatgaaacagaaactgcatgacctttatcatgatatttttagtagattaagagatgaccaaggtaggccagtcaatcccaaccactatgctctccagtgtacccatgatggaagtatcttgatagtacccaaagaactggtggcctcaggccacaaaaaggaaacccaaaagggaaagagaaagtgagaagaaactgaagatggactctattatgtgaagtagtaatgttcagaaactgattatttggatcagaaaccattgaaactgcttcaagaattgtatctttaagtactgctacttgaataactcagttaacgctgttttgaagcttacatggacaaatgtttaggacttcaagatcacacttgtgggcaatctgggggagccacaacttttcatgaagtgcattgtatacaaaattcatagttatgtccaaagaataggttaacatgaaaacccagtaagactttccatcttggcagccatcctttttaagagtaagttggttacttcaaaaagagcaaacactggggatcaaattattttaagaggtatttcagttttaaatgcaaaatagccttattttcatttagtttgttagcactatagtgagcttttcaaacactattttaatctttatatttaacttataaattttgctttctatggaaataaattttgtatttgtattaaaaattaacttttcccttttatacagaatctgaaccaaatttaccttactttccttccaaaatatccacattcaggaatataggtgaataacaaataaggcagcatagcaaactgctcagactcaagccaaattgaggtcaacatagtatgccaaatccatagtaaggcaaatccacccccctaccccaatacttaacacacagaatactatgtgatatagaatgcactgaagacctacggtcactggtagtttgagccacaggccttcctcatgtaaccagagacagaatgggctacttgcaaaaacgtaactccttgtgtgtatattaaatccataaaatctctggcagtaaagccagcctgaagggatggcctcaccatcttagaatactgagatctcaccagaacactgtaagccatataaacagtagggaaagagtcagcaacagtgaaaccatctgtttaaaatgggcaaaagcgattaagggaaaaaaaacaggtgaatttgaaaataaaccagggtaaggtaaattctagaaataatagcatttgaaatgaaaacctcacttaagttcactagaacagtaaacaggagattgctgaattttttgaagacagcaatgacctcacctagatgactcaagtttggggaacatcaagattttgacgggtactataatgcttaatatgtccaaattttcaaaatgaagtttctcagatattatttctgccataggagctacagtgtagagtatcacataagtatcttgggctagagaaatgcagtttatatataccgttggatttttataataaagtttcccaagacctgttattttgccagaaaaaaaaaaaa

SEQ ID NO: 672 - DNA, 3063 bp, Homo sapiens
ggccgcggaggctcgggacccggctggccgcgcggcgccgcagccgccccctcccccacaccccctcccccccgcggcggcggcgcgagcgggcggcggctgtgcggtgcggtgcagagcggaggcggaggcgggcgcgcgggcagctcgcgggcacccggccgggccggcgcgggagcgggaaagggtgcgctatgcctttaacacccgcgtacagtaggcatgtatagtggagtgtagggaaactctaggcggggttaaagttcagctcatggagcggcaatagcgctggctggctggctgcagttgagccgacttggaaatgtgaacgcaagaagcaggcttgatttttttttctccccccttctctctctctctctctctctctcttcctctctccctctttctcctctctcacccacactcacgcacacctccaaaccgcacacccagacgcacacgcataccccagcgcccggcagttatgtattctccgctctgtctcacccaggatgaatttcatcctttcatcgaagcacttctgccccacgtccgagcctttgcctacacatggttcaacctgcaggcccgaaaacgaaaatacttcaaaaaacatgaaaagcgtatgtcaaaagaagaagagagagccgtgaaggatgaattgctaagtgaaaaaccagaggtcaagcagaagtgggcatctcgacttctggcaaagttgcggaaagatatccgacccgaatatcgagaggattttgttcttacagttacagggaaaaaacctccatgttgtgttctttccaacccagaccagaaaggcaagatgcgaagaattgactgcctccgccaggcagataaagtctggaggttggaccttgttatggtgattttgtttaaaggtattccgctggaaagtactgatggcgagcgccttgtaaagtccccacaatgctctaatccagggctctgtgtccaaccccatcacataggggtttctgttaaggaactcgatttatatttggcatactttgtgcatgcagcagattcaagtcaatctgaaagtcccagccagccaagtgacgctgacattaaggaccagccagaaaatggacatttgggcttccaggacagttttgtcacatcaggtgtttttagtgtcactgagctagtaagagtgtcacagacaccaatagctgcaggaactggcccaaatttttctctctcagatttggaaagttcttcatactacagcatgagtccaggagcaatgaggaggtctttacccagcacatcctctacgagctccacaaagcgcctcaagtctgtggaggatgaaatggacagtcctggtgaggagccattttatacaggccaagggcgctccccaggaagtggcagtcagtcaagtggatggcatgaagtggagccaggaatgccatctccaaccacactgaagaagtcggagaagtctggtttcagcagcccctccccttcacagacctcctccctgggaacggcgttcacacagcatcaccgacctgtcattacaggacccagagcaagtccgcatgcaacaccatcgactcttcatttcccgacatcacccattatccagcagcctgggccttacttctcacacccagccatccgctatcaccctcaggagacgctgaaagaatttgtccaacttgtctgccctgatgctggtcagcaggctggacaggtggggttcctcaatcccaatgggagcagccaaggcaaggtgcacaacccattccttcccaccccaatgttgccaccgccaccgccaccaccgatggccaggcctgtgcctctgccggtgccagacacaaagcctccaaccacgtcaacagaaggaggtgcagcctcccccacgtcaccaacctactcgacacccagcacctcccccgcaaaccgattcgtcagtgttggaccacgggatccaagctttgtaaatatccctcaacagacacagtcctggtacctgggataaaagttgcagcgtcccaccatccaccagacagaccacctgaccccttctcaactctgtaacatggacgcaacctcaacccagcgcagttacaacttcactatcagcggaaggggagaaaaaccgattcaaatcaacttgtacatggaaacagcaagcattatggtcaaacagcaaaggccataaccttttgggatttttttttttttaaaatactttagggactgttgtaatttctcatatggtgctggaaatggttgggctttgtaacatttgaagtgtttccatggtagcgtgagcattaggtgacgtggctagcggaggactacccttgctcactgacttcctgttgtaacacactttccttacggagcctggctgtttcacagtatttcatgaatttacccacacaggtgtgatcctccttgagcattgaggaggcacatggagaactaaatcttttgtagtagctgagatctgcaatatataacgggacagtcaaagggcaatgtttttctgtaacatattggaaaaagaaaatgcagttatattccttttttatttgttcctttagtttgttttggttcagcagtcagcagttaagtatataacatggcccgcaaggacaatgaatccactcacattgcagaacaattccgaaaatggcaaactactactactactgttcagttttttaaaagttttgaaatgctgcacttacatttaaaaaaacaacaacaacattttttcaacaatttcaacaatgacacaaaaattcacatggaaatggggaagatggtctgttttgacagaaactgacaggaatcaatcaaaacaatcgaattttgaattgagtaaagtgcaatttcattggatagctaaatatctttgtaagatagagattgttgaaaattctatttttgtttttctagtcctttcaccccaggactctaaattattggggtaaaaaacagccttgcaagaaaaaggggagctatttttgctttttatgttttttattgttaaacttgtatccctttaaaaactgaagg

SEQ ID NO: 673 - DNA, 8159 bp, Homo sapiens
cgccttttttgaaaaagcattttaccaccaaccaccaccccaatccaacccacaccgaaccttcgcgcaccccctacaccccaacaacaacaacaactgcaaaatagaaaacaaatccccaaacccaggcgaaaagcagccaacaccggcggcggcggcggcctcggcaagcacggccagcgcgctcggactgcaagagggttaaaagtgtagattggatttcacccctggaaatctagcacgccgagtgaacttgaatctttggctatttaaggaggactgggtttgttgtgaagttgcggtgatccagcgcagagccccgtcctgattgatcgcatcgcggggctcagatgactgtaaaatgaatagatgaaattcttgcttctcgaagattttcttgggcatctcccggaaagtgcgttttaaggcgaagtcatgatgtattctcccatctgtctcactcaggatgaatttcacccattcatcgaggcacttcttccacatgtccgtgcaattgcctatacttggttcaacctgcaggctcgaaaacgcaagtactttaaaaagcatgagaagcgaatgtcaaaggatgaagaaagagcagtcaaagatgagcttctcagtgaaaagcctgaaatcaaacagaagtgggcatccaggctccttgccaaactgcgcaaagatattcgccaggagtatcgagaggactttgtgctcaccgtgactggcaagaagcacccgtgctgtgtcttatccaatcccgaccagaagggtaagattaggagaatcgactgcctgcgacaggcagacaaagtctggcgtctggatctagtcatggtgatcctgttcaaaggcatccccttggaaagtaccgatggagagcggctcatgaaatccccacattgcacaaacccagcactttgtgtccagccacatcatatcacagtatcagttaaggagcttgatttgtttttggcatactacgtgcaggagcaagattctggacaatcaggaagtccaagccacaatgatcctgccaagaatcctccaggttaccttgaggatagttttgtaaaatctggagtcttcaatgtatcagaacttgtaagagtatccagaacgcccataacccagggaactggagtcaacttcccaattggagaaatcccaagccaaccatactatcatgacatgaactcgggggtcaatcttcagaggtctctgtcttctccaccaagcagcaaaagacccaaaactatatccatagatgaaaatatggaaccaagtcctacaggagacttttacccctctccaagttcaccagctgctggaagtcgaacatggcacgaaagagatcaagatatgtcttctccgactactatgaagaagcctgaaaagccattgttcagctctgcatctccacaggattcttccccaagactgagcactttcccccagcaccaccatcccggaatacctggagttgcacacagtgtcatctcaactcgaactccacctccaccttcaccgttgccatttccaacacaagctatccttcctccagccccatcgagctacttttctcatccaacaatcagatatcctccccacctgaatcctcaggatactctgaagaactatgtaccttcttatgacccatccagtccacaaaccagccagtcctggtacctgggctagcttggttcctttccaagtgtcaaataggacacccatcttaccggccaatgtccaaaattacggtttgaacataattggagaacctttccttcaagcagaaacaagcaactgagggaaaaagaaacacaacaatagtttaagaaattttttttttaaataaaaaaaaaggaaaagaggaagactggacaaaacaacacaaaggcagaaaggaaagaaactgaagaaagaagataatagaccagcaattgcagcacttacaatcactaattcccttaaggttgaaactgtaatgacataaaaagggtcgatgatatttcactgatggtagatcgcagcccctgcaacgtagcctttgttacatgaagtccgctgggaaatagatgttctgtctctatgacaatatattttaactgactttctagatgccttaatatttgcatgataagctagttttattggtttagtattcttgttgtttacgcatggaatcactattcctggttatctcaccaacgaaggctaggaggcggcgtcagaggtgctgggtgacagagccatgagccagccattttataagcactctgatttctaaaagttaaaaaaaatatatgaaatctctgtagcctttagttatcagtacagatttattaaatttcggcccttaacccagccttttccagtgtgtaacccagtttgaaatcttaaaaaaagaaaaaatgaaaaaaaaaggaaaaaaagaaaaaaggaaaaaaacagtttgaacacaaaggctctatggaagaaatgcctctatgtaggtgaagtgttctctctgcatgcaacagtaaaaattaatataatattttccccacaaaagaaacacttaacagaggcaagtgcaatttataaatttatatctaaaggggaatcatgattataagtccttcagcccttggactctaaattgaggggattaaaaagaatttaaaataattttgaacgaatttattttcccctcagtttttgagggcattaaaaaggcattaaatcaagacaaatcatgtgcttgagaaaaataaaattaatgaaaacacagcacttatgttggtttagctgcagcctccttggaggtagaatttatttatttaaaattactggttgcatcaagaacccatagggtgtacaaaaggttctataaaatctgcattatagagacaaagaggcaggcaaatccatgtcacaagggtaaagcttacagtttacaaactgggaacgccagggtgtaggatataaaaacgcactcttgagaaaacaaatgtaatcagggtgctgaaaacttgcatggtgctttcagacattagccttgttcaacaaatttcttgtattgacagatccatagtgtgcatgggcagacacattttgcctctatgtctcttaaaattttaattaaaaatactctttccagtaatcctaatttgcacgaagatataatgtccacattacgtgccttgccttgaaatctaaaaaacaaaaaacaaaaaaaaaaaaacaaaaaaatacaacaaagtgacatcactacacttgttttgctgcatttattatcattttaaatctttaccatttttatgacaaaatattttgtactccagacgaagaaaaatgtgtgacatcatggattttttagacagttatacctttatctcacatttataaagcatatcatggctgtgtatagttgccgcttaaaaattgtaatcgaccagcaatattttcagtattttggtgtttttttctattaacctttcatgtttttcatcttccaattaatatttgggggggaggggtttcaaatttatacgaattatgcaataccaagttttgcctatgtaggtagtgcttttagctgtattggttattataggtaagtacacagatttaaaaaaaaaataatgtatgcttttttgtttgtttgtttgttttaattgaccaaagtgggtactgctatttttgcagtgtgatgaggtccttttgtgtactgagagatggacaggggattttttttaatatacatatatatatattctggggtgggtgggaggatttttaacactttgcagtgtagctgtgaagcagtgcaccctgagatgggcctgggctgcaaagcgactgttctgcctactgtgacaaacttcaacttacacaggttcccctctctaacttcccacctgggttgcaagctgaactcattactggttttcataacaacacaatagtaagaacaagcaaacacaacaaattctcctggaggcagacttggcttaaaaaggcagacttggcttggtgatagtttttcttgaaagttccagatccacagtggagagtgagcctgtctcatatttggcaaaaatatttgttgaaatgtccacataggggatgttggatgtttaacacttttgagagtttaacacatgaatattctttctcctagaaaacacattagacctgttggagggagtctcccgtattccttttctgccacttttcgtccccatttcatttcattaatgataggatatgatttacctgtgacttactacttcaaatggatggcagtgcacttggatttttttttaatatccagaagattgaacagagggttgctattgttgaatgtatttggactgatagattaaaatcaaagttcaatttttaaggaacaaaaaagtaaatcctgttttcattttatctccccttttaaaactgagaaccagagcagaagggaaatatagaattttaagcaattaatcttcctgtggatgaattaaacccattagatgctgatgggatttttttaaggaatggtaccttaactatatatttgatttcgtttcccctgagggctagaggctgaatggaggctggttttattttgcctttccctcaccgcccagtcccattgagtgtattcattactagaaggaaaatctttcagaattggtgacacatggtaggctgtcttaaggagtcccctggcccccttcccctaggccatggcctaataaaataaactgtcaattgttctcacagcatatcatttaataatgaatactttagaacaatgcttatgggctggagaattgtatttgattagcccattcagtttgatagcccaaatgctgaacagcacagcgggatcctagcagtgcaagttcaaaagtaagtccaatcatttctgtgatactcgccctggtagcaaacagatcatctcagccaagctcttcatgtatctttgacctattaggtgaacaaatgaacctcacaggacacacagtattttttaaaggcagactcgctctcttttttgccagtgagcagttctagctaaccaagttacacactgtgggtattcctgcctgcctcttgaatacaaaggcctagttcaagtgttgctttttttatttcaaatcaattttttcttctttcctttttgagataaaactattaaaagtactactatatatataaaatctcaaatcaacttttcggcctcctcctcgtgtaccaggaagtatattctgacgaagggccccacttttgcaggtcttgcacgcccctcccttacccagaactgcagagcttcaggatggcgaaggtcacccaagggcatgagtagggagtggtgtctccaaccatcagttccgtggcactgttcagcctttgtgtgctgccctgccacccaccactcacagtgcctctgaagcgtgttacccctggagtgacgtgagcatttgaggcttgtctaaggaaaaaaataaaaggcagtgaaggagactgtacataaagacatggcaaaaatcttaattatagcaatatagttatcgggtaatgttcgggtgggcagctccattaaaaaatatgtgaatgaatctgtgaagctgcaagtagcgagaagagcgaaaggtcttcttaatgaaccgcctaccttgtagacagtaatttgtacactgtatagttttgttaagaattttttttaaattaaaattcccatgtttgtaaagctaactttttaacaattataatggaactatatgttgtttccatttttaaagtaaacaagaatattccttgtttagagactggacttgagttaaaactctccagtctcttaagttatgtattaaaaagaaaatctgtccatgttaggagttatttcacagattcctgtgcttgaaaagcataggatactaatcctttaaaaaagtgtaaatggagaaaagttatattttatgaaggttattttgttgtatttagtattggaaaagttggtttccagagcatttcagaatgtcgaagcaccactgtctttttattagtatatacggcctttagcaaaagtttttgtgattgttacgtgatggtatttaaggttaagtttcacagagcattcaggataggcagaaaactaaaacagtgctatgtctcacataacgtgtcctcagggagcagaatcttggatttgtgacttgtagcttcataaggactcaacgaaagagattgcacagggacatcttcagcggtgtgacagcaggacatgttctttacctagattcaaattctatgtactgtgtgaaatgatgaaggctgcagaaagttatcccatattcagtgtacagtattcatttttaatgaaacaactctacaatattgctggcagataggccccaagcatgacattcaatatagtttacatgttcctgtcaaggtcttttgttaacattaaccagctgcatgctttctggactttaagaaattgggtttctatagaaaactttttttttttttttttttttaatgtgcaggctattcaagttcaatagtaaaagctcaaaaatgaatgttctactccatgctgaaggagctgaaagctgccttcttcatattttgcactttctggtagttcccctgttttttctaattccctaaaattgtgtgggtggagtggagccctgcagttggggggtaacatggaccactgattttgccctttgaccctgcacaatgacctttgcatcagccaaactcattgccatgacaactctttgtactgtgtccgtgccacagatctgttggtcacattgttaatagtaaaggggacaagttggagacggtcaatttttacattttttgttgcaattttttcttcaatggttgtaagtagtttttttttttttttaataataaaagggttcactagttaatactctagaaatatctgtgtgttgcaattcaaatgtatgttgagattgtgaaaagcgcttcagtgccactagcttaccggtacactagactaagcccttgatgacttattgcatgatacagtaccaggaacaacaggtggcctaaatacatgaaaagcagtgtaagctagtgacactaaagccagtcttgtattactgtatttttgacagaatggttttgaaaactgtgctacagggactgatgtggcaaatatatctctttatgcagaaggaagtctttttttttcttttttttttttttaagaagtatggctttttatgcatccttcatcgagggcattgaagttgcatggactgataaaagttgatgcaaaacaagaaagaaacaaacaaaaaaaaaaaaccagcaaaatgtttaccaaaaaactcaaacaaatgagcagtgcctgttcaatttcacagtctctgttgagttcagttgtaaatatgtttcaaatgacattttcttgggaaaaaaaatctctacaacattgtagaatgtgaggggtaactacatcccaggcataggtttctcaaagctgcagtagattatgtcttcatcaagctgttaatttgtgcttatatcatatagaacttttagcatcctgggaagagctgcccccacctcaatgatatttctctgagaacaacttttgtaggactgtgtgtttctttagatacatttagtacaactgtaggtgacgagtagtcagttattgcttgctagctacacaccagggttgatccattttaaaacttttggcattttgtcctcatgggccataaatacagaaccttgtattttaattaaatttttttacaaaaggaggcacatgcacaatctccatgtaacaaacctttagcagtaggatgtattatacgacagttacttaatttctagagttcaggcctctgggatcaaccccagactgggccagaatgttagtgaaggttttattgtgcccggttggaggataacgttctttgggtactttttgtgggttgcaaatgaactcaattgccacaagttttaaactggtgtaaatcaagcttgacttaatgtgattgttactgttatatccagcctatactgctagcagctgctcatactgcagtcaattactggaagcggatatatttcctatgcaaaaactgtttaaacaataaaatgagctatgctacaga

SEQ ID NO: 674 - DNA, 2185 bp, Homo sapiens
aatgactcagtaagttcagcgcgcccgctccggccggccctgcgcctcccgccgcgcccgggatgtattcgtccccgctctgcctcacccaggatgagttccacccgttcatcgaggccctgctgcctcacgtccgcgccttcgcctacacctggttcaacctgcaggcgcggaagcgcaagtacttcaagaagcacgagaagcggatgtcgaaggacgaggagcgtgcggtcaaggacgagctgctgggcgagaagcccgaggtcaagcagaagtgggcgtcgcggctgctggccaagctgcgcaaggacatccggcccgagtgccgcgaggacttcgtgctgagcatcaccggcaagaaggcgccgggctgcgtgctctccaaccccgaccagaagggcaagatgcggcgcatcgactgtctccggcaggcggacaaggtgtggcggctggacctggtcatggtcatcctgttcaagggcatcccgctggagagcaccgacggcgagcgcctggtcaaggctgcgcagtgcggtcacccggtcctgtgcgtgcagccgcaccacattggcgtggccgtcaaggagctggacctctacctggcctacttcgtgcgtgagcgagatgcagagcaaagcggcagtccccggacagggatgggctctgaccaggaggacagcaagcccatcacgctggacacgaccgacttccaggagagctttgtcacctccggcgtgttcagcgtcactgagctcatccaagtgtcccggacacccgtggtgactggaacaggacccaacttctccctgggggagctgcaggggcacctggcatacgacctgaacccagccagcactggcctcagaagaacgctgcccagcacctcctccagtgggagcaagcggcacaaatcgggctcgatggaggaagacgtggacacgagccctggcggcgattactacacttcgcccagctcgcccacgagtagcagccgcaactggacggaggacatggaaggaggcatctcgtccccggtgaagaagacagagatggacaagtcaccattcaacagcccgtccccccaggactctccccgcctctccagcttcacccagcaccaccggcccgtcatcgccgtgcacagcgggatcgcccggagcccacacccgtcctccgctctgcatttccctacgacgtccatcctaccccagacggcctccacctacttcccccacacggccatccgctacccacctcatctcaacccccaggacccgctcaaagatcttgtctcgctggcctgcgacccagccagccagcaacctggaccgtcctggtatctgggatagcaaaggtcttcttccctcgccccttctccatcgtcccaggaatcccagggggcagcacagccggcccccggcccacgttttcggtggaaaattagagtgaacaagaacacccctgccgactcccagcccggccaaaaagacaaaacacatagacgcacacactcaggaggaaaagaaaaaacaaaggcagaagaagaagaagaagaaataaaaacccacccaagcaagaagacaaaaggtaaagacgcaacgtttccaactctcgggacgccaaggccgcaggactggagggccaggccccgccacccccacgggagacccgggacagggcgtcttcctaagttattcatctcctctccgcctgctgctcgggaaggacagacgccggccgcccgcccgcgccccggaggccctggctctgtccggagaccaggtgagcacagcctggagcctgtgcccagggccgacaggcgcgacacccagcaaggccacctctccccgggcccccgcgcctctgccggacacggaccggcccctcagcccccaccgaggacgcagccactggggggaaagggagacacagcggaccccggccgggcagcggagaccgcagaggcgggcagggtggggcaggcgagtggtgtcgcgggggtgcgtggcgcttgcgagccctggccaggggaggaagtgaggcccaggcacctgctgcccctcgagggggccctgcctgccgcggggcctccccacaagcccctcccaaagcgccggccgactcgctgtctcgctggggactctttcagccctcgcgcccgcccgtttgggaggagaagtctcta

SEQ ID NO: 675 - DNA, 2104 bp, Homo sapiens
acgtagcgcggcgctcggaactgacctactaacacacatctctccgcgcggccacggcgcccgcggacccggcgcgcccgcccgcctcccgcgccgcgccctcgccgccgcccgcctcccgccgcggccccggaggcccggcccggcccgagccccgagcgccggcggcccgactcccggccgcccctttctttctcctcgccggcccgagagcaggaacacgataacgaaggaggcccaacttcattcaataaggagcctgacggatttatcccagacggtagaacaaaaggaagaatattgatggattttaaaccagagtttttaaagagcttgagaatacggggaaattaatttgttctcctacacacatagatagggtaaggttgtttctgatgcagctgagaaaaatgcagaccgtcaaaaaggagcaggcgtctcttgatgccagtagcaatgtggacaagatgatggtccttaattctgctttaacggaagtgtcagaagactccacaacaggtgaggagctgcttctcagtgaaggaagtgtggggaagaacaaatcttctgcatgtcggaggaaacgggaattcattcctgatgaaaagaaagatgctatgtattgggaaaaaaggcggaaaaataatgaagctgccaaaagatctcgtgagaagcgtcgactgaatgacctggttttagagaacaaactaattgcactgggagaagaaaacgccactttaaaagctgagctgctttcactaaaattaaagtttggtttaattagctccacagcatatgctcaagagattcagaaactcagtaattctacagctgtgtactttcaagattaccagacttccaaatccaatgtgagttcatttgtggacgagcacgaaccctcgatggtgtcaagtagttgtatttctgtcattaaacactctccacaaagctcgctgtccgatgtttcagaagtgtcctcagtagaacacacgcaggagagctctgtgcagggaagctgcagaagtcctgaaaacaagttccagattatcaagcaagagccgatggaattagagagctacacaagggagccaagagatgaccgaggctcttacacagcgtccatctatcaaaactatatggggaattctttctctgggtactcacactctcccccactactgcaagtcaaccgatcctccagcaactccccgagaacgtcggaaactgatgatggtgtggtaggaaagtcatctgatggagaagacgagcaacaggtccccaagggccccatccattctccagttgaactcaagcatgtgcatgcaactgtggttaaagttccagaagtgaattcctctgccttgccacacaagctccggatcaaagccaaagccatgcagatcaaagtagaagcctttgataatgaatttgaggccacgcaaaaactttcctcacctattgacatgacatctaaaagacatttcgaactcgaaaagcatagtgccccaagtatggtacattcttctcttactcctttctcagtgcaagtgactaacattcaagattggtctctcaaatcggagcactggcatcaaaaagaactgagtggcaaaactcagaatagtttcaaaactggagttgttgaaatgaaagacagtggctacaaagtttctgacccagagaacttgtatttgaagcaggggatagcaaacttatctgcagaggttgtctcactcaagagacttatagccacacaaccaatctctgcttcagactctgggtaaattactactgagtaagagctgggcatttagaaagatgtcatttgcaatagagcagtccattttgtattatgctgaattttcactggacctgtgatgtcatttcactgtgatgtgcacatgttgtctgtttggtgtctttttgtgcacagattatgatgaagattagattgtgttatcactctgcctgtgtatagtcagatagtccatgcgaaggctgtatatattgaacattatttttgttgttctattataaagtgtgtaagttaccagtttcaataaaggattggtgacaaacacagaaaaaaaaaaaaaaaaaaaaa

SEQ ID NO: 676 - DNA, 5576 bp, Homo sapiens
gcggccgccgcctgccgggcctcccctcgccgcggccggccgccgcgctcccgcccgggcgcccagctatgtactccccgtactgcctcacccaggatgagttccacccgttcatcgaggcactgctgcctcacgtccgcgctttctcctacacctggttcaacctgcaggcgcggaagcgcaagtacttcaagaagcatgaaaagcggatgtcgaaggacgaggagcgggcggtgaaggacgagctgctgggcgagaagcccgagatcaagcagaagtgggcatcccggctgctggccaagctgcgcaaggacatccggcccgagttccgcgaggacttcgtgctgaccatcacgggcaagaagcccccctgctgcgtgctctccaaccccgaccagaagggcaagatccggcggattgactgcctgcgccaggctgacaaggtgtggcggctggacctggtcatggtgattttgtttaaggggatccccctggaaagtactgatggggagcggctctacaagtcgcctcagtgctcgaaccccggcctgtgcgtccagccacatcacattggagtcacaatcaaagaactggatctttatctggcttactttgtccacactccggaatccggacaatcagatagttcaaaccagcaaggagatgcggacatcaaaccactgcccaacgggcacttaagtttccaggactgttttgtgacttccggggtctggaatgtgacggagctggtgagagtatcacagactcctgttgcaacagcatcagggcccaacttctccctggcggacctggagagtcccagctactacaacatcaaccaggtgaccctggggcggcggtccatcacctcccctccttccaccagcaccaccaagcgccccaagtccatcgatgacagtgagatggagagccctgttgatgacgtgttctatcccgggacaggccgttccccagcagctggcagcagccagtccagcgggtggcccaacgatgtggatgcaggcccggcttctctaaagaagtcaggaaagctggacttctgcagtgccctctcctctcagggcagctccccgcgcatggctttcacccaccacccgctgcctgtgcttgctggagtcagaccagggagcccccgggccacagcatcagccctgcacttcccctccacgtccatcatccagcagtcgagcccgtatttcacgcacccgaccatccgctaccaccaccaccacgggcaggactcactgaaggagtttgtgcagtttgtgtgctcggatggctcgggccaggccaccggacagcattcgcaacgacaggcgcctcctctgccaaccggtttgtcagcatcggaccccgggacggcaactttctgaacatcccacagcagtctcagtcctggttcctctgataagatcgacaaaagaaacaacaaaatgagaagaagaggttcctcgaaaggggggagaagaaattttgagaatggaaaaatcccccagcccagcccagccccaccgaaaagcaaaaattacacgtcgtcagccactcagcccttctctcctccagcccggggacccccgcgggccccagaagcagcccagttctcagagagcccttggaaggggtctcggtggagctgtgcaccagcagccaagcagaaagaaacacgcgacatggactctgtcaagtagaggacagaaagcaagaaaggatgcagaactgccttcctccccctgaccccgccccggccttctggggaaggaacaaagtccccaaacaaagcaaccagcacaattctgaaggggcctggcctccaccctcaccccttcctaggggaaccccaccctccacacagccggagctgccctagggagcctggagggccagcttgtaaagatgatggggtttagatccctcaggctctcccctccagactccgcccttccctccctccctccctccctccctctctgccaaggctccagcttcttcccccagctgctcccgaccaggagggggagagcagcctccacttaccccaccccacccttgggctaaaagcccccaggcgggcagggggtgacccctggagctagttgcgtgtcccagaatggagggtgttctgacaccccaccctgagccgcaagagcagtcctggggccctggacccctctgtacagtccgtaggaaaaagtcggaatgctctcgacggcctcgtcccagcctgggacaggccccctttcccctctctctgcaggccaggagggcctccttcctgccacgagggaggggagtcgggccccaggtcgcccccgcccccagccctgcatgcaggtgccctcgctccgccccatcagttcctgcccctgcccctcatgcagactgccctgctggggccgggccggagggtggagcagaaaggggaccccggagccgagcgaggaggaccaggcagccgccgctgccgcgctaagccaccacctgcgcttaggtaggcgtcctgctcgccgactttcagttccttgggagggtgttgggtgtcgtccttttcaaaagtgttttggagctttctgtgccccccgactttcccccgcctccccgccccccacgtggccacttttctctggattttagctgtaatgtctttactctttatttaggggtggggcattcattgtttgggtcttttgctgttggaatgggaactcctcctccatttgagcaacttgggaacaatttggtaacacaccacaggaagtagctctcccccccagccccctcctccctcaagggagggttggggggcctgtccagagggtcttcagaagcccccctgggagggaggggaggatgagcacgcccagctcccctccagggtgtgacttggcccctctggcttgtctttctgtgccttactcctcctcctgcgtctcccgttcctggccccttcttgagtccttgtgcctctctctttctctctctttcttaattgtatgaaaacacaaagcacaggtcaggatcctctgagagaaaatcaacattgcaccacgtaggggtgggctatgggctgtatttattgtgaatctagtttgtgaggctgtggccccgagctggcggagggagggaagaggagggagtgacgggaggggaggaggtcagcgacctggggccgtagcggcaggcgaacggtgcctgctacccagctggaagccacaaggtggctggctccaggggcggcttttgttggaagttgagtgaagccctccccctgtcctcagcgtgcagccctagaggaccccagggctgaggggcagtggatcctgcgggagtctcccggggcgtggggagtaaggccccgggggtggggggccgggtgggccgggcgtgacgcgcggtcaaagtgcaatgatttttcagttcggttggctaaacagggtcagagctgagagcgaagcagaaggggctccctgtccggcccacgtgccctttccctcgacgacagtcgagggctcgggctctgtgggactgtgggagctagggtctgcggggcgcctgcccgggcgaggtcggaagctgcaggccagctgggcccgggccggagcgtgcccggcggggctgcccgggcgggcagggggtgggggctgctcctttcccaagtggtgttgtgaggggcaatgagggcaacaggagatgtggggacgtgttaggagagaaaaaaaaaaaaacaaaaatatatatgggggaaattaacttttttttttcattgaaccaagtgcaatgcatcagagagttttcctatctttgtatgttaagagattaagaaaaaaaaattctatttttgttgtaatgtcctcgcggctctggggacgctaaaagaaccgggcctgccccgccctgcgcggggataacgaaagctgagtgtttttcccttttttttgttcgtttttagtttttttttttttaagtcgttttcctgcgttgacgaggatgatctggggtttttatttgtttcgtcgttcgttctgtttcggtgggagggctgaaggaaacgttcacattttagagtttaaaaaaaacacctcgacatttaaaaaatcaaccaacacaagatcaaaaaggaaaaggacgagagaaaaattatttttaagataattaaacataaaaccctggtgcttcttacattataaagtacgttttaaagaacccacaaactattatacataagtttatgaatcaattaaatatcctgcacttgttaggaatacgcatatcccttctttgttgagtttaacggaacgggacagcggcgtgcccccggcggctggactgctccggccgcgggtctccccgggcgcccctccctggggcccagcacccctcctcgccccatccccgtccgggtacgggggcgcggcaggggtccccggcccctcccccgcagaggtcaatgccaacgaacaaacgtcccctccctccctccctctccgccccgagcgcccttctttgagccagacgccaacttgaccctcaccagcattatcaggagcgcgctcagcaagttggtagtttcctcccccctttcccggcgcccctcccgcccccattcaacatctctcatcctatccccgaccccctccggggaacaccgggaaggctcgacgctccaggacaggaccagccacgcagacaggtcgatttgcccaggcccgcgcccgcacgcacgcacgcacacggccccgcacacagccccgccccaccccgcaaccagccctgtcgactgccttatacacccgcccccgcgctggccggccgacctagtgccttgttctcacccccgtgctggcggagcggacgccgcgctctgggtcccagaggggccgggtggctcagacgacccaccactcccccaccctgaccgtgctgaacagacccccccacacgagagaaaataaaggagcaataaagtcacgagaactttcgtcccccaatcgagagcccgaggggcaccccagccccgcctctgctcccccccaccccacccaccctcggggcgcccccctccccccgcaagccagcctgggccagccccgcttcggcccctcccgggagatccgtgcgcccgaccagcaccagcatcgcggaccgcaaaggccgcccgtcccgtcaaacaagtttcttcttaggctaagaaacgcagtatatacgagtatctctatatatagtactaatggatttggtgtgcttcccccttagcgtccccctccctctgctcctcctccttcagcctggtctccccctcttctctgccctccacccccgtctctgcactgagatacataagaaacaagggtagtttactgtctgttttgttttctgggttttcagtgtcctagcggaatgcaagtaggcagccagcccgtctgttccctctccgccccgccccgccccgcccccgtcactgcgcttctgttataccatctttgcctgactctctccggcttctccattgaatggctaatgtgtatgtgaaataaagaaataaagaaaaacaaacgcga

SEQ ID NO: 677 - DNA, 1198 bp, Homo sapiens
ccggcaaagcccagctacaggcgggcgactgcggggggcccctgaggcggcgggggccatggctggggtcgcgtgcttgggaaaagctgccgacgcagatgaatggtgcgacagcggcctgggctccctgggtccggacgcagcggcccccggaggacctgggttgggcgcggagttgggcccggggctgtcgtgggctcccctcgtcttcggctacgtcactgaggatggggacacggcactgcacttggctgtgattcatcagcatgaacccttcctggattttcttctaggcttctcggccggcactgagtacatggacctgcagaatgacctaggccagacagccctgcacctggcagccatcctgggggagacatccacggtggagaagctgtacgcagcaggcgccgggctgtgtgtggcggagcgtaggggccacacggcgctgcacctggcctgccgtgtgggggcacacgcctgtgcccgtgccctgcttcagccccgcccccggcgccccagggaagcccccgacacctacctcgctcagggccctgaccgtactcccgacaccaaccatacccctgtcgccttgtaccccgattccgacttggagaaggaagaagaggagagtgaggaggactggaagctgcagctggaggctgaaaactacgagggccacaccccactccacgtggccgttatccacaaagatgtggagatggtccggctgctccgagatgctggagctgaccttgacaaaccggagcccacgtgcggccggagcccccttcatttggcagtggaggcccaggcagccgatgtgctggagcttctcctgagggcaggcgcgaaccctgctgcccgcatgtacggtggccgcaccccactcggcagtgccatgctccggcccaaccccatcctcgcccgcctcctccgtgcacacggagcccctgagcccgagggcgaggacgagaaatccggcccctgcagcagcagtagcgacagcgacagcggagacgagggcgatgaatacgacgacattgtggttcacagcagccgcagccaaacccggctgcctcccaccccagcctcaaaacctcttcctgacgacccccgccccgtgtgatttgtttcattgttaatataatttccagtttaataaacaaaaccctagttctgacaaccagaaaaaaaa

SEQ ID NO: 678 - DNA, 2581 bp, Homo sapiens
aatgaatgaatgaatgaatgagtgaatgaatcaacgaaggagtgagtcaaggcccgggaaccacagactccaagcctacgcagagcccgggaagggggattccggaggggcggggcctctttccggaagcgcccgccgggggcggggagggggcggggccatccgcgtgaggcgaccctgttggtccggaggggcggggcgaggaggaggacccgcttgggcggttcggctgcccacagtaaccgctgggtggacctggccagcgctccgaaccttgtcctcgctgcgcgccggcccctcggagccccacagcccgggaaggaggccgccgcgggccgggcgcccgctctgccaagcggacccgcaacccggaaaggcggcgcggcggagcctggagccggatcctgctcagaccgggccccggccggccagagccgcgggcatgtcggaggcgcggaaggggccggacgaggcggaggagagccagtacgactctggcattgagtctctgcgctctctgcgctccctacccgagtccacctcggctccagcctccgggccctcggacggcagcccccagccctgcacccatcctccgggacccgtcaaggaaccacaggagaaggaagacgcggatggggagcgggctgattccacctatggctcctcctcgctcacctacaccctgtccttgctggggggccccgaggctgaggacccggccccacgcctgccactcccccacgtgggggcgctgagccctcagcagctggaagcactcacttacatctccgaggacggagacacgctggtccacctggcagtgattcatgaggccccagcggtgctgctctgttgcctggctttgctgccccaggaggtcctggacattcaaaataacctttaccagacagcactccatctggctgtacatctggaccaaccgggcgcagttcgggcactggtgctgaagggggccagccgggcactacaggaccggcatggtgacacagcccttcatgtggcctgccagcgccagcacttggcctgtgcccgctgcctgctggaagggcggccagagccaggcagaggaacatctcactctctggacctccagctgcaaaactggcaaggtctggcttgtctccacattgccacccttcagaagaaccaaccactcatggaattgctgcttcggaatggagctgacattgatgtgcaggagggcaccagtggtaagacagcgctgcacctggctgtggaaacccaagagcggggcctggtacagttcctgctccaggctggtgcccaggtagatgcccgcatgctgaacgggtgcacacccctgcacctggcagctggccggggtctcatgggcatctcatccactctgtgcaaggcgggtgctgactccctgctgcggaatgtggaggatgagacgccccaggacctgactgaggaatcccttgtccttttgccctttgatgacctgaagatctcagggaaactgctgctgtgtaccgactgaagccaggcagggtctgggatcctcagggctccacctctccatctggaagccggagccataactgctgcagtttgggcccaggctatgtgctcttctggtgccctagggactgctgtggccagagcctggggccagccagtacagtcctgagccgaggaggagggactgcaagtggaagagagccagtctggaaggaagagctttccaggtggacagggcttcttggaagacccccaaagccccaggtatcctgggtgaagcctgtttgcctctcttgaaaatggcaggtgctcttgttttacccatgttgggtcagcctgaaactgccaaccagtaggaagcatggactctcctgagtgagaagagactgaaataggagcaagcagaaccctgagaggtgtcccatcttattgctgttgaggaccctgaaacaccgttgtttaaagacttcacacagaaggctctgaactgagccactggggaagggaagtttcagtaacatgacactaaaatggcagagacgttaaaaaaagtttttcccttctagagctgttttgcgcgcatgcatgtctgtgtgcattggggctttttagacaggcctgccctgtgactttgtggtagaggcagagagaaggaaattgtcccctgagcacggtagggccttgctgggtggggtcagaggccagtagttccaggcctttctctgtgtccagcacagacccttgtccttgctgtggaaatgatgagggatggagggacaagaggaagaatgagaggacacacgccctggagccctcaccactgccctgggggttgccatctggaggagcctggggataagggtaacccagggaggctgggcacgagggagctgactccacgtttttccccccgttcctcaccttcgagggccctgctaggtcacccctatgctggcatgaagagcatggggcaataaaccagcacagtctctgaccacttggagcgtctcatccagtgagagagacagccgttaaaagcataaacatccaaataaagatgcctttccaagtt

SEQ ID NO: 679 - DNA, 1510 bp, Homo sapiens
gcgccatttcctccagcctggagtgtctccgcccttcccgcctcccgtctccgagcttcttaaacacaggccttgggcctacggctctgggggtacttgggggggcgggggcaggtctgatgagtaacccctccccccaggttccagaggaagaagcctccacatctgtctgccggcccaagagttccatggcctccacttcccgccgccaacgccgagaacgtcgctttcgtcgttacttgtctgcaggacggctggtccgggcccaggccctcctccagcgacacccaggcctcgatgtagatgctgggcagcccccaccactgcaccgggcctgtgcccgccacgatgcccctgccctgtgcctgctgcttcggctcggggctgaccctgcccaccaggaccgccatggggacacggcactgcatgctgctgcccgccagggcccagatgcctacaccgatttcttcctcccgctgctaagccgctgtccctccgccatgggaataaagaataaggatggggagacccctggccaaattttgggctggggacccccctgggattctgctgaagaggaggaagaagatgatgcctccaaggagcgggaatggagacagaagctccagggtgagctggaggacgagtggcaggaagtcatggggaggtttgaaggtgatgcctcccatgaaacccaggaacctgagtccttctcagcctggtcagatcgcctggcccgggaacatgcccagaagtgccagcagcagcagcgagaagcagagggatcccgtcgacccccacgtgctgagggctccagccagagctggcgacagcaggaggaggagcagcggctcttcagggagcgagcccgggccaaggaggaagagctgcgtgagagccgagccaggagggcgcaggaggctctaggggaccgagaacccaagccaaccagggccgggcccagggaagagcaccccagaggagcggggaggggcagcctctggcgatttggtgatgtgccctggccctgccctgggggaggggacccagaggccatggctgcagccctggtggccaggggcccccctttggaggaacagggggctctgaggaggtacttgagggtccagcaggtccgctggcaccctgaccgcttcctgcagcgattccgaagccagattgagacctgggagctgggccgtgtgatgggagcagtgacagccctttctcaggccctgaatcgccatgcagaggccctcaagtgaccctagggaagaagcaagaaacttcggggctgcagcctcaggatgaggcagaaggaagggtaagggaaaggatggggaccacaaggaagagccaggtgctgctcagcagaggatatgggtgggagcgaaagttgtaacaagtgggggtggggggtgcgggccgccaccactgctccttgactctgccgtttcctaataagacctggttccacatctcaaaaaaaaaaaaaaaaaaaaaaaaaaaa

SEQ ID NO: 680 - DNA, 4519 bp, Homo sapiens
cgcggcgatccgagcatgagcctggagcgcgagcttcgccagctgagcaaggcgaaagccaaggcgcagagggccgggcagcggcgcgaagaggccgcgctgtgccaccagctgggggagctcctggccggccatggccgctacgccgaggctctggagcagcactggcaggagctgcagcttcgggagcgcgctgacgaccctctgggctgtgccgtggcccaccgcaagatcggagagcgcctggccgagatggaggactacccggctgccttgcagcaccagcaccagtacctggagctggcacattccctgcgcaaccacacggagctgcagagggcctgggccaccatcggccgcacccacctggacatctatgaccactgccagtcgagggatgctttgctgcaggcacaggctgcctttgagaagagcttggctattgtggatgaggagctggaggggacactggcccagggagagctgaatgagatgaggacccgcctctatctcaacctgggcctcacctttgagagcctgcagcagacagccctgtgcaacgattacttcaggaagagcatcttccttgcggagcagaaccacctttacgaggacctattccgcgcccgctacaacctgggcaccatccactggcgcgcgggccagcactcccaggctatgcgctgcttggagggtgcccgggagtgtgcgcacaccatgaggaagcggttcatggagagcgagtgctgcgtggttattgcacaggtcctccaagacctgggagactttttggctgccaagcgagccctgaagaaggcctacaggctgggctcccagaagcctgtgcagagggcagccatctgtcagaacctccagcatgtgctggcagtggtccggctgcagcaacagctggaagaggctgagggcagagaccctcagggtgccatggtcatctgtgagcagctaggggacctcttctccaaggcaggagactttcccagggcagctgaggcttaccagaagcagctgcgttttgctgagctgctggacagaccgggtgctgagcgggccatcatccacgtgtccctggccaccacactgggagacatgaaggaccaccatggggccgtgcgccactatgaggaggaactgaggctgcgcagcggcaacgtgctggaggaggccaagacctggctgaacattgcactgtcccgcgaggaggccggcgatgcctacgagctgctggccccgtgcttccagaaagcgctcagctgtgcccagcaggcccagcgtccccagctgcagaggcaggtcttgcagcatctccataccgtgcagctgaggctgcagccccaggaggcccctgagaccgaaaccagactacgggagctcagtgtagctgaagatgaagatgaggaggaggaggcggaggaggcggcagccacagcggagagcgaagccctggaggccggcgaggtggagctctcagagggcgaggacgacaccgatggcctgaccccgcagctggaggaggacgaggagcttcagggccacctgggccggcggaaggggagcaagtggaaccggcgaaacgacatgggggagaccctgctgcaccgagcctgcatcgagggccagctgcgccgcgtccaggaccttgtgaggcagggccacccccttaaccctcgggactactgtggctggacacctctgcacgaggcctgcaactacgggcatctagaaattgtccgcttcctgctggaccacggggccgcagtggacgacccaggtggccagggctgcgaaggcatcacccccctccacgatgccctcaactgtggccacttcgaggtggctgagctgctgcttgaacggggggcgtccgtcaccctccgcactcgaaagggcctcagcccgctggagacgctgcagcagtgggtgaagctgtaccgcagggacctggacctggagacgcggcagaaggccagggccatggagatgctgctccaggcggctgcctcgggccaagatccccacagctcccaggccttccacaccccaagcagccttctgtttgaccccgagacctctcctcctttgagcccctgcccagaacccccctctaatagcactagactcccagaggcctctcaggcccatgtcagggtctccccagggcaggcggcaccagccatggccaggcctcggaggagcaggcatgggccagccagcagcagcagcagctcagaaggcgaggacagcgcaggccccgcacggccgtcccagaagaggcctcggtgctcggccacagcacaacgggtggcagcctggacgcctggccccgccagcaacagggaagcagccacagccagcaccagccgggcagcctaccaggcagccatccggggtgtgggcagtgctcagagccggctggggcctggcccaccgcggggccacagcaaagcccttgccccccaggcagcgctcatcccggaggaggagtgcctggccggggactggctggagctggacatgcccctgacccgcagccgccggccccgcccccggggcactggagacaaccgcaggcccagtagtacctctgggtcggacagtgaggagagcaggccccgtgcccgagccaagcaggtccgcctgacctgcatgcagagttgcagtgcgccagttaacgcagggcccagcagcctggcttcagaacctccagggagccccagcacccccagggtctcagagcccagtggggacagctctgcggcaggccagcccttgggtccggccccgccccctcccatccgggttcgagttcaagttcaggatcatctcttcctcatccctgtcccacacagcagtgacacccactctgtggcctggctggccgagcaggcggcccagcgctactaccagacctgcgggctgctgcccaggctcaccctacggaaagagggggccctgctggccccacaggacctcatccctgatgtgctgcagagcaatgacgaggtgttggctgaggtgacttcgtgggacctgcccccgttgactgaccgctaccgcagggcctgccagagcctggggcaaggggagcaccaacaggtgctgcaggccgtggagctccagggcttgggcctctcgttcagcgcctgctccctggccctggaccaggcccagcttacacccctgctgcgggccctcaagctgcacacagcactccgggagctgcgcctggcagggaaccggctgggggacaagtgtgtggctgagctggtggctgccctgggcaccatgcccagcctggccctccttgacctctcctccaatcacctgggtcccgaaggcctgcgccagcttgccatggggctcccaggccaagccaccttgcagagtttggaggagctggacttaagcatgaaccccctgggggacggctgtggccagtccctggcctccctcctgcacgcctgccccttactcagcaccctgcgcctgcaggcgtgtggcttcggccccagcttctttctgagccaccagacagcactgggtagtgctttccaagatgctgagcacctgaagaccctgtccctgtcctacaacgccctgggagcccctgccctggccaggaccctgcagagcctgcccgccggcaccctcctgcacttagagctcagctccgtggcagccggcaagggtgattcggacctcatggagcctgtattccgatacctggccaaggaaggctgtgctctagcccacctgaccctgtctgcaaaccacctgggggacaaggctgttagagacctgtgcagatgtctctctctgtgcccctcactcatctcactggatctgtctgccaaccctgagatcagctgtgccagcttggaagagctcctgtccaccctccaaaagcggccccaaggccttagcttccttggcctgtcaggctgcgccgtccagggtcccctgggcctgggcctgtgggacaagatagccgcgcagctccgggaactgcagctgtgcagcagacgcctctgcgctgaggacagggacgccctgcgccagctgcagcccagtcggccgggccccggcgagtgcacgctggaccacggctccaagctcttctttcggcgcctctgaccctggcgctgcctttccccaccctcaccgaagcccctaataaatgaagctgctggccgggcgcggtggctcacgcctgtaatcccaacactttgggaggcccaggcgggcggatcacgaggtcaggagatcgagaccatcctggctaacatggtgaaaccccgtctctactaaaaataccaaaaattagccgggcgtggtggtggaagcctgtagtcccagctactccggaggctgaggcaggagaatggcgtgaacccgggaggcggagcttgcagtgagccgagatcgcaccactgcactccagcctgggcgacagaccgagactccgtctcaaaaaaaaaaaaaaataaaataaatgaaaaaa

SEQ ID NO: 681 - DNA, 5063 bp, Homo sapiens
gctgtttagctgtaattagggtgcaaggataaggtgtaagaactggctggaggttgaatgttttcctggaggagtgttagcatcaactagatccctggaatttctgcctttctgtctcaagatgcatgtctttgtccagagtacctgtggagaagaaacaatggattccttagaccatatgctgacagatcctctggaacttggtccgtgtggagatggccatggcacgcgcatcatggaggattgcctcctgggaggcaccagagttagtctgcccgaggaccttctggaggatcctgagatcttctttgatgttgtcagcctctcaacatggcaggaagtgttaagtgattctcaacgtgaacacctccagcagtttctgccccagtttcctgaagacagtgctgagcagcagaatgaactcatcttagccttgttcagtggggagaacttccgctttggaaaccctctgcacattgcccagaagcttttccgagacggacactttaaccccgaggtggtcaagtaccggcagttatgcttcaagtcacagtacaagcgctacctcaactcccagcagcagtatttccatcggctgctgaagcaaattcttgcttcccggagtgatctgctggagatggcccggcggagtggccccgcccttcccttccggcagaaacgcccttcaccatcccgcacacctgaggagcgggagtggcggacccagcagcgctacttgaaggtcttaagggaagtgaaagaggagtgtggtgacacagccctgtcatctgatgaagaggccacgttggatttacaagaacaattttcttttgaagatctcagctcatggcttccgagctctccagcacgttctcctagtcctgcggtgcccctgcgggtggtgcccacactttcaaccacggatatgaaaactgcagataaagtagaactgggggacagtgacctgaagataatgttaaagaagcaccacgagaagcggaaacatcagccagatcacccggaccttttgacaggggacctgactctcaatgacatcatgactcgagtaaatgctggcaggaagggctctctggcagccttatatgacttggctgtccttaaaaaaaaggttaaggaaaaagaggaaaagaagaagaagaaaataaaaacgatcaaatcagaggcagaggacctggccgagccgctaagcagtactgaaggggtcgcacctctctcacaggccccctctccgctggcaattcctgctatcaaggaagagccccttgaagacctcaagccttgccttggaatcaatgaaatatcttccagcttcttctctcttctattagagatcttgctgctggagagtcaggctagccttcctatgctagaggagcgagttttggattggcagtcatcgccagccagctccctcaacagctggttctctgcggcccccaactgggctgagttggtactaccagccctgcagtatcttgctggagaaagtcgagctgttccttccagtttctctccatttgttgaattcaaagagaaaacccagcagtggaagttgcttggccaatcccaagataatgaaaaggaattagctgccctcttccagctatggctagagaccaaagatcaggccttctgtaagcaagaaaatgaagacagctcagatgccacaacacctgtccctcgggtaagaactgactatgtggtgcgtcccagcacgggggaggagaaacgggtttttcaggagcaggagcgttacaggtatagccaaccccataaggcgttcacctttcgcatgcacggctttgagtctgtggtggggccagtgaagggcgtgtttgacaaggagacctcgctcaacaaggctcgggagcactccctgctgcgctccgaccggcctgcctacgtcaccattctgtctcttgttcgggacgctgcggctcgactgcctaatggagaaggcacacgggcagagatctgtgaactgcttaaggactcccagtttcttgcaccagatgtcaccagcactcaggtaaatacagtagtgagtggtgcactggatcggctacattacgaaaaagatccctgtgtgaaatacgacattggacgaaagctgtggatctacctgcatcgtgaccggagtgaagaagagtttgagcggattcaccaagcacaagcagctgcagctaaagccagaaaagctcttcagcaaaaacccaagcccccatccaaggtgaagtccagtagcaaggagagctccataaaggtccttagcagtggcccttctgagcagagccagatgagcctcagtgactccagtatgccacccaccccagtcacacctgtaacccccaccacaccagcattgcccgccattcccatctcccctccacctgtatcggcagtgaacaaaagcggcccttccacagtctcagaaccagctaagtctagctcgggtgttcttctggtgtcttcaccaacaatgccacatctgggaacaatgctttccccagcttccagccagactgcacccagttctcaggctgccgcccgggtcgtgagccactctggctctgctggactgtctcaggtgcgagtggtggcccagcctagccttcctgctgttccccagcagtcgggagggccggcacagacattgccacagatgccagcaggaccgcagatccgggttccagccactgccacacagaccaaagtagtgccccagacagtaatggccactgtgcccgtcaaagcgcagactacggcagccactgtgcagcggcctggacccgggcagacagggctcacggtgacaagtctccctgccacagccagccctgtgagtaagccagccacgagttctcctgggacctctgctcccagtgcctccacggctgccgtcattcaaaatgtcacaggacagaacatcatcaagcaggtggcaatcactgggcagcttggtgtgaagccccaaacaggcaacagcattccactcacagccactaacttccgcatccagggtaaggatgtattgcgtctgccgccctcttccatcaccacagatgccaagggccagacggttctgcgaatcactccggacatgatggccacattggccaagtcccaggttaccacagtcaaattgacccaggacctcttcgggacaggaggcaacactacaggcaaaggcatctctgccaccttacacgtcacttccaatccagtacatgcagctgatagccctgccaaggccagttcagccagtgccccttcatccactccaacaggtaccactgtggtcaaagtgactcctgacctcaagccaacagaagcctcaagttcggcttttcgcttgatgccagctcttggcgtgagtgtggctgaccagaagggaaaaagcacagtggcctcttcagaagcaaaaccagctgccacgatccgcatcgtgcagggactgggagtgatgcctcccaaagcaggccagaccatcaccgttgcaacccacgccaagcaaggggcctcggtggccagtgggtctggaactgtccatacttcagcggtgtccttacccagtatgaatgctgctgtgtccaagactgtagctgtggcttctggggctgcaagcacccccatcagcatcagcacaggagcccccaccgtgcggcaggtccctgtcagcaccacggttgtgtccacgtcccaggctgggaagttgcctacacggatcacagttcccctctctgtgatcagccagccaatgaagggcaagagcgtggtcacagcccccatcatcaaaggcaaccttggagccaacctcagtgggttgggccgcaacatcatcctcacaactatgccagcaggcactaagctcattgctggcaataagcctgttagtttcctcactgctcagcagttgcagcagcttcagcagcaaggtcaggccacacaggtgcgcatccagactgtccctgcatcccatctccaacagggaacagcttctggctcctccaaagcagtctccactgttgttgtgactacagctccgtctcctaaacaggcacctgagcaacaatgattatgagagaggatggcttccgtgaaagaccatgcctggtctgtcctggctgagaagggaccagggaggttgcatcattgttttaagcttgcctgttcaaggcagccaggcgaggggtgatggcaacggtggcctggattcgtggcctggattctgctgccacgtgccatagtggagcaccctgagaaaggttcactccagggttccaaggtctgctctctaccaatctaggagaatattctgttgaaattgcaggaattaccagttacgtccaacaagccagagttctgagagtaagacccccagggaaggcttaccagttgcagagtgcacacagcgaataggctggttctccatgaggattgtattttttggcttctggtcttctccatgactagtggtctggataggagttttgtgtccagaaaattttatgtaatttatttttttaaagaacctgttgtacatctttctcaaatacaaacttgggctttagctgccccctccactaaaccgatgacttacttttttgactagaatgagaaaatggcaagaatcttagtaaggtggtagccagcttggtaactgcatagtaatcgagaggctgtaagatgggaattcatcgtaggcagcgaggtagagtgggtcccctgaaatgggattcgcttggcactgcctcttaaagataggggtgttgggatcttgattgtggccgccccccccagctttacctgcccactttgtccttcttggcaagcctgttcacatggacgtccagagccagtggacagagaggaggggacggacagcagaggtgctgcttttgcagcagaaactttgttgcagttcagagtataccttctgctctgctccagagcaagagttgcaaaccaggcccttggggctggccatttgtttttgtaaataaagttttattggaacacagcccaaaaaaaaaaaaaaaaaa

SEQ ID NO: 682 - DNA, 4629 bp, Homo sapiens
acgtgacctggtgacagtgctgacttggctgtacagctcgatctaggttctgcggcacgggatggcggaggcgcctcctgtctcaggtacttttaaattcaatacagatgctgctgaattcattcctcaggagaaaaaaaattctggtctaaattgtgggactcaaaggagactagactctaataggattggtagaagaaattacagttcaccacctccctgtcacctttccaggcaggtcccttatgatgaaatctctgctgttcatcagcatagttatcatccgtcaggaagcaaacctaagagtcagcagacgtctttccagtcctctccttgtaataaatcgcccaagagccatggccttcagaatcaaccttggcagaaattgaggaatgagaagcaccatatcagagtcaagaaagcacagagtcttgctgagcagacctcagatacagctggattagagagctcgaccagatcagagagtgggacagacctcagagagcatagtccttctgagagtgagaaggaagttgtgggtgcagatcccaggggagcaaaacccaaaaaagcaacacagtttgtatacagctatggtagaggaccaaaagtcaaggggaaactcaaatgtgaatggagtaaccgaacaactccaaaaccggaggatgctggacccgaaagtaccaaacctgtgggggttttccaccctgactcttcagaggcatcctctagaaaaggagtattggatgggtatggagccagacgaaatgagcagagaagatacccacagaaaaggcctccctgggaagtggagggggccaggccacgaccaggcagaaatccaccaaaacaggagggccaccgacatacaaacgcaggacacagaaacaacatgggccccattccaaaggatgacctcaatgaaagaccagcaaaatctacctgtgacagtgagaacttggcagtcatcaacaagtcttccaggagggttgaccaagagaaatgcactgtacggaggcaggatcctcaagtagtatctcctttctcccgaggcaaacagaaccatgtgctaaagaatgtggaaacgcacacaggttctctaattgaacaactaacaacagaaaaatacgagtgcatggtgtgctgtgaattggttcgtgtcacggccccagtgtggagttgtcagagctgttaccatgtgtttcatttgaactgcataaagaaatgggcaaggtctccagcatctcaagcagatggccagagtggttggaggtgccctgcctgtcagaatgtttctgcacatgttcctaatacctacacttgtttctgtggcaaggtaaagaatcctgagtggagcagaaatgaaattccacatagctgtggtgaggtttgtagaaagaaacagcctggccaggactgcccacattcctgtaaccttctctgccatccaggaccctgcccaccctgccctgcctttatgacaaaaacatgtgaatgtggacgaaccaggcacacagttcgctgtggtcaggctgtctcagtccactgttctaacccatgtgagaatattttgaactgtggtcagcaccagtgtgctgagctgtgccatgggggtcagtgccagccttgccagatcattttgaaccaggtatgctattgcggcagcacctcccgagatgtgttatgtggaaccgatgtaggaaagtctgatggatttggggatttcagctgtttaaagatatgtggcaaggacttgaaatgcggtaaccatacatgttcgcaagtgtgccaccctcagccctgccagcaatgcccacggctcccccagctggtgcgctgttgcccctgtggccaaactcctctcagccaattgctagaacttggaagtagtagtcggaaaacatgcatggaccctgtgccttcatgtggaaaagtgtgcggcaagcctctgccttgtggttccttagatttcattcatacctgtgaaaagctctgccatgaaggagactgtggaccatgctctcgcacatcagttatttcctgcagatgctctttcagaacaaaggagcttccatgtaccagtctcaaaagtgaagatgctacatttatgtgtgacaagcggtgtaacaagaaacggttgtgtggacggcataaatgtaatgagatatgctgtgtggataaggagcacaagtgtcctttgatttgtgggaggaaactccgttgtggccttcataggtgtgaagaaccttgtcatcgtggaaactgccagacatgctggcaagccagttttgatgaattaacctgccattgtggtgcatcagtgatttaccctccagttccctgtggtactaggccccctgaatgtacccaaacctgcgctagagtccatgagtgtgaccatccagtatatcattcttgtcatagtgaggagaagtgtcccccttgcactttcctaactcagaagtggtgcatgggcaagcatgagtttcggagcaacatcccctgtcacctggttgatatctcttgcggattaccctgcagtgccacgctaccatgtgggatgcacaaatgtcagagactctgtcacaaaggggagtgtcttgtggatgagccctgcaagcagccctgcaccacccccagagctgactgtggtcacccgtgtatggcaccctgccataccagctcaccctgccctgtgactgcttgtaaagctaaggtagagctacagtgtgaatgtggacgaagaaaagagatggtgatttgctctgaagcatctagtacttatcaaagaatagctgcaatctccatggcctctaagataacagacatgcagcttggaggttcagtggagatcagcaagttaattaccaaaaaggaagttcatcaagccaggctggagtgtgatgaggagtgttcagccttggaaaggaaaaagagattagcagaggcatttcatatcagtgaggattctgatcctttcaatatacgttcttcagggtcaaaattcagtgatagtttgaaagaagatgccaggaaggacttaaagtttgtcagtgacgttgagaaggaaatggaaaccctcgtggaggccgtgaataagggaaagaatagtaagaaaagccacagcttccctcccatgaacagagaccaccgccggatcatccatgacttggcccaagtttatggcctggagagcgtgagctatgacagtgaaccgaagcgcaatgtggtggtcactgccatcagggggaagtccgtttgtcctcctaccacgctgacaggtgtgcttgaaagggaaatgcaggcacggcctccaccaccgattcctcatcacagacatcagtcagacaagaatcctgggagcagtaatttacagaaaataaccaaggagccaataattgactattttgacgtccaggactaagaagatcatgatgcacttagataaaagaatgattaggtatagtggagacttatttgccagcagataaatcatgcccgttcccctctgcctggcagaatcacagtctcacatactgtcttgtactgacacatccaaagcatgagtgtgtcagaaatcccttgtctattcctgtctgtataaagtgtttcattatgaccagatctctgattgtatggtcactaggtatgcaatcacgcattcaaagaggctctttacaccatcactgtgattgctctgagagttgagggactattgggctttatttggacaaaccaaacttttagcctgaaaccaactttatgccactaagtcatagcctcagttgtcccagttatttgtcctcctgaaaatgcctgaaacatcagacagacattgcttgctttacccaaactgatcaaaatctttaggagcacaaatgaattttttagtctgaaataccaaataatgaattggtataccatatccggaatcacacatgttatcttaaacccagccatcatacctaagtcttttgccaaaacctctcataggtatatctagctgaacttattttggcattttcaatgtgatcagttctagacctagaagggggtcaggctgctttacagaattctatttccttaagtccctggcacttctcataccacatcactgaacctgttcagtaacaatcagtttggccgtcccccatgatggtaggaaatatagagagcaagttcttctgccagggtcacactgtggtctctgaactgaccagtatatccctaactcctctttgatagagaaagagtctcaaatggacaactgtcctgtgttgctttccctaggccttcagcagcctattggctctccctgcctctgagctctggactctgtttgaatattccaagtagtatatggacagtccagggcttatgcccagcagcccactggaggcattcttcaggctcctttaaggcaggtgcattgatagttccattagtgtgacccttgcattggcacccctccagcctggaggccaggcttccagcaacttccttctgccctagagcaagccatgagccccagagcagtagcaggagacttgagaagtagagtgacaaaaacaagcacttaattaaattataaaatttaactttaaaaaaaaaaaaaaaaaaaaaaaaaaa

SEQ ID NO: 683 - DNA, 6236 bp, Homo sapiens
cattttgctaggcagcggcagtggcggcggcagcggcggctggagcctctgattgggtttcggagtccggtactggagccaatcagcgcgggcagcgaaccgggggagcgaggcacggagtgtacctcacagccttctaggatctccagagtggacaggaatctcacttggagggaccatggagcagtatacagcaaacagcaatagttcgacagagcagattgttgtccaggcaggacagattcagcagcagcagcagggtggtgtcactgctgtgcagttgcagactgaggcccaggtggcatccgcctcaggccagcaagtccagaccctccaggtagtccaagggcagccattaatggtgcaggtcagtggaggccagctaatcacatcaactggccaacccatcatggtccaggctgtccctggtggacaaggtcaaaccatcatgcaagtacctgtttctggaacacagggtttgcagcaaatacagttggtcccacctggacagatccagatccagggtggacaggctgtgcaggtgcagggccagcagggccagacccagcagatcatcatccagcagccccagacggctgtcactgctggccagactcagacacagcagcagattgctgtccagggacagcaagtggcacagactgctgaagggcagaccatcgtctatcaaccagttaatgcagatggcaccattctccagcaagttacagtccctgtttcaggcatgatcactatcccagcagccagtttggcaggagcacagattgttcaaacaggagccaataccaacacaaccagcagtgggcaagggactgtcactgtgacactaccagtggcaggcaatgtggtcaattcaggagggatggtcatgatggttcctggggctggctctgtgcctgctatccaaagaatccctctacctggagcagagatgcttgaagaagagcctctctacgtgaatgccaaacaataccaccgtattcttaagaggaggcaagcccgagctaaactagaggcagaagggaaaattccaaaggagagaaggaaatacctgcatgagtctcggcaccgtcatgccatggcacggaagcgtggtgaaggtggacgatttttctctccaaaggaaaaggatagtccccatatgcaggatccaaaccaagccgatgaagaagcaatgacacagatcatccgagtgtcctaaccccacgccatgtgatggagctgatcaaggtcatgtttctcactgttccaggaaattgatcaactcttccaatgggacattgatgatcacattctgccctttactacaggacagaaaccacttagtttttaataagtggctcagtattacaattgcagcgatgcctggcaaattgaagttgcaagcctttgtcttactctttcagtcaggacctatttcagactgttgatgacattgacatttcatggattcggatgatgcaaggagacacatgccaccccagcagtacacaaagcacttaccttgactggtgaagtcagccagccatctcagcagggaagaacaaccttctcaaccaaaactgcaatcaggaaagcagcagcccactccttcccatggaatctagacagcatttatccctctggtgggggaatctcacactgactaactgaatggacgctttgtattcagagatggcttccaggcaaggaagttctatcttgtgatacggaaacaataaattcctgagatacattcttccaatctgtggtaataataagaattcctctctgcccagatggtaggttgatatttctggactctagccaagaaaaagctaattctggggatagaatgataaaagactcaagcactaaaaatatacattgccgaatctctttttctagctttgaaaagttgtggcctgcttgtccctctgttgactggtcatctggaccatcgtacttgctgtggctacttctaagacaatgtagagggttattaaaccttgaaactgcctttcctaagtagagaacaagactattcaacaacttctttgctgaagcactgaggagatttgtaatactcctaaaggaagggccaaactagagattttcaatcatagactttgtgacagcatttggggaactaaaagattcatgtgtttcagcctagtgggagagagtgggggagaggaagagagagagagagcatgtatacccgtatgttatcatagagcacgattctccagtggatggatacctggaatggatcattaagatgaagagagtaattcacatttactctagaacctttaacaagcactgaaaggaagaagcctgagatttgatccttgacaatttctggaaagcactggtcagtcacactgtcctggacagagtccaagttacccactaaagcttgaggtggatgttggcttcactcctgcagcacaatgctggccctagaaagcgagcattttcattcttcccatggcagctgattctttggtgccagttttcatgttttctccataggccttgtgcagaaaggttttctcattgcatccatactgtgagaataaactgcagactgaaagaaacatgcctgcagggtcaggaactgggccactgttcccagaacgggttgtgcctcagaaatctatttctcttttagatgttgaaccctgagagaactaagatgatatttcagaagagttggctgccttctctggaaacaaggaaaacccaataattccgaggaacattgggggttaaataccaagaataaaaattggttcttctttgacttcagcttaactgtattaagacagaaattaagccctctaaaaacaccacaaagagagatgattgtaatgatagaaatagaggtacagagctatgcaaaggaaacaggaagtgaaatattcctagtcccagggatctggtaatcgctcctggcttccagatgtcaaaggactgatcctttggtaagctcactagaaacttctagctctacaagagtttgggatattaatgttattcagtaagtcccaagtttttcagagaatagattactaacaatgaggaatttatattccttggttaatttaggagtctaagatgcagagttcagaaagaaattactcagacctaactttgagtgcttaagctgccaacagttagaagatgctatttatttgtgtctgtaagtttgtacatagtaatgccagccttgttgctgaattttttatttggggggagatgactttgaattttgtttgaaatgcttcagttgtcattttgtcattgcatttcaaatagctcatgacccttttcttgtggtcactttggcacaccatagtagcccacaaagtgggggcagggtattgacatttggattttttctttgatactagttcttttattcatttttatttgtgactgtagtgataactttacagatggagaaagagtgaatggatgaatgaataattggtttaatgcctagttatgcaacttgagtgcttttttttttttttgcaggataattttaagtgtatatattttaactgcactggtacattgaacatgtcagtgtcgatgccactggaccaacagagcattttgtggctatagggtgcctgataataatgtcttgatttttctttgggattcaactatatcgaaggtttttcccccagcagtatgggggcgtacaggtgatcgatcattaatgtcattgcaattgttattttttaaaataaatttataaaaataaccgaaaagtaatgtgacttttgaggaatctgcaactcctgggttctagtttgtgtttccagtgttgaaattttgatctcccccgacaagacttgtctgcatggacggtgtctctgtaaacagtatcaaacttgtaatgtctgagcctcttagctttatctccccttaatttcttcccttttggcccttccaccctgttgaggagattttttctgtcacctgcaggctgatcatacatttgatgctactactgaaagtgtttatcaaaatgtgatgaagtaattccatgaggaaaattagccgttatcacaaaaacagccttaagtattgtagaatttcaggtagtgaagatgtactatttacgttttgttagattttgttttggcagaagaccaaaacaaaagtacttttctgattgttaaaaatccacagcatgctcaccttgttactgttttaccttacggtcgctgggaatctaagcaacaaagactagaagcctccgatatgccattatcaacacacaagagacaaacagcccgaggaagcactcaatgatgagagcagtagacctgccctggcagatgagagaggagaaactctccacaatgaaggaaaagcactgacagtatttgatagctttagtcaaactgtgcttgagtttggcttagatttatgccagtggaacctgtccttaccaaattcagagatgacccaagattctactctgtggtatgagggaaagacctctcgatatttatctcacaccaacggctttatcgtaggagcgtcttcgcctcccccgtttccagtagaaaagacagctttgctcctttgaaagcgcagaccgccgcacctccagccccttctccccggggaagtaggccccgctaagaatgtgggaaggtggtggggcggcgactgaagtcgcttccgattggcgttgtcccaaggaagcctgcgcggattgatcggcggcaggcctccaatagagcctgctaggcggattggctgctacgcggctgggccctgtttccggtacctaggcgggcagccatggtgaccggcgagcggcatgcgacgccgcctctgtggcctgtggaggcccgcttggcggcgctgcttcccgacctactggtctttcggaagcctcggggatgggaacccgagctcgccacggcccagggcgtcctcctaggcgtccatgtgacgggtgagggcgacggccggcacttgcacttaagtctcctggcctgcgggagaggcggccgttgggtctaagcccctggaggcctcgacggttacaggcctagcctcccgcgagctaaggcacagtttaacttcgtgctgcggcttccttaggaaactttgagtatcttcgttttagcgtgggaggacatcttttgggatgaaccggctcagtccttgagctcaccccaaagatgatgaaattgaaactcagaggaaaggatttttacaggaccacgccccgggctttgaacccgtttttcccaaccccgagcattttctattaagcgttctgtttcaattattttattcgttcagttaattcgttcttggcgtcataagtatatgcccgccgttgttctggccgtagctatctagcagccactccgcgagtcgttcatttaacaaatacttactctgtgtcagggatatgaagatgggtaataccaggtgcctgtcctcactgtgtgagtggttctctagccagacatgaggagggatcctattgtttcccatagctaggcagcctaagagagtaggggaaagagctggctccagatgaaaagggcaccatctccagctcttggaagcagagagggtggtcctttggattcccagtggcagcagcaaccaacctggcccttagtagtttctaagttacaccatgttaatggataaaggaattactcagcttgaagggatctgtttcctttacactggcctgatgtgtggggagaaaggggccaaaaagtttaggatttggagttaacatcgtaatttctgctttgttggtcagggtttacagcattaatggacaggttcaccctgacctacaagtcggaacgtgacatggacaaactggcccatatcttcagttattacattagtgacatcgtggagcgtgagtgatcattgtagggtaacaaggtgtggtgctgggctcctgggggtttataaaagaagggggccagaagtactttaaaacaggtaccaaagggtcattcctttagcatcattcatctttggtttcttcaagttgccactgaaaagctagacctttgcctattatctgctaatctacccagtctcacattctattgactcattgttcaaagggggggcaggaggagctaatttcctttgcacatttgtattttatttcaaaataaagtattctcttctaacaataacgtaaaaaaaaaaaaaaaaaa

SEQ ID NO: 684 - DNA, 3482 bp, Homo sapiens
ggagggaggggaggccgagtcctggaagcggagctccgcgctgggactggttccttcgcagccattttctgtccaaccaaacagccgattggagacgggagccaaccagggctgcattggaggttgaaatcacaaagattagacacctttttagataggtgttcttcagcaccactgacaacacggttctgacagtatttcatgacaatggatggtgacagttctacaacagatgcttctcaactaggaatctctgcagactatattggaggaagtcattatgttatacagcctcatgatgatactgaggacagcatgaatgatcatgaagacacaaatggttcaaaagaaagtttcagagaacaagatatatatcttccaatagcaaacgtggctaggataatgaaaaatgccatacctcaaacgggaaagattgcaaaagatgccaaagaatgtgttcaagaatgtgtaagtgagttcatcagttttataacatctgaagcaagtgaaaggtgccatcaagagaaacggaaaacaatcaatggagaagatattctctttgctatgtctactttaggctttgacagttatgtggaacctctgaaattataccttcagaaattcagagaggctatgaaaggagaaaagggaattggtggagcagtcacagctacagatggactaagtgaagagcttacagaggaggcatttactaaccagttaccagctggcttaataaccacagacggtcaacaacaaaatgttatggtttacacaacatcatatcaacagatttctggtgttcagcaaattcagttttcatgatctgaagaaatgatggaatggggagtgtagagaaatgagagtctgtatgattctggaacagagacatcagaaggaaagactggtgaaaagatgtatctttgtatattaatagctgtaatgtagcttcctgatgcttgactaattgaggtgttaattctgacttgagaatctttttcatgaatgattttaaagaaaaatttggattttaaaggtattaaaatatttttgttttgtacgagagtttgttgctctgtatgactcctgtatgcattgtatattgcaatttattactgtcagagatttgtagacagtttcttattttcatattgaatcatgttacttttgtaattcaagtaagcggctgggttaattcatgatgtttgcccttttaataaaatataagggtagagttcattttgaatgcaagttgcctttattataaatttgagtttgtcttggttataccttgcatgataacctagctagatttctagcatttgctgtatttattaaaattattatttttttggtaaaacattaatagtttaagcagcatcatttttttaaaaaatgtaattgaataagtgtgaatgcagaagcaaatattgtctgccctgttaaacttggtgcccattaacagtgtttacactgttcatcgtgcctgttaatgtagttttagttactggagcttttttaagactagatttggttttgagttacatttttaagaatgtgggaatatatttaagtttaatgtagtcctagtgctcttgaaatggtgcccctttcatttggtacatgattttttttcaaatcatatcttcaagtactatagtattctcttacagaagaggagttttatagtctgatggtaaatgtcttcattttacctttttaattgaaatgtcaagtttcctgttacactatggaaaccaagaaacatcagacatcattgcgtgtacagaccttttgcatgggtgagtggatgaaatggagaacagagtgagtgctgtgaacggtgtgaaatagaagccaacttctagtatgctgtcttcatctctgcaataaactaaacgtaaataatgtaactttgtataatttagtagtatgtacttggattgtttctttttgaaaagtgaggatttgtattttctcatctattctttttggtgttaattaacttgagggatttcttttttaagtttttaatatcaaaaattgctattgtatagtttgcctaaaaggaagttggagtgaatatcatctttgaaggacactcaaatttataaggtagaagcaatttcccagatataggctgaacagaaacatttactttgccagaaggagcctttaggagtatatgtgggctaatcagaggttaataatgtcctcatctcctactctccatttaaaaaacaaacttcattgtagtaaattcaaataggaaaaaatgggggagtagttaagcaaaatcaacagtcatcctactatgttgaaagaaccaatgttaatattttgataaatatcatttgtccttttactttgctaaatatgtatatttttataaaaatgggctcatattgtgcataccattttgtaacctgcttttttcacttaacaatatattgggaacatcttttccaggtcatgcatagtcttctgcatcatttttattggtttattattctgctgtatgactcaatcataattcatttaatcttctattggatattttgactatttacatcttttcacagttataaacagcacttcactgaatcccatgtacatccatgactgttttcttaaattctttgaattgctgggttaccaaatatgcaaaattttaaggcttttgatacttcgttatgagtgtatttttgagatattttccacttgatccaagcagtgtgtcactatataactgataaaagcacttggtctttgattatcagatactgtctctaaaattattttaaagattaatatttgttcaagtagagaatgaagataaaaaaggaatttgaggccaggtatggggtgtctcatgcctataattccagcactttgggaggccaaggcaggcagatcactttgaggtcaggagtttgagaccagcctggccaacatggagaaccccccgtctctacaaaaaatacaaaattagcagggtgtggtggtgcacacctgtagtcccttactccctggtggctgaggcattatcccttgaacctgggaggcagagcctaaagtgagccgagatcgcgccactgcactccagcctgggtgacacagcaagactcttgtctcaaacaaacaggaatttgagtaaattttaaattagtatatactacaacaaatttccaaacttcataatttgctagtagtgctaactaaaattttacaccaggtaaaatcaggtcaccttttttatgtattgacttcattgttggacttcatactctgatgggaaagaaaatggacattctgaatgtgtcaggtgcataatatcctaatttatgcttgtcagagctggggtctctgtcttccttggcccatgttgcatttaactgaatgtcatgttttctcctctggaacttcttatgtatgcaagctcccatgttaacctatcataaaaatgttttttataattttgt

SEQ ID NO: 685 - DNA, 2105 bp, Homo sapiens
agatctcattccgcctccctctgtcgtcgccccttcccaattctcgcgagacctcaaggagcacagcttctgcgcaccgcacgatactgggagtccaggcgccaagggagggggaagggaaaaggggaaacggtgcaaacggcgtggccgccatcttgcttgtgcccccgcttcgcgcgcgctccgttctccgtgacgcacacttccccctcccctccgccgcgcctgggcctctgcattgcccgactccgtaggagcgcgggggcggctcctgctcttcctggactcctgagcagagttgtcgagatgtccacagaaggaggatttggtggtactagcagcagtgatgcccagcaaagcctacagtcgttctggcctcgggtcatggaagaaatccggaatttaacagtgaaagacttccgagtgcaggaactcccactggctcgtattaagaagattatgaaactggatgaagatgtgaagatgatcagtgcagaagcgcctgtactctttgccaaggcagcccagatttttatcacagagttgactcttcgagcctggattcacacagaagataacaagcgccggactctacagagaaatgatatcgccatggcaattacaaaatttgatcagtttgattttctcatcgatattgttccaagagatgaactgaaacctccaaagcgtcaggaggaggtgcgccagtctgtaactcctgccgagccagtccagtactatttcacgctggctcagcaacccaccgctgtccaagtccagggccagcagcaaggccagcagaccaccagctccacgaccaccatccagcctgggcagatcatcatcgcacagcctcagcagggccagaccacacctgtgacaatgcaggttggagaaggtcagcaggtgcagattgtccaggctcagccacagggtcaagcccaacaggcccagagtggcactggacagaccatgcaggtgatgcagcagatcatcactaacacaggagagatccagcagatcccggtgcagctgaatgccggccagctgcagtatatccgcttagcccagcctgtatcaggcactcaagttgtgcagggacagatccagacacttgccaccaatgctcaacagattacacagacagaggtccagcaaggacagcagcagttcagccagttcacagatggacagcagctctaccagatccagcaagtcaccatgcctgcgggccaggacctcgcccagcccatgttcatccagtcagccaaccagccctccgacgggcaggccccccaggtgaccggcgactgagggcctgagctggcaaggccaaggacacccaacacaatttttgccatacagccccaggcaatgggcacagccttcctccccagaggacccggccgacctcagcgcctcctgcaggctaggacactggtgcactacaccccatgcctgggggccgagattctccagcagaaagatgcaatattttttgtttcctttttttccatttttttctctaaggaatcaatatttcaatatgttgagtgtgtgtccaatgctatgaaattaaaatattaaataacatatttatggcattttcttgaagagtgtggttgaagaaatatttctccttttgtttttcttttttttttgtttgttactgccacttctttttaggagcaaatctccccaggggtgtacggtatttcttgactctgggaacagctgctacccccaagacttgccacgttgttctgccctcagatggaattaggtgaatgtgtgtagctgctttttcactcgtggtcctctccccatcccttgctctgaccccagagctctgtgtatttgcatccagaggccatggaaacattctttgcatttaagagacagatttattccctgtggagagtgggtggattcattgccacactcttttctcccagggacccaggaaactaggactttgtgtgtttgctgcccacctcccttttattttttaaatgcattaaaaactgtgctagtctcctttgcatggacttcaagctgcatgaaatgcaataaatctcattttagataaaaaaaaaaaaaaaaaa

SEQ ID NO: 686 - DNA, 2594 bp, Homo sapiens
gtgtgtgtctgagggtgtgtgtgtgagtgtggctggccccagtacctggccaagcccaccacttccacctgggccctacacccccacaatgtgtacccctcttatctgccctggagcctgtacagccatgccacgctacccctgagagtctagaaagctggtcactaactttgcagacggatgagccttgagcacccagaggagactggggctgtcaacgctgccccttgtcctgccggcttggatcccctgacagggtccttctaggcttcagactggcaccctgaccatggaaccctgaagtggcagtgacttctagagctcagtggcagaccccacgacccttcctcccccttcctccccctcccaccaccagctttcaagctcccagagggaggggtggggaggggatcctgatctcacagggcagggggcttccatcatgatgctcaactcagacaccatggagctggacctgccgcccacccactcagagactgagtcgggcttcagtgactgtgggggcggggcgggccctgatggtgccgggcctgggggtccgggagggggccaggcccgaggcccagagccgggagagcctggccggaaagacctgcagcatctgagccgcgaggagcgccggcgccggcgccgcgccacagccaagtaccgcacggcccacgccacgcgagaacgcatccgcgtggaagccttcaacctggccttcgccgagctgcgcaagctgctgcctacgctgccccccgacaagaagctctccaagattgagattctgcgcctggccatctgctatatctcctacctgaaccacgtgctggacgtctgaactcagcctgtctcccacctcccgggcctctctggggcccctttccaccgctcactgcttagaaaggccgcatcctccccgagcccttataccttggcatggagtcccaaaggccctgggcacaggcagagagcccaccggctggtcatgagggcctcttcctttctctgacccaggcacctcgagggctattctcctgggttccttccggggtttattgctgaggcccagctgtgcagaattgtttgctagtgtggttggtatggaatccttgctggctttactaagccagccacacttggagtctgcccccaagctctctcactgaatgctgcctcttctacccctatgtccaaattttcagccaccacagacctcagctgtgtatcctatctgttctagcttctcctgcccctggtggggatgggctgtcagaattgcaagggaggaaggctggggttagagtggggagtgggcttcttcctccaagatctcagtctctcagtgcttggcagaggggtgaggccctggggaggcaggggttggtgccctgactcctgtgaggggaatctcagtagctgggaattatggaaaaactcttcctgtttctgtccatcttgttcctgtggcttagcacatacagacctcagatcttacttggtagtgagtgccttgccctctttgagctatttggctacttccctgtccctctgactcctactgtcccaattttctccctccctgtgtgtcactagagaaaaaaaaaaacaaaaacctagattccggattaggggatgacatcccaaacagcccggagtatttgcagaaggctcaggcaacgagtgggccacatctcacttctgcttcctcatctcagcccactctgaaaatgtgcagcaccctcactggttcctccccccaacgcaaggaggatgcccaattgttgccctctgaaaatgcacagttctcctggccctaggacttacttattacatttttttctctttccttgagctgcctttggcaagggaagagacccccaactctgcgcccctactccatgctgctgatccccacctgcgcactatagctcagggtcagcagtggaatgaagggccttagaacctgcatagaagaaatgaactcactgcatttctgtgctccctcctccctcgcaccaaactcctagctctacaagtatatttatttatttatttatttattcatctatttatttacttatttatttatttataaatattgctatttattgccgagttgtgcactttggggtagagtgaggggctcccagcagctctagctgggtctctcttgcttcctccctgcttacgcctttccttttcttgctccttcttcaactcctggtgtgtgtgagcatgccctttgcttgccacaccatatcctttccccagatccacctgtcctgacactctagtcctccaggatagtgctcctcccccagctccagggctcctggatgtccttcctcaactccctccacccctagacaatcctacctggtcccatctgcctcttttctctccccagcctgccctgtgacccttgcctcttcctgatactcccaagagcaggccccaggggtctgtgtcacatatctctgtgtgattccttctggttgcatccccaatttcatacaaaaagaaaaataaaagtgacctcgttctagcaccaggaaaaaaaaaaaaaaaaaaaaaaaaaaaaaaaaaaa

SEQ ID NO: 687 - DNA, 2512 bp, Homo sapiens
aattggtaccaggagagcccagaagccacacacgcatctctgcctctttgctctggctctcccaccctcttcccgtctttctctgcttccttgtcactgttactccaggagacgttcacttttcaccaacctttctccaagcatctccaagccactgactatatatattttgctacaagagacctagaagaggaaaaaaggcacgagacttttcaacacatcgtttaaaaaaatcatcaacgaatttcttgcaatgtttgagaacaattaaaaggaaaaagcgttttttaaaaaatctatcaactaagtgaacaatcattcatatcgtctacatcctgagatattattgtccctcgctgcggacaccagcgagatgacagctgctttttcatttttgaatgtaataaatatttgctgcttttaatattttccggaatctcccctcgctattccttggaattttaactctaaagattggagaacagattatcaaaaaggcttttgcaagcctccaaaatgatgctgagtccggaccaagcagcagattcggaccatcccagctcggcgcactcggatccggagtccctgggcggcacggacaccaaggtgctcggcagcgtgtcggacctggagccggtggaggaggccgagggcgacggcaagggcggcagccgagccgcgctctacccgcacccgcagcagctgagccgcgaggagaagcgccgccgccggcgcgccacggccaagtaccgctcggcccacgccacccgcgagcgcatccgcgtggaagccttcaacttggccttcgccgagctccgcaaattgctgcccacgctgcccccggacaagaagctctccaagatcgagatcctgcgcctggccatctgctacatctcctatctcaaccacgtcctggacgtgtagggcggggtgcgccgcggggggccgcctgtcccggcgtccgcgaaacgctacggatccggacgggcgccgtcgctcgggtggcggaggctgcggtggcccagcgagacggccgcctcgagagacggccggggaagaagctcgctacctgttctctctggtcagcagggcgacgagggaaggtttccgacgcaggcaggtggggttgtctggcgagcccgggggctcgcaggggggattttccaggccaggagaacctcgtggagacacccgagatgagccacttctggggctccccaagggttgtggttttaacccactggagactttgagttctcctacattcatccgccacaaatcttaatgtgttgaaagaatgagggcagaagttcagagtatgcaggctcataactttaggctatctggaatttttctaatggacaaatcaccaaacactgggaaggaggagagaggagggatctctcccatagagatggaaggcacagaaaggtgcgactggaaactttcctttctgttgtgaaaataaagattatattagaatccaaataaaccctgaatatttagtaagtttaaaaagacaaattgagaacaagtagacacactgtgggaggatctgagcttggtgatattttatccccaagatatgacaccaaggtagacaggaaaatccatatttaaatggaaactttaatatctgattacttttgcaggcgaagtgcccctttatatatccaaaaacatctatttgtgaccttaaacatgtggacccataggtgcagttagaaaaagacaacctatttttatttatgttagaaggagtagagtatttttttcaagacatttatttttcagagtggtgatacttttactttggatactctgtgccaatttatttatagtcaagtgtttacactttttcctgtggaataattatgtctaactttttacgtgtttgttgagattatactgtggtctttctttctgctctaattatattgcacttgtataacaaatttcccacttctccctgtttctaaacatattttatatattaagatgtttgttcttgaaaggttcttttgttgtgagatcagcaacactagcacttcactattatagttttttaaaaagtgtattattcttatctgtagttatgtctgagaagtcctttacaagctgtttataaggagagtagcttctttgtgtgtgtgatgtttgtgcgtgtgatgaatttagcaaattaagttattttcctaaaaaaaaaagaaaaaaagaattcagaactactttcctctgtgacaccaaaaagaaaagtctataacctgaaaatgtttcatgttctctgctgtgaaactcttaaaacaaggagtgtattttagagacaagggaaaaaaaccacatctgctatccaaagattttagtctttttcagggtttttttgtgtctctgttgctttatataatgcaatattttgtagtgaaaatagatataatctggtttctatctgacgagtttttcatatctcatgaatggtgcgctgttttgcatataaataaaggtatcaaataaa

SEQ ID NO: 688 - DNA, 2092 bp, Homo sapiens
gcggccgccggagcccgagctgacgccgccttggcacccctcctggagttagaaactaaggccggggcccgcggcgctcggcgcgcaggccgcccggcttcctgcgtccatttccgcgtgctttcaaagaagacagagagaggcactgggttgggcttcatttttttcctccccatccccagtttctttctctttttaaaaataataattatcccaataattaaagccaattcccccctcccctcccccagtccctccccccaactcccccctcccccgcccgccggggcaggggagcgccacgaattgaccaagtgaagctacaactttgcgacataaattttggggtctcgaaccatgtcgctgaccaacacaaagacggggttttcggtcaaggacatcttagacctgccggacaccaacgatgaggagggctctgtggccgaaggtccggaggaagagaacgaggggcccgagccagccaagagggccgggccgctggggcagggcgccctggacgcggtgcagagcctgcccctgaagaaccccttctacgacagcagcgacaacccgtacacgcgctggctggccagcaccgagggccttcagtactccctgcacggtctggctgccggggcgccccctcaggactcaagctccaagtccccggagccctcggccgacgagtcaccggacaatgacaaggagaccccgggcggcgggggggacgccggcaagaagcgaaagcggcgagtgcttttctccaaggcgcagacctacgagctggagcggcgctttcggcagcagcggtacctgtcggcgcccgagcgcgaacacctggccagcctcatccgcctcacgcccacgcaggtcaagatctggttccagaaccaccgctacaagatgaagcgcgcccgggccgagaaaggtatggaggtgacgcccctgccctcgccgcgccgggtggccgtgcccgtcttggtcagggacggcaaaccatgtcacgcgctcaaagcccaggacctggcagccgccaccttccaggcgggcattcccttttctgcctacagcgcgcagtcgctgcagcacatgcagtacaacgcccagtacagctcggccagcaccccccagtacccgacagcacaccccctggtccaggcccagcagtggacttggtgagcgccgccccaacgagactcgcggccccaggcccaggccccaccccggcggcggtggcggcgaggaggcctcggtccttatggtggttattattattattataattattattatggagtcgagttgactctcggctccactagggaggcgccgggaggttgcctgcgtctccttggagtggcagattccacccacccagctctgcccatgcctctccttctgaaccttgggagagggctgaactctacgccgtgtttacagaatgtttgcgcagcttcgcttctttgcctctccccggggggaccaaaccgtcccagcgttaatgtcgtcacttgaaaacgagaaaaagaccgaccccccacccctgctttcgtgcattttgtaaaatatgtttgtgtgagtagcgatattgtcagccgtcttctaaagcaagtggagaacactttaaaaatacagagaatttcttcctttttttaaaaaaaaataagaaaatgctaaatatttatggccatgtaaacgttctgacaactggtggcagatttcgcttttcgttgtaaatatcggtggtgattgttgccaaaatgaccttcaggaccggcctgtttcccgtctgggtccaactcctttctttgtggcttgtttgggtttgttttttgttttgtttttgtttttgcgttttcccctgctttcttcctttctctttttattttattgtgcaaacatttctcaaatatggaaaagaaaaccctgtaggcagggagccctctgccctgtcctccgggccttcagccccgaacttggagctcagctattcggcgcggttccccaacagcgccgggcgcagaaagctttcgattttttaaataagaattttaataaaaatcctgtgtttaaaaaagaaaaaaagaaaaaa

SEQ ID NO: 689 - DNA, 2117 bp, Homo sapiens
agtccctgcagtggctgtaacaaaacccagacccccaggtcccggccaatggaggcgatttagactggagtgggaccgcgtctgtcaaaagcccgactcggcagcagcggcggagtccaggaggagagctggagccgccgcgctgcctccccgcccccgccgggatttattatttggactggacaattaagtggccctgatgatgttaccaagcccggtcacctccacccctttctcagtcaaagacattttgaatctggagcagcagcaccagcacttccatggtgcgcacttgcaggcggacttggagcaccacttccactctgcgccctgcatgctggccgccgctgaggggacgcaattttctgacggaggggaggaggacgaggaagacgagggcgagaaattgtcctatttgaactcactagccgcagcagacggccacggggattcagggctgtgtccccagggctatgtccacacggtcctgcgagactcgtgcagcgagcccaaggaacatgaagaggagcccgaggtcgtgagggaccggagccaaaaaagctgccagctgaagaagtctctagagacggccggagactgcaaggcggcggaggagagcgagaggccgaagccacgcagccgccggaagccccgggtcctcttctcgcaagcccaggtcttcgagctggaacgcaggttcaagcagcagcggtacctgtcggcacccgagcgcgagcacctcgccagcagcctgaagctcacatccactcaggtgaaaatctggttccagaatcgcaggtacaagtgcaagagacagcggcaggacaagtctctggagcttggcgcacacgcgcccccgccgccgccgcgccgcgtggctgtcccggtgctggtgcgggacggcaagccgtgcgtcacgcccagcgcgcaggcctacggcgcgccctacagcgtgggcgccagcgcctactcctacaacagcttccccgcctacggctatgggaactcggccgcggccgccgccgccgccgccgccgccgccgcagcagcggcggcctacagcagcagctatggctgtgcgtacccggcgggcggcggcggcggcggcggcgggacctccgcggcgaccactgccatgcagcccgcctgcagcgcggccggaggcggcccctttgtgaacgtgagcaacctaggaggcttcggcagcggcggcagcgcacagccgttgcaccagggtactgcagccggggccgcgtgcgctcagggcaccttgcagggcatccgggcctggtagggacggggcgggtcacgcggcgggcaccccagcgcagcctggcgccgcgggactgaagctcgagaagggcctgacctaaaggtcaggtcccctcgttaaaaaaatatgtacgtctagctcctcagggcttcggatcgcagctcactcgaggcctggggaaggggactcaggggcgaggaggatgactgggtccggtcgccaggactgtctctgaggcagaaacgccggctgggcgccggggaggacgatggccccgaccctggcagcgagaggagaccaggaggctaggaccctggccgcgcttggttcttccaaagcgagaagggcttctctccctctgcctttccgcggcctccgcgaagcgttggcggggagcccaaggacataacaaattaaaagcatgaaggagagaaaaatgggggtcgtggcttgagaaattccaggccctaccgatcctctgccccctttgcgggcctggagcgccatagcacagtcgatttcgtttcgcagctgtctcccctccgcagcagatacctcggtccagatctccggattgtcgggggacgcaggactcttcgaggaaaaccagccgaatgagatcaaaagttgggggtggggggaggctgaacaaactcaggacctggtggcccaccggaggtgttaccgggtttcctttctgtttcgtattctgtattcagcacatgttatctatctatctatctatataactataaccacacgccgtgtagacacccgctgccacacactacaggagtcaataaacaaggtgcaatattttcaaaaaaaaaaaaaaaaaaaaaaa

SEQ ID NO: 690 - DNA, 1291 bp, Homo sapiens
atgtcgttgagcccaaagcacacgacgcccttctccgtgtccgacatcctgagccccatcgaggagacctacaagaagttcagcggcgccatggacggcgcgccacccggcctgggggcgcccctgggggccgcggccgcctaccgcgcgccgccacctgggccctcctcgcaggcggcgaccgtggcgggcatgcagccttctcacgccatggcgggtcacaacgcggcggccgcggcggcggcggcagcagctgcggcggcggcggccgccacctaccacatgccggccggcgtctcgcagttcccgcacggcgccatgggcagctactgcaacggcggcctgggcaacatgggcgagctgcccgcctacacggacggcatgcggggcggcgcggccaccggctggtacggcgccaacccggacccacgctactcgtcaagtgagaggggccaggagcgcggggctgcgggcggctcaggcgtttcccgccacagccgaggggcgcgggggcgcgggacggggtgcgcgcggcttaggaggtcctggggccgagcgggcgcgcggggcgtcctgggacgcggcccgggacgcgcggggtttctggggaccctgggcgcgcggggggtcctgggacctgaccgggaacgcgcgcggcgtcctgggacccgttgagggcgtggtgctctgggacccgccgagggcgcgcggggcgtgctggggccggaggccgcggcggtcagggggtcttgggattcagcgagggcccggcggcgtcgcggccgcggcgtgaagagagcggcggctggaccggctcccggcgggcctggagctcactcgccttcccccttgggactcttccccagtctccaggttcatggggccgtcggcgggcgtgaatgtggccggcatggggtcgctgaccggcatcgcggacgccgccaagtcgctgggcccgctgcacgcggcggcggcggcagccgctccgcgaaggaagcgccgcgtgctcttctcgcaggcgcaggtctacgagctggagcggcgcttcaagcagcagaagtacctgtcggcgcccgagcgcgagcacctggccagcatgatccacctgacgcccacgcaggtcaagatctggttccagaaccaccggtacaagatgaaacggcaggccaaggacaaggcggcgcagcagctgcagcaggagggcggcctgggcccgccgccgcctccgccgccgtccccgcgccgcgcggcggtgcctgtgctggtcaaggacggcaagccgtgccagaac

SEQ ID NO: 691 - DNA, 1669 bp, Homo sapiens
gctcctgtcatcgaggcccctggcccaatggcaggctgagtccccctcctctggcctggtcccgcctctcctgccccttgtgctcagcgctacctgctgcccggacacatccagagctggccgacgggtgcgcgggcgggcggcggcaccatgcagggaagctgccaggggccgtgggcagcgccgctttctgccgcccacctggcgctgtgagactggcgctgccaccatgttccccagccctgctctcacgcccacgcccttctcagtcaaagacatcctaaacctggaacagcagcagcgcagcctggctgccgccggagagctctctgcccgcctggaggcgaccctggcgccctcctcctgcatgctggccgccttcaagccagaggcctacgctgggcccgaggcggctgcgccgggcctcccagagctgcgcgcagagctgggccgcgcgccttcaccggccaagtgtgcgtctgcctttcccgccgcccccgccttctatccacgtgcctacagcgaccccgacccagccaaggaccctagagccgaaaagaaagagctgtgcgcgctgcagaaggcggtggagctggagaagacagaggcggacaacgcggagcggccccgggcgcgacggcggaggaagccgcgcgtgctcttctcgcaggcgcaggtctatgagctggagcggcgcttcaagcagcagcggtacctgtcggcccccgaacgcgaccagctggccagcgtgctgaaactcacgtccacgcaggtcaagatctggttccagaaccggcgctacaagtgcaagcggcagcggcaggaccagactctggagctggtggggctgcccccgccgccgccgccgcctgcccgcaggatcgcggtgccagtgctggtgcgcgatggcaagccatgcctaggggactcggcgccctacgcgcctgcctacggcgtgggcctcaatccctacggttataacgcctaccccgcctatccgggttacggcggcgcggcctgcagccctggctacagctgcactgccgcttaccccgccgggccttccccagcgcagccggccactgccgccgccaacaacaacttcgtgaacttcggcgtcggggacttgaatgcggttcagagccccgggattccgcagagcaactcgggagtgtccacgctgcatggtatccgagcctggtagggaagggacccgcgtggcgcgaccctgaccgatcccacctcaacagctccctgactctcggggggagaaggggctcccaacatgaccctgagtcccctggattttgcattcactcctgcggagacctaggaactttttctgtcccacgcgcgtttgttcttgcgcacgggagagtttgtggcggcgattatgcagcgtgcaatgagtgatcctgcagcctggtgtcttagctgtccccccaggagtgccctccgagagtccatgggcacccccggttggaactgggactgagctcgggcacgcagggcctgagatctggccgcccattccgcgagccagggccgggcgcccgggcctttgctatctcgccgtcgcccgcccacgcacccacccgtatttatgtttttacctattgctgtaagaaatgacgatccccttcccattaaagagagtgcgttgaccccg

SEQ ID NO: 692 - DNA, 1857 bp, Homo sapiens
ccggacctcggctttcaaagcggcctgggtgggaagagctgtttatataaacagagattccgctgtaaatgcgctaatatcccggctgccagcgcatggcgagcgcctcccacgcccatccgtaggagcggcgtcccggccgcccctccgttcccagcctgccctgcccccgcctccttcccctcctcggccatggccacctctggacgcctgagcttcaccgtgcgcagccttctagatttacccgagcaggacgcgcaacacctgccgaggcgggagccagaaccacgcgccccccagcccgacccctgcgccgcctggctggattcggagcgcggccactacccttcctcggacgagagcagcctggagaccagcccgccagactcgtcgcagcggccgtccgctaggcccgcgtctccgggctcggacgccgagaaaaggaagaagcggcgggtgctattctccaaggcgcagacgctggagttggagcggcgcttccggcagcagcggtacctgtctgcgcccgagcgcgagcagctggcgagcctgcttcgcctcacgcccacgcaggtcaagatctggttccagaatcatcgctacaagctgaagcgcgctcgcgctccaggggcggcggagtcgcctgacctggcagcatccgccgagctgcacgccgcgcccggcctgctgcgtcgcgtggtggtgccggtgcttgttcgcgacgggcagccgtgcggcggcggcggcggtggcgaggtgggaaccgccgcggcccaggagaagtgcggcgcccctccagccgccgcctgccctctgccgggctaccctgccttcggtcccggctcggcgcttggcctcttccccgcctaccagcacttagcatcccccgccctggtctcctggaactggtgaggccgcagggcggcacctggggctaccctcgactttggagcgcgctctgcgattggagcagggccggagccgaacgcctggaacgctctccgtccgcctccctgcagccccatctccttgggcgccagggtccctggcgcgccctcatcagccgtcgcgcaagcacacacgagggacgtgtgccagagccccctccctcaccttccctccaccgccagccccagagttagattttatgcttgggccttatttgtatatttttaaatagcgatttgtataggaagcaagttatttttttaaaaaatagagtatttttcctcgtagttcgagaataaaatgtgtggggttgggtcccctgcgcgcctgcggggaacgtaggcgggagtcgtgccccccagaccggtgttcgcatcgctggctcgccccttgactggctaagtggggcccggccccagctggatcgaagggcgggttgcagtcccgacacggctttaggaagatacctgggggatggaggggtggtgatgtcagggttgggcgcgggaagaaaaggagaggaggaagctgaggcaactttgggattcttgtcagcgggaggcgtcactggccccagagtgactccgactctccgctgggctcccagagctgctggcgtttcgaataccgaaaagtcaaccctgtggaccacgacagggcagaaggagtttctccggagatgagccggcgaggccaggtgcggggcgcgctgcaccggagcagcccaggccgggccgcaagctgtttccagagtgcaggagccaagtgctcggggaccctttgaaaagtgcctggggacctgaagagcaccggggaatttgtaacccctatttaagcctgcaagtgcctaagttaaaaaaaaaaaaaaaaaaaaaaaaaaaaaaaaaaaaaaaaaaaaaaaaaaaaaaa

SEQ ID NO: 693 - DNA, 3281 bp, Homo sapiens
gcggtgcgggccgggcgggtgcattcaggccaaggcggggccgccgggatgctcagggttccggagccgcggcccggggaggcgaaagcggagggggccgcgccgccgaccccgtccaagccgctcacgtccttcctcatccaggacatcctgcgggacggcgcgcagcggcaaggcggccgcacgagcagccagagacagcgcgacccggagccggagccagagccagagccagagggaggacgcagccgcgccggggcgcagaacgaccagctgagcaccgggccccgcgccgcgccggaggaggccgagacgctggcagagaccgagccagaaaggcacttggggtcttatctgttggactctgaaaacacttcaggcgcccttccaaggcttccccaaacccctaagcagccgcagaagcgctcccgagctgccttctcccacactcaggtgatcgagttggagaggaagttcagccatcagaagtacctgtcggcccctgaacgggcccacctggccaagaacctcaagctcacggagacccaagtgaagatatggttccagaacagacgctataagactaagcgaaagcagctctcctcggagctgggagacttggagaagcactcctctttgccggccctgaaagaggaggccttctcccgggcctccctggtctccgtgtataacagctatccttactacccatacctgtactgcgtgggcagctggagcccagctttttggtaatgccagctcaggtgacaaccattatgatcaaaaactgccttccccagggtgtctctatgaaaagcacaaggggccaaggtcagggagcaagaggtgtgcacaccaaagctattggagatttgcgtggaaatctcagattcttcactggtgagacaatgaaacaacagagacagtgaaagttttaatacctaagtcattcctccagtgcatactgtaggtcattttttttgcttctggctacctgtttgaaggggagagagggaaaatcaagtggtattttccagcactttgtatgattttggatgagttgtacacccaaggattctgttctgcaactccatcctcctgtgtcactgaatatcaactctgaaagagcaaacctaacaggagaaaggacaaccaggatgaggatgtcaccaactgaattaaacttaagtccagaagcctcctgttggccttggaatatggccaaggctctctctgtccctgtaaaagagaggggcaaatagagagtctccaagagaacgccctcatgctcagcacatatttgcatgggagggggagatgggtgggaggagatgaaaatatcagcttttcttattcctttttattccttttaaaatggtatgccaacttaagtatttacagggtggcccaaatagaacaagatgcactcgctgtgattttaagacaagctgtataaacagaactccactgcaagagggggggccgggccaggagaatctccgcttgtccaagacaggggcctaaggagggtctccacactgctgctaggggctgttgcatttttttattagtagaaagtggaaaggcctcttctcaacttttttcccttgggctggagaatttagaatcagaagtttcctggagttttcaggctatcatatatactgtatcctgaaaggcaacataattcttccttccctccttttaaaattttgtgttcctttttgcagcaattactcactaaagggcttcattttagtccagatttttagtctggctgcacctaacttatgcctcgcttatttagcccgagatctggtctttttttttttttttttttttttttttccgtctccccaaagctttatctgtcttgactttttaaaaaagtttgggggcagattctgaattggctaaaagacatgcatttttaaaactagcaactcttatttctttcctttaaaaatacatagcattaaatcccaaatcctatttaaagacctgacagcttgagaaggtcactactgcatttataggaccttctggtggttctgctgttacgtttgaagtctgacaatccttgagaatctttgcatgcagaggaggtaagaggtattggattttcacagaggaagaacacagcgcagaatgaagggccaggcttactgagctgtccagtggagggctcatgggtgggacatggaaaagaaggcagcctaggccctggggagcccagtccactgagcaagcaagggactgagtgagccttttgcaggaaaaggctaagaaaaaggaaaaccattctaaaacacaacaagaaactgtccaaatgctttgggaactgtgtttattgcctataatgggtccccaaaatgggtaacctagacttcagagagaatgagcagagagcaaaggagaaatctggctgtccttccattttcattctgttatctcaggtgagctggtagaggggagacattagaaaaaaatgaaacaacaaaacaattactaatgaggtacgctgaggcctgggagtctcttgactccactacttaattccgtttagtgagaaacctttcaattttcttttattagaagggccagcttactgttggtggcaaaattgccaacataagttaatagaaagttggccaatttcaccccattttctgtggtttgggctccacattgcaatgttcaatgccacgtgctgctgacaccgaccggagtactagccagcacaaaaggcagggtagcctgaattgctttctgctctttacatttcttttaaaataagcatttagtgctcagtccctactgagtactctttctctcccctcctctgaatttaattctttcaacttgcaatttgcaaggattacacatttcactgtgatgtatattgtgttgcaaaaaaaaaaaaaaagtgtctttgtttaaaattacttggtttgtgaatccatcttgctttttccccattggaactagtcattaacccatctctgaactggtagaaaaacatctgaagagctagtctatcagcatctgacaggtgaattggatggttctcagaaccatttcacccagacagcctgtttctatcctgtttaataaattagtttgggttctctacatgcataacaaaccctgctccaatctgtcacataaaagtctgtgacttgaagtttagtcagcacccccaccaaactttatttttctatgtgttttttgcaacatatgagtgttttgaaaataaagtacccatgtctttattagattta

SEQ ID NO: 694 - DNA, 1116 bp, Homo sapiens
cgtgggatgttagcggtgggggcaatggagggcacccggcagagcgcattcctgctcagcagccctcccctggccgccctgcacagcatggccgagatgaagaccccgctgtaccctgccgcgtatcccccgctgcctgccggccccccctcctcctcgtcctcgtcgtcgtcctcctcgtcgccctccccgcctctgggcacccacaacccaggcggcctgaagcccccggccacgggggggctctcatccctcggcagccccccgcagcagctctcggccgccaccccacacggcatcaacgatatcctgagccggccctccatgcccgtggcctcgggggccgccctgccctccgcctcgccctccggttcctcctcctcctcttcctcgtccgcctctgcctcctccgcctctgccgccgccgcggctgctgccgcggccgcagccgccgcctcatccccggcggggctgctggccggactgccacgctttagcagcctgagcccgccgccgccgccgcccgggctctacttcagccccagcgccgcggccgtggccgccgtgggccggtaccccaagccgctggctgagctgcctggccggacgcccatcttctggcccggagtgatgcagagcccgccctggagggacgcacgcctggcctgtacccctcatcaaggatccattttgttggacaaagacgggaagagaaaacacacgagacccactttttccggacagcagatcttcgccctggagaagactttcgaacaaacaaaatacttggcggggcccgagagggctcgtttggcctattcgttggggatgacagagagtcaggtcaaggtctggttccagaaccgccggaccaagtggaggaagaagcacgctgccgagatggccacggccaagaagaagcaggactcggagacagagcgcctcaagggggcctcggagaacgaggaagaggacgacgactacaataagcctctggatcccaactcggacgacgagaaaatcacgcagctgttgaagaagcacaagtccagcagcggcggcggcggcggcctcctactgcacgcgtccgagccggagagctcatcctgaacgccg

SEQ ID NO: 695 - DNA, 1019 bp, Homo sapiens
gccgcgcgcaaacttcccgggccggcgggcaggggcggcggcggcggggcccggatgggagcccgggccggcggcggcggcgcccatggacactaaccgcccgggcgcgttcgtgctgagcagtgccccgctggccgcgctgcacaacatggccgagatgaagacgtcgctgttcccctacgcgctgcagggtccggccggcttcaaggcgcccgcgctggggggcctgggcgcgcagctcccgctcgggaccccgcacggcatcagcgacatcctgggccggcccgtgggcgcggcgggcgggggcctcctgggggggctgccccggctcaacgggctcgcgtcgtccgccggcgtttacttcgggcccgcggccgctgtggcgcgcggctaccccaagcccctggccgagctgccggggcgcccgcccatcttctggcccggcgtggtgcagggcgcgccctggagggacccgcgtctggctggcccggccccggccggcggcgtcctggacaaggacgggaagaagaagcactcgcgcccgaccttctcgggccagcagatcttcgcgctggagaaaaccttcgagcagaccaagtacctggcgggcccggagcgcgcgcgtctcgcctactcgctgggcatgaccgagagccaggtgaaggtctggttccagaaccgccggaccaagtggcgcaagcggcacgcggcggagatggcgtcggccaagaagaagcaggactcggacgccgagaagctgaaggtgggcggctcggacgcggaggacgacgacgaatacaaccggcccctggaccccaactcggacgacgagaagatcacgcggctgctcaagaagcacaaaccctcgaacttggcgctggtcagcccgtgcggcggcggcgcgggggacgccttgtgaggacccgcggggtgggggcgaatctatttttgcagaatccgggggcggccccgggtgggcgcgagtcgctttgtatcatcaataaattatttaacgggtc

SEQ ID NO: 696 - DNA, 1501 bp, Homo sapiens
ctgttagtgactaatcattggagacaaccatgtttagtatttgagcattggttaaatgctaaagaaaaatcgccgttaaagcagttttctttttcactgtctttttcttttcgcggggaacccagctgttcctgcgagggccacctcctcaggaagaccccgcagctctcccgcggcgcttctgcaggaggcagcgacagtttcgagaacccgggccttcccctcccagtgcctcccggggttccggcgtttcaggcgctgctgttttccgggaagggcaggcgcgctgggccttggggagctgcgctcggcgggcggacgcgggggatcatggaagctgataaagatgacacacaacaaattcttaaggagcattcgccagatgaatttataaaagatgaacaaaataagggactaattgatgaaattacaaagaaaaatattcaactaaagaaggagatccaaaagcttgaaacggagttacaagaggctaccaaagaattccagattaaagaggatattcctgaaacaaagatgaaattcttatcagttgaaactcctgagaatgacagccagttgtcaaatatctcctgttcgtttcaagtgagctcgaaagttccttatgagatacaaaaaggacaagcacttatcacctttgaaaaagaagaagttgctcaaaatgtggtaagcatgagtaaacatcatgtacagataaaagatgtaaatctggaggttacggccaagccagttccattaaattcaggagtcagattccaggtttatgtagaagtttctaaaatgaaaatcaatgttactgaaattcctgacacattgcgtgaagatcaaatgagagacaaactagagctgagcttttcaaagtcccgaaatggaggcggagaggtggaccgcgtggactatgacagacagtccgggagtgcagtcatcacgtttgtggagattggagtggctgacaagattttgaaaaagaaagaataccctctttatataaatcaaacctgccatagagttactgtttctccatacacagaaatacacttgaaaaagtatcagatattttcaggaacatctaagaggacagtgcttctgacaggaatggaaggcattcaaatggatgaagaaattgtggaggatttaattaacattcactttcaacgggcaaagaatggaggtggagaagtagatgtggtcaagtgttctctaggtcaacctcacatagcatactttgaagaatagacttaacagaatcatgaaaactatagctttttaacccggattactgtaaatgtttgacaaaaatgaatatgcttttccttaaaaaatgaaaactttaatttttaccatccatttatgtttagatacaaaacttatttccatgtttctgaatcttctttgtttcaaatggtgctgcatgttttcaactacaataagtgcactgtaataaaaagttttgtttatagaaaaaaaaaaaaaaaaaaaaaaa

SEQ ID NO: 697 - DNA, 2066 bp, Homo sapiens
tcatccaggcccccccccccccagctccttgctgggaccctgagccctgcacggatctcagtttccctagaaggtctcccgagggcactaagcgttgcccctggccccctcccgctgcaggagactcggggctcggagcccgcctgagcgagccccccggagatggcggccccctatcccggcagtggcggcggaagcgaggtcaaatgcgtgggaggccgcggcgccagcgtcccctgggactttctacccgggctgatggtcaaggcgccgtccggaccgtgcctgcaggcgcagcgcaaggagaagtcccggaacgcggcgcgctcgcggcgcgggaaggagaacctggagttcttcgagctggccaagcttctcccgctgcccggcgccatctccagccagctggacaaggcttccatcgtgcgcctcagcgtcacctacctccgcctgcgccggttcgccgcgctgggggcgccgccctgggggctgagagccgcggggccgccagctggcctcgccccaggccgccgcggccccgcagcgctggtctccgaagtcttcgagcagcacctgggaggtcacatcttgcagtccctggatggctttgtgttcgccttgaaccaggaaggaaaattcctctacatctcagagacagtctccatctatctgggtctctcacaggtggagatgacgggcagcagcgtcttcgactacattcaccctggggaccactcagaggtgctggagcaactggggctgcggacgccgacgcccggccccccaaccccgccctccgtctcctcttcctcctcctcttcctcttcgcttgcagatacccccgagatcgaggccagcctcaccaaggtgcccccctcctccctggtccaggagcgctccttctttgtccgcatgaaatccacgctcaccaagagggggctgcacgtcaaggcctcagggtacaaggtcatccacgtgactgggcgccttcgggcccacgccctgggccttgtggccctcgggcacacgttgcccccggcccccctggctgagctgccactccatggacacatgatcgtcttccgtctcagcctgggtctcaccatccttgcttgtgagagcagagtcagcgaccacatggacctggggccctcagagctggtgggccgcagctgctaccagtttgtccacggacaggacgccacgaggatccgccagagccacgtggacttgctggacaagggtcaggtgatgactggttactaccgttggctgcagcgtgccgggggcttcgtgtggctgcagtctgtggccacagtggctgggagcgggaagagccccggggagcaccatgtgctttgggtcagccacgtgctcagccaagccgagggtggccaaactcctttggatgccttccagcttccagccagcgtggcctgtgaggaggcatccagcccggggccagagcccacagagccggagcctccgacggaagggaagcaggctgccccagcggagaacgaggccccccagacccagggcaaacgcatcaaagtggagcccggcccgagggaaaccaaaggctccgaggacagtggcgacgaggatccctccagccacccggccacaccgaggcccgagttcacctctgtcatccgggcaggggtcctgaagcaggatccggtgcggccatggggcctggcgcctcccggggaccccccgcccaccctcctgcacgcgggcttcctgccgccggtggtgcggggcctgtgcacacccggcaccatccgctacggccccgcggagctgggcctggtgtacccgcacctgcagaggctgggtccgggccccgcgctcccggaggccttttacccgcccctgggcctgccctacccggggcccgcgggcaccaggctgccgcggaagggggactgaggactggcagagctgccggcgccggaccctgcgacaaccggggtcccccaggacagtaggcccggctctgcccgtagccctgagaattaaacgccggctctccctgcaaaaaaaaaaaaaaaaaaaaaaaa

SEQ ID NO: 698 - DNA, 5268 bp, Homo sapiens
gtcacatggtcgcggctgccctccccgtcagccgccctcgccgccgcggtgcgctggctgcaggaagccgccgcgccgccgcttttgttgtcagggacccagcgaggagcgccgctcgccggccgccgccaccctctctcgctgcagcctgctgtgcgctgcacggcctggggcccgggagccccgcccgctctgcccatgagggggccccgcgaccaccgctgcttccagcccggggcggcgcggcgctgaggcggcggcggcggcgctgccccctctgcgggaagcgggcggccccggccgcctccgcgagggcaccatggaggtgaatgcaggaggtgtgattgcctatatcagttcttccagctcagcctcaagccctgcctcttgtcacagtgagggttctgagaatagtttccagtcctcctcctcttctgttccatcttctccaaatagctctaattctgataccaatggtaatcccaagaatggtgatctcgccaatattgaaggcatcttgaagaatgatcgaatagattgttctatgaaaacaagcaaatcgagtgcacctgggatgacaaaaagtcatagtggtgtgacaaaatttagtggcatggttctactgtgtaaagtctgtggggatgtggcgtcaggattccactatggagttcatgcttgcgaaggctgtaagggtttctttcggagaagtattcaacaaaacatccagtacaagaagtgcctgaagaatgaaaactgttctataatgagaatgaataggaacagatgtcagcaatgtcgcttcaaaaagtgtctgtctgttggaatgtcaagagatgctgttcggtttggtcgtattcctaagcgtgaaaaacagaggatgctaattgaaatgcaaagtgcaatgaagaccatgatgaacagccagttcagtggtcacttgcaaaatgacacattagtagaacatcatgaacagacagccttgccagcccaggaacagctgcgacccaagccccaactggagcaagaaaacatcaaaagctcttctcctccatcttctgattttgcaaaggaagaagtgattggcatggtgaccagagctcacaaggatacctttatgtataatcaagagcagcaagaaaactcagctgagagcatgcagccccagagaggagaacggattcccaagaacatggagcaatataatttaaatcatgatcattgcggcaatgggcttagcagccattttccctgtagtgagagccagcagcatctcaatggacagttcaaagggaggaatataatgcattacccaaatggtcatgccatttgtattgcaaatggacattgtatgaacttctccaatgcttatactcaaagagtatgtgatagagttccgatagatggattttctcagaatgagaacaagaatagttacctgtgcaacactggaggaagaatgcatctggtttgtccaatgagtaagtctccatatgtggatcctcataaatcaggacatgaaatctgggaagaattttcgatgagcttcactccagcagtgaaagaagtggtggaatttgcaaagcgtattcctgggttcagagatctctctcagcatgaccaggtcaaccttttaaaggctgggacttttgaggttttaatggtacggttcgcatcattatttgatgcaaaggaacgtactgtcacctttttaagtggaaagaaatatagtgtggatgatttacactcaatgggagcaggggatctgctaaactctatgtttgaatttagtgagaagctaaatgccctccaacttagtgatgaagagatgagtttgtttacagctgttgtcctggtatctgcagatcgatctggaatagaaaacgtcaactctgtggaggctttgcaggaaactctcattcgtgcactaaggaccttaataatgaaaaaccatccaaatgaggcctctatttttacaaaactgcttctaaagttgccagatcttcgatctttaaacaacatgcactctgaggagctcttggcctttaaagttcacccttaaggcctttgtttatttaaacatgaactgatggtaactgtacattttgtgctaaaatgcatatttatatgtgtataccatatgtggagatagaaaagacctttaagacaataaaagattgtaggctatctctgtaatcatgcaatagctgttcggattgagaactcttcagccatgattagacgttgactgcatctccctgatagaccaatcagctgtgtcgcacttaaactggagaagttacactgaagtataatcacactgaatgttagactttttcatctgccaaaaccaaaaaccattttgatctccctgtggttatcaatataacgcacaatcacaagtgtatgaggacttagaaattaatcctttgtggtaggagttctgttgaatgatggaaatcttattactaccacaagactatttgatctggtaattggagacttcgggatttaggagatctccatgtctgtatttactctaccactgctaaagtgtgtggtcctgggtagtttacttgcttgcggaaaatgagaattgatggtgtccccaatgccccacctcacagagttactaaaaaatgtctgtaaagcatatttacctcttgggagataggcactatgtaaataaggtaaaatttctgttattacaattattcataataatattcttttcttatttctaagcctttctgggaaatcatttcagtccacaccaaccatattattcagggttcctgccatatgtgtggggtatcctactgatacacacgtattcaaagtttatgggtacaacaaagacatagtacatgtacataatatgtatgtgaatatagttaaatatatttcttcacaatattttaaactgtgaagaactttatcatacaggaaacttaaaacaagaggtgtcaaaagacccaaattaggtgcattttacttgtttatgatggcataaccattgctttaaaatgtttagacagtagaatattgaatttatgctctatttttgtttatttaagcaacacttaatgtaaaagtgcaacaggcaattgaatccaaatttcaacgacaaaaaaaaaaaacatgtattttagagttcatctttggcaaaatctttggttcagggtactagttgtttaaaagttgattcatattcttaccttgtgctgagaaaggttgcattgctgccccttatacacatgctgcagcttgatgttaaagaatttttattctttctgaagaactaattaatgtttaaagcaactgtttaatatgatggcatgtgtgtgtgtgcgtgcgtgtgtatgttctgagtccacttcttttttcctaaataacactacagggattttgtcatattagatttaatttataatttgaaaaatcatctagtgtgtgacctacaggcttagaaatggtatagtcaaagacattttatccacatttctaatagtggacttgattaagtagataagatcagcatctgtttatggtagtaggagaaatagccaaagttgaggattttatgtatgttttcctgtttacctggaaaatagcaattaattggattttttggtaaagattgccttctgtataatgtttggattatataaaattgcaaaaatgataacagcccgctttactgtactaagcctgttactttcatgacgtgtgagcagaatgccttattttgtaatcttgtttaacttgttgctactgggacttgatttactgtggcactagttaagtaagttaaaaaaaagttaaaccctctcattattaaagaggaaaggcgatggtgatgtctgtagtacaatataaaccataattgtgatttaccttaagtaggtataactcttatgggatatacagtatagtttttgtgaatctttacatgatagcattatctttttataattttttttcctaagataaacaaatgcatagttttcttctatgggtgatagaaacagctttttgaagtaatgaaaacctcaaaagatcatgttgattcttaatttttgccttttgcataagcctctttataacatgtatctttaaaacaattaagtctttaggaatgtgtaaccagaactatgttagtattgcttataaaactttagttaggttcaatatatacatatatacatctctatataggtatatagatttgcattttgtcttgtaaaattttatttgaataaattcttcctgtaggtaatgggaaacaaaattaatagttcatatgtcactcatagcatttctatatttgaaagtagcccaatataaaacttttgattctaaaattaaaccagcagcctattacaagcacattctttgattgagtcattggttataaacttactaaatgcagagaaagcagccaatttaggaaacttctgagttggtgggacactgttgattaataatgtactgtatgaattaagtgatgctttaactttgattttacattttaaagttaaaatgtgggcattatgtcagcaaacttaagggcattatgtcagcaagctaaaacattttttttcctgtgcttttaatgtatctctttacatgatctgagagaggattcaagttgatagaaatagctgaggggaaaagggggaacatcttgggatgaagcttgtccttatggtgatggtttaattacagattaaaaaattagaaggaaatttcagtggattaagtgtatagctttcatatctacatttcaagaaattaccattgtaacttgataagagatgatttattttatgtaaacatctttgcaaagcaaggtgtagcagctcagctagatttattactgtgcacgaaagtaaatacctatctcaattattctttttcttttccaatataaagtttgctgaatgtacaagaagagtttatcacttaggatatagaatttttttaggggttgggggaggggatctgttaggaaactgttacctataaacaaagattgactggattcgatccaaaagataaaacttgaagctattctggaactaacatggaaaaatgaaatggctattgtttaaaaaaatgatagaaatacattgttgatgggatatgagttaagtttattttctacaaactgtaattgatgaggacatggataatatcttcatgtttctgagaagtaatctgtatgtggggggaggggataataaatatttctaaccaacaaaaaaaaaa

SEQ ID NO: 699 - DNA, 2087 bp, Homo sapiens
aagtttcacgctccgcccctcttccggacgtgacgcaagggcggggttgccggaagaagtggcgaagttacttttgagggtatttgagtagcggcggtgtgtcaggggctaaagaggaggacgaagaaaagcagagcaagggaacccagggcaacaggagtagttcactccgcgagaggccgtccacgagacccccgcgcgcagccatgagccccgccccccgctgttgcttggagaggggcgggacctggagagaggctgctccgtgaccccaccatgtcctctcctaccacgagttccctggatacccccctgcctggaaatggcccccctcagcctggcgccccttcttcttcacccactgtaaaggaggagggtccggagccgtggcccgggggtccggaccctgatgtcccaggcactgatgaggccagctcagcctgcagcacagactgggtcatcccagatcccgaagaggaaccagagcgcaagcgaaagaagggcccagccccgaagatgctgggccacgagctttgccgtgtctgtggggacaaggcctccggcttccactacaacgtgctcagctgcgaaggctgcaagggcttcttccggcgcagtgtggtccgtggtggggccaggcgctatgcctgccggggtggcggaacctgccagatggacgctttcatgcggcgcaagtgccagcagtgccggctgcgcaagtgcaaggaggcagggatgagggagcagtgcgtcctttctgaagaacagatccggaagaagaagattcggaaacaacagcagcaggagtcacagtcacagtcgcagtcacctgtggggccgcagggcagcagcagctcagcctctgggcctggggcttcccctggtggatctgaggcaggcagccagggctccggggaaggcgagggtgtccagctaacagcggctcaagaactaatgatccagcagttggtggcggcccaactgcagtgcaacaaacgctccttctccgaccagcccaaagtcacgccctggcccctgggcgcagacccccagtcccgagatgcccgccagcaacgctttgcccacttcacggagctggccatcatctcagtccaggagatcgtggacttcgctaagcaagtgcctggtttcctgcagctgggccgggaggaccagatcgccctcctgaaggcatccactatcgagatcatgctgctagagacagccaggcgctacaaccacgagacagagtgtatcaccttcttgaaggacttcacctacagcaaggacgacttccaccgtgcaggcctgcaggtggagttcatcaaccccatcttcgagttctcgcgggccatgcggcggctgggcctggacgacgctgagtacgccctgctcatcgccatcaacatcttctcggccgaccggcccaacgtgcaggagccgggccgcgtggaggcgttgcagcagccctacgtggaggcgctgctgtcctacacgcgcatcaagaggccgcaggaccagctgcgcttcccgcgcatgctcatgaagctggtgagcctgcgcacgctgagctctgtgcactcggagcaggtcttcgccttgcggctccaggacaagaagctgccgcctctgctgtcggagatctgggacgtccacgagtgaggggctggccacccagccccacagccttgcctgaccaccctccagcagatagacgccggcaccccttcctcttcctagggtggaaggggccctgggccgagcctgtagacctatcggctctcatcccttgggataagccccagtccaggtccaggaggctccctccctgcccagcgagtcttccagaaggggtgaaagggttgcaggtcccgaccactgacccttcccggctgccctccctccccagcttacacctcaagcccagcacgcagtgcaccttgaacagagggaggggaggacccatggctctcccccctagcccgggagaccagggccttcctcttcctctgcttttatttaataaaaactaaaaacagaaacaggaaaataaaatatgaatacaatccaaaaaaaaaaaaaaaaaa

SEQ ID NO: 700 - DNA, 1720 bp, Homo sapiens
agtccctcccctcagcctttccccaaattgctacttctctggggctccaggtcctgcttgtgctcagctccagctcactggctggccaccgagacttctggacaggaaactgcaccatcctcttctcccagcaagggggctccagagactgcccacccaggaagtctggtggcctggggatttggacagtgccttggtaatgaccagggctccaggaagagatgtccttgtggctgggggcccctgtgcctgacattcctcctgactctgcggtggagctgtggaagccaggcgcacaggatgcaagcagccaggcccagggaggcagcagctgcatcctcagagaggaagccaggatgccccactctgctgggggtactgcaggggtggggctggaggctgcagagcccacagccctgctcaccagggcagagcccccttcagaacccacagagatccgtccacaaaagcggaaaaaggggccagcccccaaaatgctggggaacgagctatgcagcgtgtgtggggacaaggcctcgggcttccactacaatgttctgagctgcgagggctgcaagggattcttccgccgcagcgtcatcaagggagcgcactacatctgccacagtggcggccactgccccatggacacctacatgcgtcgcaagtgccaggagtgtcggcttcgcaaatgccgtcaggctggcatgcgggaggagtgtgtcctgtcagaagaacagatccgcctgaagaaactgaagcggcaagaggaggaacaggctcatgccacatccttgccccccagggcttcctcacccccccaaatcctgccccagctcagcccggaacaactgggcatgatcgagaagctcgtcgctgcccagcaacagtgtaaccggcgctccttttctgaccggcttcgagtcacgccttggcccatggcaccagatccccatagccgggaggcccgtcagcagcgctttgcccacttcactgagctggccatcgtctctgtgcaggagatagttgactttgctaaacagctacccggcttcctgcagctcagccgggaggaccagattgccctgctgaagacctctgcgatcgaggtgatgcttctggagacatctcggaggtacaaccctgggagtgagagtatcaccttcctcaaggatttcagttataaccgggaagactttgccaaagcagggctgcaagtggaattcatcaaccccatcttcgagttctccagggccatgaatgagctgcaactcaatgatgccgagtttgccttgctcattgctatcagcatcttctctgcagaccggcccaacgtgcaggaccagctccaggtagagaggctgcagcacacatatgtggaagccctgcatgcctacgtctccatccaccatccccatgaccgactgatgttcccacggatgctaatgaaactggtgagcctccggaccctgagcagcgtccactcagagcaagtgtttgcactgcgtctgcaggacaaaaagctcccaccgctgctctctgagatctgggatgtgcacgaatgactgttctgtccccatattttctgttttcttggccggatggctgaggcctggtggctgcctcctagaagtggaacagactgagaagggcaaacattcctgggagctgggcaaggagatcctcccgtggcattaaaagagagtcaaagggttgcgaa

SEQ ID NO: 701 - DNA, 2213 bp, Homo sapiens
actctctcctcctcctcacctcattgtctccccgacttatcctaatgcgaaattggattctgagcatttgtagcaaaatcgctgggatctggagaggaagactcagtccagaatcctcccagggccttgaaagtccatctctgacccaaaacaatccaaggaggtagaagacatcgtagaaggagtgaaagaagaaaagaagacttagaaacatagctcaaagtgaacactgcttctcttagtttcctggatttcttctggacatttcctcaagatgaaacttcagacactttggagttttttttgaagaccaccataaagaaagtgcatttcaattgaaaaatttggatgggatcaaaaatgaatctcattgaacattcccatttacctaccacagatgaattttctttttctgaaaatttatttggtgttttaacagaacaagtggcaggtcctctgggacagaacctggaagtggaaccatactcgcaatacagcaatgttcagtttccccaagttcaaccacagatttcctcgtcatcctattattccaacctgggtttctacccccagcagcctgaagagtggtactctcctggaatatatgaactcaggcgtatgccagctgagactctctaccagggagaaactgaggtagcagagatgcctgtaacaaagaagccccgcatgggcgcgtcagcagggaggatcaaaggggatgagctgtgtgttgtttgtggagacagagcctctggataccactataatgcactgacctgtgaggggtgtaaaggtttcttcaggagaagcattaccaaaaacgctgtgtacaagtgtaaaaacgggggcaactgtgtgatggatatgtacatgcgaagaaagtgtcaagagtgtcgactaaggaaatgcaaagagatgggaatgttggctgaatgcttgttaactgaaattcagtgtaaatctaagcgactgagaaaaaatgtgaagcagcatgcagatcagaccgtgaatgaagacagtgaaggtcgtgacttgcgacaagtgacctcgacaacaaagtcatgcagggagaaaactgaactcaccccagatcaacagactcttctacattttattatggattcatataacaaacagaggatgcctcaggaaataacaaataaaattttaaaagaagaattcagtgcagaagaaaattttctcattttgacggaaatggcaaccaatcatgtacaggttcttgtagaattcacaaaaaagctaccaggatttcagactttggaccatgaagaccagattgctttgctgaaagggtctgcggttgaagctatgttccttcgttcagctgagattttcaataagaaacttccgtctgggcattctgacctattggaagaaagaattcgaaatagtggtatctctgatgaatatataacacctatgtttagtttttataaaagtattggggaactgaaaatgactcaagaggagtatgctctgcttacagcaattgttatcctgtctccagatagacaatacataaaggatagagaggcagtagagaagcttcaggagccacttcttgatgtgctacaaaagttgtgtaagattcaccagcctgaaaatcctcaacactttgcctgtctcctgggtcgcctgactgaattacggacattcaatcatcaccacgctgagatgctgatgtcatggagagtaaacgaccacaagtttaccccacttctctgtgaaatctgggacgtgcagtgatggggattacaggggaggggtctagctcctttttctctctcatattaatctgatgtataactttcctttatttcacttgtacccagtttcactcaagaaatcttgatgaatatttatgttgtaattacatgtgtaacttccacaactgtaaatattgggctagatagaacaactttctctacattgtgttttaaaaggctccagggaatcctgcattctaattggcaagccctgtttgcctaattaaattgattgttacttcaattctatctgttgaactagggaaaatctcattttgctcatcttaccatattgcatatattttattaaagagttgtattcaatcttggcaataaagcaaacataatggcaacagaaaaaaaaaaaaaaaaaaaaaaaaaaaaaaaaaaaaaaaaaaaaaaaaaaaaaaaaaaaaaaaaaaaaaa

SEQ ID NO: 702 - DNA, 4446 bp, Homo sapiens
ttcttaaccctttccagctttcccaccctctttggctttagccatggccttctgatctgtgtttctcaggggacctgcaggccccagatatagccccatgctgtcctcctaccccagagcacactgttcaggctacttccactggtactgaaatccagtatttcacttactctttttctttccaatatcctcatgacattcaatatttcacttactctaggtcctccctgcctaaggcccaagtcaactttctgtccagtgggatttgtaatccaatacctcctagccctagcagaatcccatgtggataatcagaaatgtgactggaaaaaggacagagctctatggctgtgggtcccagtccccactgctggcagtaagtccccagcagtgagctgtgtaagcaccttacattctgcgcttggttgaaaacagcaaggcaagcatccacttgagaaatgtcaacccctaggaaatcccagcctcaagtctttctcatcccttgggaagtgcaaattggatagagaagaaaccaattaaaaacaaaacaaacaaatcatacttagatattctggcttttctcaccagggctggattaaagcatgtacttcaaaataataacaacttaagtcaataaataaatgtaaggaagtccaaatgttcacctgaagacaactgtggtcattttttggcaatcccaggttctcttttctacctgtttgctcaatcgtggtctccctctccctctcttgttggggcccatgcccctgctttactgttgccagaggcttgtacttgtttgccttttaggtaggagcagttacttccactcccctcacctgccataaagcatctttataaacaaagcaagtagaagaaacacatcctggtatccaccacattcggcttttgttgattctgttcacttgggagcacctgctgctagggaataagaaggttgaggctgaagagtgaggactcttcagctcccctctggcaggacccgggagaggaaagagccctcagctggtccatcctccccactcctggtcagccttctgttctgagatcaaagtggtggggtcacattctcgagaactgtgctcagccccctcatctcacaccctttccctctccctgtgtgcctgcccccctcttacataaccatgctggtgattggcaccgtcataaatcaatactttgctcactttcacatcaagtaacactatccagggaggtggtttcaacaaaggaggaagtataaggagatctaggttcaaattaatgttgcccctagtggtaaaggacagagaccctcagactgatgaaatgcactcagaattacttagacaaagcggatatttgccactctcttccccttttcctgtgtttttgtagtgaagagacctgaaagaaaaaagtagggagaacataatgagaacaaatacggtaatctcttcatttgctagttcaagtgctggacttgggacttaggaggggcaatggagccgcttagtgcctacatctgacttggactgaaatataggtgagagacaagattgtctcatatccggggaaatcataacctatgactaggacgggaagaggaagcactgcctttacttcagtgggaatctcggcctcagcctgcaagccaagtgttcacagtgagaaaagcaagagaataagctaatactcctgtcctgaacaaggcagcggctccttggtaaagctactccttgatcgatcctttgcaccggattgttcaaagtggaccccaggggagaagtcggagcaaagaacttaccaccaagcagtccaagaggcccagaagcaaacctggaggtgagacccaaagaaagctggaaccatgctgactttgtacactgtgaggacacagagtctgttcctggaaagcccagtgtcaacgcagatgaggaagtcggaggtccccaaatctgccgtgtatgtggggacaaggccactggctatcacttcaatgtcatgacatgtgaaggatgcaagggctttttcaggagggccatgaaacgcaacgcccggctgaggtgccccttccggaagggcgcctgcgagatcacccggaagacccggcgacagtgccaggcctgccgcctgcgcaagtgcctggagagcggcatgaagaaggagatgatcatgtccgacgaggccgtggaggagaggcgggccttgatcaagcggaagaaaagtgaacggacagggactcagccactgggagtgcaggggctgacagaggagcagcggatgatgatcagggagctgatggacgctcagatgaaaacctttgacactaccttctcccatttcaagaatttccggctgccaggggtgcttagcagtggctgcgagttgccagagtctctgcaggccccatcgagggaagaagctgccaagtggagccaggtccggaaagatctgtgctctttgaaggtctctctgcagctgcggggggaggatggcagtgtctggaactacaaacccccagccgacagtggcgggaaagagatcttctccctgctgccccacatggctgacatgtcaacctacatgttcaaaggcatcatcagctttgccaaagtcatctcctacttcagggacttgcccatcgaggaccagatctccctgctgaagggggccgctttcgagctgtgtcaactgagattcaacacagtgttcaacgcggagactggaacctgggagtgtggccggctgtcctactgcttggaagacactgcaggtggcttccagcaacttctactggagcccatgctgaaattccactacatgctgaagaagctgcagctgcatgaggaggagtatgtgctgatgcaggccatctccctcttctccccagaccgcccaggtgtgctgcagcaccgcgtggtggaccagctgcaggagcaattcgccattactctgaagtcctacattgaatgcaatcggccccagcctgctcataggttcttgttcctgaagatcatggctatgctcaccgagctccgcagcatcaatgctcagcacacccagcggctgctgcgcatccaggacatacacccctttgctacgcccctcatgcaggagttgttcggcatcacaggtagctgagcggctgcccttgggtgacacctccgagaggcagccagacccagagccctctgagccgccactcccgggccaagacagatggacactgccaagagccgacaatgccctgctggcctgtctccctagggaattcctgctatgacagctggctagcattcctcaggaaggacatgggtgccccccacccccagttcagtctgtagggagtgaagccacagactcttacgtggagagtgcactgacctgtaggtcaggaccatcagagaggcaaggttgccctttccttttaaaaggccctgtggtctggggagaaatccctcagatcccactaaagtgtcaaggtgtggaagggaccaagcgaccaaggatgggccatctggggtctatgcccacatacccacgtttgttcgcttcctgagtcttttcattgctacctctaatagtcctgtctcccacttcccactcgttcccctcctcttccgagctgctttgtgggctccaggcctgtactcatcggcaggcgcatgagtatctgtgggagtcctctagagagatgagaagccaggaggcctgcaccaaatgtcagaagcttggcatgacctcattccggccacatcattctgtgtctctgcatccatttgaacacattattaagcaccgataataggtagcctgctgtggggtatacagcattgactcagatatagatcctgagctcacagagtttatagttaaaaaaacaaacagaaacacaaacaatttggatcaaaaggagaaatgataagtgacaaaagcagcacaaggaatttccctgtgtggatgctgagctgtgatggcgggcactgggtacccaagtgaaggttcccgaggacatgagtctgtaggagcaagggcacaaactgcagctgtgagtgcgtgtgtgtgatttggtgtaggtaggtctgtttgccacttgatggggcctgggtttgttcctggggctggaatgctgggtatgctctgtgacaaggctacgctgacaatcagttaaacacaccggagaagaaccatttacatgcaccttatatttctgtgtacacatctattctcaaagctaaagggtatgaaagtgcctgccttgtttatagccacttgtgagtaaaaatttttttgcattttcacaaattatactttatataaggcattccacacctaagaactagttttgggaaatgtagccctgggtttaatgtcaaatcaaggcaaaaggaattaaataatgtacttttggctaaaaaaaaaaaaaaaaaaaaaaaaaaaaaa

SEQ ID NO: 703 - DNA, 1381 bp, Homo sapiens
ataaaacagacatctcttgttttccagatactacgggtcataatccctaactccaatcactggcaactcctgagatcagaggaaaaccagcaacagcgtgggagtttggggagaggcattccataccagattctgtggcctgcaggtgacatgctgcctaagagaagcaggagtctgtgacagccaccccaacacgtgacgtcatggccagtagggaagatgagctgaggaactgtgtggtatgtggggaccaagccacaggctaccactttaatgcgctgacttgtgagggctgcaagggtttcttcaggagaacagtcagcaaaagcattggtcccacctgcccctttgctggaagctgtgaagtcagcaagactcagaggcgccactgcccagcctgcaggttgcagaagtgcttagatgctggcatgaggaaagacatgatactgtcggcagaagccctggcattgcggcgagcaaagcaggcccagcggcgggcacagcaaacacctgtgcaactgagtaaggagcaagaagagctgatccggacactcctgggggcccacacccgccacatgggcaccatgtttgaacagtttgtgcagtttaggcctccagctcatctgttcatccatcaccagcccttgcccaccctggcccctgtgctgcctctggtcacacacttcgcagacatcaacactttcatggtactgcaagtcatcaagtttactaaggacctgcccgtcttccgttccctgcccattgaagaccagatctcccttctcaagggagcagctgtggaaatctgtcacatcgtactcaataccactttctgtctccaaacacaaaacttcctctgcgggcctcttcgctacacaattgaagatggagcccgtgtggggttccaggtagagtttttggagttgctctttcacttccatggaacactacgaaaactgcagctccaagagcctgagtatgtgctcttggctgccatggccctcttctctcctgaccgacctggagttacccagagagatgagattgatcagctgcaagaggagatggcactgactctgcaaagctacatcaagggccagcagcgaaggccccgggatcggtttctgtatgcgaagttgctaggcctgctggctgagctccggagcattaatgaggcctacgggtaccaaatccagcacatccagggcctgtctgccatgatgccgctgctccaggagatctgcagctgaggccatgctcacttccttccccagctcacctggaacaccctggatacactggagtgggaaaatgctgggaccaaagattgggccgggttcaaagggagcccagtggttgcaatgaaagactaaagcaataa

SEQ ID NO: 704 - DNA, 4029 bp, Homo sapiens
gcttctccccgttgctaatgcgcaggcgctggcgggatagcgcgccgccgagccgagaaagaggtcacgaactctgaccccccagaaatacccaaacacagaaagctctctccgccgtgaatctcgatcccacatcccgtcggctttcttcaacctctcttcccggagcgccccccaatccacgagtggcagccgcgggactgtcgcgtcggcgcccgacgccggagtcagcagggcgcaaaagcgccggtagatcatggcaaccatagaagaaattgcacatcaaattattgaacaacagatgggagagattgttacagagcagcaaactgggcagaaaatccagattgtgacagcacttgatcataatacccaaggcaagcagttcattctgacaaatcacgacggctctactccaagcaaagtcattctggccaggcaagattccactccgggaaaagttttccttacaactccagatgcagcaggtgtcaaccagttattttttaccactcctgatctgtctgcacaacacctgcagctcctaacagataattctccagaccaaggaccaaataaggtttttgatctttgcgtagtatgtggagacaaagcatcaggacgtcattatggagcagtaacttgtgaaggctgcaaaggattttttaaaagaagcatccgaaaaaatttagtatattcatgtcgaggatcaaaggattgtattattaataagcaccaccgaaaccgctgtcaatactgcaggttacagagatgtattgcgtttggaatgaagcaagactctgtccaatgtgaaagaaaacccattgaagtatcacgagaaaaatcttccaactgtgccgcttcaacagaaaaaatctatatccgaaaggaccttcgtagcccattaactgcaactccaacttttgtaacagatagtgaaagtacaaggtcaacaggactgttagattcaggaatgttcatgaatattcatccatctggagtaaaaactgagtcagctgtgctgatgacatcagataaggctgaatcatgtcagggagatttaagtacattggccaatgtggttacatcattagcgaatcttggaaaaactaaagatctttctcaaaatagtaatgaaatgtctatgattgaaagcttaagcaatgatgatacctctttgtgtgaatttcaagaaatgcagaccaacggtgatgtttcaagggcatttgacactcttgcaaaagcattgaatcctggagagagcacagcctgccagagctcagtagcgggcatggaaggaagtgtacacctaatcactggagattcaagcataaattacaccgaaaaagaggggccacttctcagcgattcacatgtagctttcaggctcaccatgccttctcctatgcctgagtacctgaatgtgcactacattggggagtctgcctccagactgctgttcttatcaatgcactgggcactttcgattccttctttccaggctctagggcaagaaaacagcatatcactggtgaaagcttactggaatgaactttttactcttggtcttgcccagtgctggcaagtgatgaatgtagcaactatattagcaacatttgtcaattgtcttcacaatagtcttcaacaagataaaatgtcaacagaaagaagaaaattattgatggagcacatcttcaaactacaggagttttgtaacagcatggttaaactctgcattgatggatacgaatatgcctacctgaaggcaatagtactcttcagtccagatcatccaagcctagaaaacatggaacagatagagaaatttcaggaaaaggcttatgtggaattccaagattatataaccaaaacatatccagatgacacctacaggttatccagactactactcagattgccagctttaagactgatgaatgctaccatcactgaagaattgtttttcaaaggtctcattggcaatatacgaattgacagtgttatcccacatattttgaaaatggagcctgcagattataactctcaaataattggtcacagcatttgaaaactgtgactgcagtgctgtaaacttaactgttctttgccagaacacaagacaccaaattgaactcactgcttttgaggcatctggaaatttttactttaaaaagtaaccagaatccaaggtatttttattttagcttcccttaagaatttttgaagtgactgggcaggcagcagaaattaaatgaatttttcttcctgattcctttaaatgaatatgaaacactacaaatttattcttggtgaagatgatacctgaagctgtcacctcttgattatctaaactaagcgctcattctattttataaaacaaataaattagtctcttttttctgaattgtgttctagtcatatttaacttcattatgaactagtaaaaatacttaatggtcagaaatccctaaggagttagttccttgcattttactctgccataataatttttgtttaattaccatatcaaaataagattattttatgcttactggtataatgacagtattagaactataggaaataattgaatacatattttttgtcttctctaaatatcatggtgtcccttagcatatactactctcattgctggcagtgagacaggccattcatgatcttaagagttgccatttttaatgtatattattagttacaagcactttatatagcagaaaattgtttttgagaataagctagtgttgatattttaatatttttagcttactgctcgtgtttttgtttttgttttcgtttatagaggtgggtttcactgttgcccaggctggtctcaaactcctgggctcaagtgatcctgcctcagcctcccaaagtactgggattacaggcgcgtgccaccgtgcctggcctactgctgtctttgaaaataatagagactagccaggtgtagtggctcatgcctataatcccagcactttgggaggctgaggcaggcagattgcttgagctcaggagttcgagaccagcctgggcaatatagcaagacctcgtctctgtaaaaagaaagaaagtaataaagactaattgagcccaaaatgtttcactatttcaaaaaagatatttaaattgttgctctttcattccataaaaaggatctgatctctctcccacttttctgacctgagttagagcttcccaaacctgtcatgtatgggttttagccaatttcttttagatcactaaaaaaactcacccaatatgtcaaataatggatttatcatagccagtacatgttctcaaggcaagtttaaacattattttgaagctattgataattttttaaaataaagaaatattcactgatttttttcactgtaaagcacgggagggctgctttaacaacagtataagaatcagcctgaagccttgttactgctacaacaaattcattttagactcctcggatgtcttccacagtaatttattcttttagcaaacctgatactgataactgtttctttgctttgatttcttgatgaattattttggtatgtttgttgatttttaaagcaaacacggataatgcactcagagtacattttttgtaaagatttttgcaatagaagaaaagtgaagtttttgtggggatgtggattttattgcttactactttatagtaatcaaaagtttgaaaatatcaacttacagtctttaccagtttactaagggaaacttttttccctatttaaaacatgatcttagtcaacaattttatttataattatcagctaaattacatttagtataatactcaaatggaaaaatcagtagtttatacctttataaatacagtttagtaagccaaggaatcagggaaataatcctttaaaataatgtactaatagttaagatgtttcaggtgttttttctgattaaatttgctactatatttggaagactttaaaactatattaaaatgtgacttgcattacaaaaaaaaaaaaaaaa

SEQ ID NO: 705 - DNA, 8330 bp, Homo sapiens
ccgctcccacctcggcgtctcgtctctcgcccgctgccccgcgagcccgcggcccccgggctcccgccatccgccgacaccgggagcccgggctccccgcgccctgccctccgcgccgggggccgcccgccgcagacacgggacccgcttcgaggccgctttggcgccaaatcctgaggtaacacgtacacagacctctcggccggaatctccagggatgaccagcccctccccacgcatccagataatctccaccgactctgctgtagcctcacctcagcgcattcagggctctgaacctgcctctggcccattgagtgttttcacatctttgaacaaagagaagattgtcacagaccagcagacaggacagaaaatccagatagtcaccgcagtggacgcctccggatcccccaaacagcagttcatcctgaccagcccagatggagctggaactgggaaggtgatcctggcttccccagagacatccagcgccaagcaactcatattcaccacctcagacaacctcgtccctggcaggatccagattgtcacggattctgcctctgtggagcgtttactggggaagacggacgtccagcggccccaggtggtagagtactgtgtggtctgtggcgacaaagcctccggccgtcactatggggctgtcagttgtgaaggttgcaaaggtttcttcaaaaggagtgtgaggaaaaatttgacctacagctgccggagcaaccaagactgcatcatcaataaacatcaccggaaccgctgtcagttttgccggctgaaaaaatgcttagagatgggcatgaaaatggaatctgtgcagagtgaacggaagcccttcgatgtgcaacgggagaaaccaagcaattgtgctgcttcaactgagaaaatctatatccggaaagacctgagaagtcccctgatagctactcccacgtttgtggcagacaaagatggagcaagacaaacaggtcttcttgatccagggatgcttgtgaacatccagcagcctttgatacgtgaggatggtacagttctcctggccacggattctaaggctgaaacaagccagggagctctgggcacactggcaaatgtagtgacctcccttgccaacctaagtgaatctttgaacaacggtgacacttcagaaatccagccagaggaccagtctgcaagtgagataactcgggcatttgataccttagctaaagcacttaataccacagacagctcctcttctccaagcttggcagatgggatagacaccagtggaggagggagcatccacgtcatcagcagagaccagtcgacacccatcattgaggttgaaggccccctcctttcagacacacacgtcacatttaagctaacaatgcccagtccaatgccagagtacctcaacgtgcactacatctgtgagtctgcatcccgtctgcttttcctctcaatgcactgggctcggtcaatcccagcctttcaggcacttgggcaggactgcaacaccagccttgtgcgggcctgctggaatgagctcttcaccctcggcctggcccagtgtgcccaggtcatgagtctctccaccatcctggctgccattgtcaaccacctgcagaacagcatccaggaagataaactttctggtgaccggataaagcaagtcatggagcacatctggaagctgcaggagttctgtaacagcatggcgaagctggatatagatggctatgagtatgcataccttaaagctatagttctctttagccccgatcatccaggtttgaccagcacaagccagattgaaaaattccaagaaaaggcacagatggagttgcaggactatgttcagaaaacctactcagaagacacctaccgattggcccggatcctcgttcgcctgccggcactcaggctgatgagctccaacataacagaagaacttttttttactggtctcattggcaatgtttcgatagacagcataatcccctacatcctcaagatggagacagcagagtataatggccagatcaccggagccagtctatagcgcaaaccacacacctgccaaggagcaacagaatccttccaggaccgttcacatacaaagaaaagtagtggtattttggtatgtgcaaatatttccatatgttagccatttcctgtctggtttctccttatctgttaatcccagacaatagcaattaaaagactagtaggatcctttcctgacataagaaatgttttaatgccttttgatgaagcagcagattttggaacaatcttttaactcaatttgtatttagaaattctcaaagggcaaaaaacaaaaaaaaaggttttataatgtcagagactagtattaaagaaaactgaaagaacctgagagaatagtatgtgtgtatatatatatataaaaaagtccttggaattatagatactaattaccagggtaataatattagcactttctaagcacttatcaatgtgtaacgttagcaacatcttgcctgtgggcagggcaaatggaaaactgtgtatgtcttttgccgaaatgctaatgatttctgtgaaaactcactagggtacaggagacaatcatttatgtttaagaaaagaaggcatcattcctaattgtgtgcacatgttgtggagttgagctgaattctgtgaatggaaacgtggctcatttgcatcatgcagtaagtgggagtgtggtagcacagtcggtggtgacccagttcagaagcttctagccatagagcagacacttgtcaggttccctgactacttggtcctggtctctgatgggcatctgcagactcctctagaacctggggttctcctttgatgactggttatctgaattggattgcaactagtcagacattaactgccaaatgagatgtacagttcctccagcaagtgaaaacatccccaagtcacatccgccgctcgtggcagatggagccttgtgaccaaaaagtgcaaggtgggcattttgagctcttgacagtacttccaatacaattgggggtgcttgtgtgtttgtccagatggaggagtgtggccttggagtgtgagcgttaccttcccagggctttccactccaaatgcccccttgaaaagggctcgtgtttctgcagctccatcataactgtgaggctggattggggctgggcaggagcctgctgccgcctggcgagagtggttagggcctggtaaagctggatggaaggtttcaggacaatttcttcctgttgaccttaaataccagagattttaaaaatgtgtatagactcagcatctctgttggcaagtctgttaatgttaccagcacactgtgcactttggttcccccaggtgtgtgccagccgaccaccccggagcattttaaatgcaggctgcttgctccttaaaaacaaccctcaatttccagggtgatagtctttctcctcataaattgtagcaaccagagtttacagcaagaacagtatgcgcttaaaaggaagttatgtctaacttcaaacacccgtaaattcccacggatgtgaatatatagcaagcttttcctgtttgagaacagtggcatgtggaagacccggtcaattgctttgtcttttgctttttaaatagtccagattaagaaaatacaccctgttgggttaaatttgcctctcttgatttgttaatcagatgatatccaaaaagatccctggacactcccctgactcacaggtgctctgatctggctcaggctggcgccacatgtgctccacaggggtgcagtctggccagctacagacgcccctgtggtgccacattggacagaatggaagctgctgcaggctcaaggcagaacaggatgcttgatcctgaagggttagcagcactttacgcaagtcagtgttagtagggtaagtgggaacagtgtttccaacttctaaattcttgtttggatttaattatatcattttataattcttgccttggcagcaaattttggagagtagtgggagtggccattataaaatgatggaaaggatttaattttgccagcttaaagtaatttttacttttctaaccctgatgtgttttcagtttcaaaattaagacaaaaaaccagctgagacaatggaattagggcaggtttgtttcatttctgcttgtgaaggcttttagtagcaggcatcctgcagctcagtggtgcctctaacacagattgttgcctgccttccgtcgttttgatccttgagagtgaccatgagggccatgttgcagttccctgggaatacaagcataacagctttcagatcccagttcttggtgttggtgaaaaggtctccaccagcccctcctctcattcccaggtcattcagtggcagccagtaggctgcttagactcaggctggataaggaagtgttgggctgtggtgaaacaaccttgcagaaaacgtgattttgcttggaaaggtgctgattctaacctggtcctgctctttaagtccccttgctggtgatggctgattccagggactgttttgggctttgaacacctcttggttggtttctgagatcctcttggccttactttgaagtggccttttctttaaggatcatgtccacgtaacctgtattcttgctgctttaactcatttcaagcctctgactgcaggtccatttcatctcctgtcaggttggttaagtaaagtcagcccaaagtcaagaattacttaaagagatgcaaaccaaatatttgggctccaactttcacagggcttatagcccttattagcagtttgtgaaactttgggtttcatgaagtgagacctgtcctctggctactgaactccatggagccacgttcatgctccctcttctactggcctggctgctcctccctcaatgaggagaggcagctggctcagagaggtgggacagacacatgctgtcatcagttaagtgagctcttttccagaagtatctcagataatgttgggttaagacagatagatgttgaaaatggtggagatcattacacattagcataaaacaggacaggaagagattttttgaaagaccaaattagttgagcaagtaatacttttcaagttactcctggaaggtgtttttaaggaagtgtgttacctaccatactctcctaatttgacatttctgtgtcctgaggagttacatttattgtctaacccttgccataaggctgtggtttgaggttcttttgctgttctgggctttatatttaatttcaggtgtagtcacttctaagatgtgtaattgccctcaagagggactgatttttagcttgtcattgtcagtattgaatgtggactcttctgaggcagttaggacaccagccatggtgttaacagtggatgcgttaggctccttaatctcaaggcaatatccacgctacacacatacttattagctgtcttacttgtttgggggatagttacggcaaggagcaaaaaattctaaggactctagctgtttctagtgcttttactttcatagtcctttgaggacatttcctgcagagcactcttgctcacagcccgccctctgcagggcttccagcccctggccgcaatcagcagttcatgccacatgtgtacatccatgttctgggacctgatctcattggagtccagaagcttgttgcccactttccagtgtaaatgactttatgtgcaatggggtcataggtaacattttaactcttttcttagtccaggtcataggaagtctcatcatctgacagccacttttctcccagggaaggcggtgcccactgggccctgggaatgcctgagccagcagagcagatgccccacgtgcttcctttatccagcttccattctctcagttatgaggctctttgaaaatgtcttaactttgatgtaaatttttaaagccaacccctcatcaagacagggttggtttgggtcttttgtacacagggtctggaccttctcattgtgtgcctcccaccagcgtgcacttcgtatgtccagccctgggtcccttcagcagcattgtgcgtgtacaggtttctaggctgtaagactgaatgaatgtacatgtgtttatatcctctccatatgtacagtgtatatagtgtgtgtatgtgtacatagatgtatattatgtatacagacatgtatccaaactttcctttaaagagagtttttcataaagttgctaatgtaaactgatatgggtgttccaaggtccctcggcagggaagatttgctggtgattttcttcactccattttcctttgggtgagcctgcctgggaagggccatgaagtcagaatctccactctgcaaaaggaagaattccaggcagaagaggttctgacagggtgacatttccgtatattctctaggttcggacaagagccaggaagctggaagacagtttatcttaatatccaaaactaagtgggaatttttaaccttttcatgcacctattcatggccctacctggaaggaacttggcagttgggttgagccatcagccttcccagctattcagctctgttgagtagcccagagacaggcgtcacggtcagagattcagaacggtctgtgtcagtgaggcctgactcccaaagatggtagcaatttcccaggcttgcgctgtgctcagtcagcaagatgtggggcactgtcctatgactgaataaatagtaattcccatctttctatcgccagttaaaaataaacaacctaccaagtattattctttaaaactaagcatggatgttgatggctaacttctgcggcatataagctacagatctcaagttacttctctaactgtaagcatgtaaatgactttaactcctttctataagttatgattttaaattttcagataagaattgcattttaatatggatatgtgtgcccttaaaagctacagataccaaattttcctcgtccaggtctactcggacgaattttcccccttaatctggccttaaactgagactcggcccttgagagccagggcctggcccagcagtagttgctcatagacctgggaagcaggggcctgctggaaggaatcactagattgctgcaaaaactcacataatccacagtttcctctttttctttttaaaataagttatcaaaatgttttaaaaacactttatgagaccatagtactcagtgccttttgtgagacagtgggtcatttagccttcagcttccctgtttttgatgtagagaaagcttctatttcactggcctcatcccacaagattgtgcgacctttccccgtcatagcctgtcgtgacaatcacgctattgaaagtggctttctagttaaaatgcaattggaaacttgacagtctctaaatgaattaaaagtttcctttggggctatttagcttaacagcagtctacaaataattaaagtgtgagcttaagaaaagtatctttgcggggagaaaaatgtcagatatttttaatgcccagctataaataattttggtgtcttgatatttatacatgcaaaatagaaaaaaaatgttcaacatttattgattgatagactgttaaaatttaatgtttggaataacatttggaagtagtagactttgcattaaaaaatggcttttctttaggaaagtataatcaattattttaatgaccatagcattcatggactcaaatgctgctgccacacacaactcaagtgctggaatatttttctacagtctctctgttctacggattatcttgtaaaccagtgttcaactagttttataactgaaaagctgcacatttttcacagtacaagccgtagtttttacctgtagtttggacttctctgttagaatgtaactgcattaccagcccttttaaaggcatctatctatcaaaggaaaatttgggtgttagattttcttgggaccgtttctgtaacctttgcccttcacaatatagaaaatattggttttgccattacattttaatgccaggtttaaaacctgttgaaagctgcagctttatacagctttcttctccctgtgaaatcactttgtttatgtgatggcatttaaaaaatagcatgttctttttaaactgaattttatatctaatcaatgtcttcagtcttgaagaagaatttgcattgttgtgtttgtatatagagtattgcagtgcatgaattagctttatgcattttattaaatgctgtttcaatgtggcattattgttgtggcttaatactactacctaaatgaggtttatactattaaaagtgaattaaagactaa

SEQ ID NO: 706 - DNA, 3271 bp, Homo sapiens
agggacgccctattcccctccccgcggctgcctgtcagagcgcttctggagatattacaggggacccagcccgcagcgacaggcacaaagtcacggggtaatgaacttcggggacccttcgccgctgcgtgcgcggctctccccggaaacccggacctggccgcctcttccctcggaagatttcccagcaatctagttttcccactctgcgcttgggttccggcagcgcggagcccgtctgcctctgagactgcggtagtgttttccttctttccttgggagaccagcggtcggcagagattgcccacactctgcatgcctatgtagagggagagatcgaagactgagtgacaggaatggggaaaaagagggatttcgctccgtaggaaggccattttcgtgtctccatctctgtctttcaacatccctctcttgctgttcttccttcttcctcagtcttcctgtccatctctccatctgtctgtccatgtgtgtgtccatatcaagcagcattcccagcagctgcggttttgcaagagccgggaagaaacttaaggatgcttaaatttccactgttggacgaattctgagcgcccagggagcagcgcagcgcgcgactgacacccacctgtcccgcccaggagccttgcaggctggagggcagctggagagcggcggcgcccggcggcgaggcgggcgctgccggccgggactcgggcagcgcccaccaaccgctccgccccgggacagccagcatgagcaagccagccggatcaacaagccgcattttagatatcccctgcaaagtgtgtggcgaccgcagctcggggaagcactacggggtctacgcctgcgacggctgctcaggttttttcaaacggagcatccgaaggaataggacctatgtctgcaaatctggaaaccagggaggctgtccggtggacaagacgcacagaaaccagtgcagggcgtgtcggctgaagaagtgtttggaagtcaacatgaacaaagacgccgtgcagcacgagcgggggcctcggacgtccaccatccgcaagcaagtggccctctacttccgtggacacaaggaggagaacggggccgccgcgcactttccctcggcggcgctccctgcgccggccttcttcaccgcggtcacgcagctggagccgcacggcctggagctggccgcggtgtccaccactccagagcggcagaccctcgtgagcctggctcagcccacgcccaagtacccccatgaagtgaatgggaccccaatgtatctctatgaagtggccacggagtcggtgtgtgaatcagctgccagacttctcttcatgagcatcaagtgggctaagagtgtgccagccttctccacgctgtctttgcaagaccagctgatgcttttggaagatgcttggagagaactgtttgttctaggaatagcacaatgggccattccggttgatgctaacactctactggctgtatctggcatgaacggtgacaacacagattcccagaagctgaacaagatcatatctgaaatacaggctttacaagaggtggtggctcgatttagacaactccggttagatgctactgaatttgcctgtctaaaatgcatcgtcactttcaaagccgttcctacacatagtggttctgaactgagaagtttccggaatgctgccgccattgcagcccttcaagatgaggctcagctaacgctcaacagctacatccataccagatatcccactcaaccctgtcgctttggaaaactcctgttgcttttgccagctttacgttctattagcccatcaactatagaagaagtgtttttcaaaaaaaccatcggcaatgtgccaattacaagactgctttcagatatgtacaaatccagtgatatctaagctcacaagatacccacttttcaggatgggacagtatcagatgaacttcaacccatggagaacaagcctcaactaacaaacccttcaggaagcatataccggggaatgtgtagccttcaggaaaaaaatgccaattgacacaaagcattccagtagctatgacctgccgccctgaccaggatagggcgggtgggaaggagaggggtgcaacaggaccgcctgcactgaaaactcactgctgccatgccctgggagggggcaaactgggggttgccacaggccgtgccattctgcctcttacctggaagatcaggctgaacgatcaaaagctgaaacataagtagtgctttctcttcctttttagcatacaaagtttggtaaccaaatatagctctgtgtataacatcgtactgcggccttcaaaactacgttatgttggagcatttattttaaaaataatggtaggttttaaattaaaagtgttatcaaaagtttcccctctattgtaatacattattaagtggccttcagaactgagttaataagtgaaaagtagcttatgccatgtgatttgctttttctctatcttcttttttcttttctttctctttcttttgttctttcttcttcttttttaataccataggccaggcaaccttgtcaaaggaattgatggacaaaatgagattctcaccaggacttcaggttggataacatgtcaaaaagagaagagctttactaaaagaacataagtcaagggaggatgaataaaaacagcaaaaccaaataaagtggagatgagtgattgagtgaggtagattgctgtcccgttaacatagtgctgaaaccaaaggcagtgggggtccaaactcgtggtgcagcaagtcacaccagacaggaaacgaatatggacgtaattgcagaaggaacttcaaggagatgaatgaatgctaaaagggttcttgactgatccattgctaacagcctgagactcttcaatgcctttccgaaaactggtttctagtaaagccttgaatgaacacacacacacacacacacacacacacacacacacacacacacacacaccgtcctacactttaagctgctcctttggtatgactctatacttatggaaatgtagaaacaaacatttttaaatagctgctgtacttttcacattttgatttattaggtactagcactgaggaaaaaaaattcagcacttggactatcataggatgagtaaaacttttcttgtacaaagtgaattaactgatttgtgaagttaaaaggttgtactcattgtatttacaaagaataaaaatatattgaatttaaatgaaaaaaaaaaaaaa

SEQ ID NO: 707 - DNA, 2102 bp, Homo sapiens
agaaatctcctcaagccagagcctgtgctgtgaggggcttcgggaccttggggcagctcctgagttcagacagagttcaggaagggagacaggggcacagagagacagaggttcatggactgaggcaaaggctgggccaggctcagcaacccaggcctcccgcaggcaggcagaggctgccctgtaacccatggagaccagaccaacagctctgatgagctccacagtggctgcagctgcgcctgcagctggggctgcctccaggaaggagtctccaggcagatggggcctgggggaggatcccacaggcgtgagcccctcgctccagtgccgcgtgtgcggagacagcagcagcgggaagcactatggcatctatgcctgcaacggctgcagcggcttcttcaagaggagcgtacggcggaggctcatctacaggtgccaggtgggggcagggatgtgccccgtggacaaggcccaccgcaaccagtgccaggcctgccggctgaagaagtgcctgcaggcggggatgaaccaggacgccgtgcagaacgagcgccagccgcgaagcacagcccaggtccacctggacagcatggagtccaacactgagtcccggccggagtccctggtggctcccccggccccggcagggcgcagcccacggggccccacacccatgtctgcagccagagccctgggccaccacttcatggccagccttataacagctgaaacctgtgctaagctggagccagaggatgctgatgagaatattgatgtcaccagcaatgaccctgagttcccctcctctccatactcctcttcctccccctgcggcctggacagcatccatgagacctcggctcgcctactcttcatggccgtcaagtgggccaagaacctgcctgtgttctccagcctgcccttccgggatcaggtgatcctgctggaagaggcgtggagtgaactctttctcctcggggccatccagtggtctctgcctctggacagctgtcctctgctggcaccgcccgaggcctctgctgccggtggtgcccagggccggctcacgctggccagcatggagacgcgtgtcctgcaggaaactatctctcggttccgggcattggcggtggaccccacggagtttgcctgcatgaaggccttggtcctcttcaagccagagacgcggggcctgaaggatcctgagcacgtagaggccttgcaggaccagtcccaagtgatgctgagccagcacagcaaggcccaccaccccagccagcccgtgaggtgacctgagcatgcgcccacccactcatctgtccctgacctctaacctttctctgcctctcccacactctcccagagctcactgattagacagcacaagggtctcagttcaacagcatacagccaacatctatggtgtcccaggcacagtgccaggccccgggagtggggaccaagatgtacataagacaaagctactgccttctagagacaaccggcagtgacctcactgaagacaaaaactgccctagccaggtactgagggttgcatgaatctgcaggagacagagatccccttgcatgggaaacataaagcagaattgggagggactttgtggagacagggctggacttgaaaggaagaagaagtctaaaagaaaacatcatttgcaaagggagagaggggcaagcatgatatgttgttagaacaggagcccactttgaaggtataacaggttcctgccagtgagaaatggggagaataagccagaaaagtaccctaggaccagcccgttcaggactttgaatgccagccaaaggccacgtctgacttgggaggcagagggcagctactgcaggtttccgagcagagggtcatacacagggctggacctcacgcagactggcatggccatgggtccagaggatactactgggaaggggatggcagctactgccaccttccagatggttccatggagttctgatctttgggcatggccaggggaagcagaagggagactctaggagttgaaatgggtcagacccggtgtttgggtgaaggtaaggaatgagggaagaggagctctttg

SEQ ID NO: 708 - DNA, 3210 bp, Homo sapiens
cctctttctcccccctctctccctcctctcctctctctctcctctcttctctgaacctctcttctctttctcttttcttacatattctactagttgttttccccttcttcttctcctttctctcctttttctccctcctccttgtctcttttactccattcctgcagaagagagagggctaaacttaaaaaaaaaaaaaaggaggaggaggaggaggaggcacccccttcgtattcttcttatcgttattttatacatatatgattttttttggagggagggtgttggttgccggctgaagagcacttatttaaaatactaaaaaaagaacatttttgggcgatctccagggtttttttaactagctctgtgtgttatagcagaagaagcagaagaaggagcaagaaagaggaaaagaagaggattatttattcgacctactttggatgtctctctcgcttttcctttttcctttttttggcaattattttcttctgatttttattttttctatttcgctgtgatttcgtcgccggcgtgaattatcccgtatttttctcccccttccgtcacctcccgaaagaagaaggcagcgagagcccggcgccaccggcacaacaaaaagagcaaagtgtgtgatcttcctcgccggctgcctcccgctctccagcgctgccttcctgaatggctggctgcgtccggccctggacctggccccccgacacccgcgcgccctgatcgccggcggcagcctcgcccagcgccctgctcggctcaccgcgctccccgcactcccgagcccggcgagggctcccgccgggacagcggcggcgccgcgggcggccccggcctccgctcgcgctccggctgcggccccgactcctgctcggactccggcccgggtcccggctcctccagcggcgctcgccgcagcagctccggcggcagctccagcggcgcctgcagccgcgacctcctcctcctccgccgccgccgccgcctccgccctcgccggcttcctctatgtcggctcagcccgcgcgctgcgcgtagcccgagcggccggcgggcgggcgcccggcgcgggtgagcgactgtgtgtgcgagtgtgtgtgtgcgcgggggtgcgggcgaggcggagggcgagtgtgtgcgcgcgccgtggcccatgcccgccgcccccggcgctgcgccccgcgccgctcccggctgccgcctgtgccatttctgattttgcaacttggggaagaagaaaaaagcgagagaagggagcttgctcgccggggggtggggaggggggaaggagagcgcggcccccccaggaacggagcgcggggggagcgggcgaggggagcaggggtgttggggggggagcctgagagcctgggggggctgcaaaaagagagaaagaaaacagcaggaaccacaacaaaacgccagcagggcgggcgggcgcgcagcagcagcggggcggccgaggcagtagcggcggcagcggcggcggcggcggaggcagcggccggtgtccggctcgggctcggctcctgcgaccccggggcgcccggcgggccccccgccccctccccctccccccttccccttccccttcccctcccagcgcgcccgcgcgccccgcggccctcggcgagcagctcggctccccccagcgctccccgggcccaaagatatggcaatggtagttagcagctggcgagatccgcaggacgacgtggccgggggcaaccccggcggccccaaccccgcagcgcaggcggcccgcggcggcggcggcggcgccggcgagcagcagcagcaggcgggctcgggcgcgccgcacacgccgcagaccccgggccagcccggagcgcccgccacccccggcacggcgggggacaagggccagggcccgcccggttcgggccagagccagcagcacatcgagtgcgtggtgtgcggggacaagtcgagcggcaagcactacggccaattcacctgcgagggctgcaaaagtttcttcaagaggagcgtccgcaggaacttaacttacacatgccgtgccaacaggaactgtcccatcgaccagcaccaccgcaaccagtgccaatactgccgcctcaagaagtgcctcaaagtgggcatgaggcgggaagcggttcagcgaggaagaatgcctccaacccagcccaatccaggccagtacgcactcaccaacggggaccccctcaacggccactgctacctgtccggctacatctcgctgctgctgcgcgccgagccctaccccacgtcgcgctacggcagccagtgcatgcagcccaacaacattatgggcatcgagaacatctgcgagctggccgcgcgcctgctcttcagcgccgtcgagtgggcccgcaacatccccttcttcccggatctgcagatcaccgaccaggtgtccctgctacgcctcacctggagcgagctgttcgtgctcaacgcggcccagtgctctatgccgctgcacgtggcgccgttgctggccgccgccggcctgcatgcctcgcccatgtctgccgaccgcgtcgtggccttcatggaccacatccgcatcttccaggagcaggtggagaagctcaaggcgctacacgtcgactcagccgagtacagctgcctcaaagccatcgtgctgttcacgtcagacgcctgtggcctgtcggatgcggcccacatcgagagcctgcaggagaagtcgcagtgcgcactggaggagtacgtgaggagccagtaccccaaccagcccagccgttttggcaaactgctgctgcgactgccctcgctgcgcaccgtgtcctcctccgtcatcgagcagctcttcttcgtccgtttggtaggtaaaacccccatcgaaactctcatccgcgatatgttactgtctgggagcagcttcaactggccttacatgtccatccagtgctcctagaccttgggcgcttcccacctgccccgtccccctagagactcagaggacccacctgggccaaggactccaaagccgcggggacaccgggaagtgcagcgggccaggcaggctgggtgggagggaggagggccgagacaggagcagcccacccagcagaaatacaatccgagctacaaagcatgggaaaaagagactcttttaggatcagatctgtgagcacgttggcgaggaaaaacaaaaaaaaaaaaaaa

SEQ ID NO: 709 - DNA, 5110 bp, Homo sapiens
gccgtactgccttttttcccctctttcattctttctctccgtctttttctcccccctctgcgcacgaaggatgtgcttctaggtggtgatctgccctcctctctctcttttatcatttctcccccgccgccggcgagttgactctttccctatgtgtgtgaggcggcggcggcagcagcagcagcagcggctccggcggcggcagcagcggcagcagcgacttcagcggcggcggcggcgctagacgcagcggctccgggcccgacccggcggcttcggcggcggctccggcggcagcggcggcccgggcggcccgcagggaacggcgagcggcctccacccagcgactgcgggcggcggcggccggagagagcgaggcgcgcgccggacgcccggggcaggcggcggcggcggcggcccagcgccaggacgacgccgcgcagcgcccgacgcggaccactttcatgctgattcccccggacccgggcagcgctccggccactccgcgggccgccggcctccgccccggcctgcctggctccctgggcgcgcccgcacccggcgcctccgatctcctagtcctcctgatttcgatggctttcctgaatggctgactgtgggctgccctggacttggcccccggacagtcgcctctcctcctcctctacctcctccttcaccaccacctcctcttcctcctcctcctcctcctcctcctccgccaactcctcggctgcacaccagctctaagagcgagagtgaacgagagagggagggagagagtgagagcgagcgagatctttggagagatttttttttttgcctcctacttctgtcttgaagccagacaatcgacttcagctctccctcccctccctctttctccacgttctgctcccactcgctctcctgtccccttcccctcccctcccggcggaaagccccccgaaaccaacaaagctgagccgagagaaacaaacaaaacaaacacaccgggccagacaagccatcgacaaaactttgcaaaagcaaaaacaaaaaaggaaaaactaaccaacctcaaccaaccagcccccgagccacccggggcgccctcccgcgccctcttgcaccctcgcacacacaaaaggcggcgcgccggagcccgagacccggggagccgccgccgccccgccgccgcccgcagccaggggagcaggaagtccggacgcagcccccatagatatggcaatggtagtcagcacgtggcgcgacccccaggacgaggtgcccggctcacagggcagccaggcctcgcaggcgccgcccgtgcccggcccgccgcccggcgccccgcacacgccacagacgcccggccaagggggcccagccagcacgccagcccagacggcggccggtggccagggcggccctggcggcccgggtagcgacaagcagcagcagcagcaacacatcgagtgcgtggtgtgcggagacaagtcgagcggcaagcactacggccagttcacgtgcgagggctgcaagagcttcttcaagcgcagcgtgcggaggaacctgagctacacgtgccgcgccaaccggaactgtcccatcgaccagcaccatcgcaaccagtgccagtactgccgcctcaaaaagtgcctcaaagtgggcatgagacgggaagcggtgcagaggggcaggatgccgccgacccagccgacccacgggcagttcgcgctgaccaacggggatcccctcaactgccactcgtacctgtccggatatatttccctgctgttgcgcgcggagccctatcccacgtcgcgcttcggcagccaatgcatgcagcccaacaacatcatgggtatcgagaacatttgcgaactggccgcgaggatgctcttcagcgccgtcgagtgggcccggaacatccccttcttccccgacctgcagatcacggaccaggtggccctgcttcgcctcacctggagcgagctgtttgtgttgaatgcggcgcagtgctccatgcccctccacgtcgccccgctcctggccgccgccggcctgcatgcttcgcccatgtccgccgaccgggtggtcgcctttatggaccacatacggatcttccaagagcaagtggagaagctcaaggcgctgcacgttgactcagccgagtacagctgcctcaaggccatagtcctgttcacctcagatgcctgtggtctctctgatgtagcccatgtggaaagcttgcaggaaaagtctcagtgtgctttggaagaatacgttaggagccagtaccccaaccagccgacgagattcggaaagcttttgcttcgcctcccttccctccgcaccgtctcctcctcagtcatagagcaattgtttttcgtccgtttggtaggtaaaacccccatcgaaaccctcatccgggatatgttactgtccggcagcagttttaactggccgtatatggcaattcaataaataaataaaataagaagggggagtgaaacagagaaagaaaaggcaaaagactggtttgtttgcttaatttccttctgttaagaaaggatataaaaggatgttacaagtttgctaaaagaagagaggggaagaatttaatggactgtgaatttcaaaaaaaaaaaaaaagactgtcaaatgaacttttacagaatgcattaaaaaaaaaaaaaaactcctgtgtcggtcagaacaacttgctacttatcatttttgtataaaaaggaaattagtctttttctttttttggtaaatttttgaaaaatattgctaaaagtgcatttaaggagattgggagacaattagcagaatggagaaagtaagtcttttttttttccaaattattaattgtcctgtgtctatgtacctctagctgttcttttttgtacttttctggttccaaaccagtttattctgtggttctataataagttttgatataatcttggcttcttaaaaactgtgtatcattaaaatatatgttctgcaagaattaaaactgagtccatgaaaataccataggaagacataaaactttaaaaggcaactcaaagatgatggaaacgcacttacaagtggtgaccaaaatttttaggtgaagtcgagcactctaattagagaactggaggaaccacatataacacttaacttcccctaccctgcccctccccaaaagaaaccatgacaaacctagcttttaaaaaatattttaagaaagagaatgaactgtggaatttattggcagccaaggaatgtgtccaagacacatgctgaggttttgaataaaaagtgaacttttgtaatttgaattgggtcccgcttagttcttgaattgttatgaaaatcctatatctgtttgtatatttgcaaaccctttgtattataattgttgatattttccctttttaaaaaataccattgaaatcagcatgacaaaaataacactgttggcacttataggtaacgtgattgattcagtatcttagagtttacagtttgtgttttaaaaaaactgaaggttttttttttaagtgcaacatttctgtatactgtaaaagttataataactgaactgtttggtcgagtctttgtgtgttatattccaaggaaaattgaaagtattcagaaattaaaatattatttgatatctgaaacctggctgtccccactcactgtctttacatctagaagagcccctgtgagctctcgcttagctggccgggcggggggtggtgggggggggcatttgtttactcccctcagtcagtttgttcaaaggtggactactgtatttgcctgtttaatttgggtgtgtgtgtgttggggggggagctgaagttaatggtttatctatggtttaggaagtgccatactgatatagtaaaccacccccattcacctaatcctccttttaattaaaaatggattttccaggaaaaaaaaaaaggcccttatatttgtcacacttaagtgcctgcttagggaaggtattgtgaaaaagtattagaaatcttgagatcagtatctattttatgatcagaaaaaaatactcttttgtacatttctgacagttactcagaagatcgttcaagcaagctaatcacagcattgtaactagaggacagttgtttgcagtgagtttttccttaagtaggtacgattttttaaaatattctgtgattctactctagcgtggttgttgagagagtttcaaattcagtgatacaggttctaagactgaaaggtctacttttaatgtatatatgataacttgcagttggtttccctctcccctccccccctttaccttcagtctgtgagagcatgaccacagggtcaagggaatcttttccattggagttatgtacataaaaacacatcgacattttgacatttcagattgtgtggctacaatctgtactgctcttgggatcctttgtccttagaagccaaattaaggaagagaaagcaggacagagaaaaagaaagaaggaaggagggaaactttacagggtgtgctgatttggaagtagtaactatttcttttggagtctttttttcatttttcctctttctcttttcctggtttggaggaagctcggtgctgggagcttgcaattttgttcttattcaaggtttccaacccacccccccaccgccagtacttcatcatgttgtggtttaattctaattggtgggggggggggaggactagtgagggaggtgaaagaacagggataattttgtaaagtgtattaaacgttaatattcagatccagtcaatacatgcagaccagtaaaatctgatttgtgcagagttctccatctgactctcacttatttctgtagatatatacatatataaatacaagtatgttcttacggcacagtattgctgacctttagttcgaggttttgtcggttgttgttgattttcttcctcttgcaagtgctatccatgtgagtgtgtgaagtttctctaataagtaaaacacaggcccttttccttgtttgttttgtgttagtttattgtaaacagccatttgttgtaaattattattggcattaaattataatttatgattttcaaagcaaaagacaa

SEQ ID NO: 710 - DNA, 1804 bp, Homo sapiens
gtgcagcccgtgccccccgcgcgccggggccgaatgcgcgccgcgtagggtcccccgggccgagaggggtgcccggagggaagagcgcggtgggggcgccccggccccgctgccctggggctatggccatggtgaccggcggctggggcggccccggcggcgacacgaacggcgtggacaaggcgggcggctacccgcgcgcggccgaggacgactcggcctcgccccccggtgccgccagcgacgccgagccgggcgacgaggagcggccggggctgcaggtggactgcgtggtgtgcggggacaagtcgagcggcaagcattacggtgtcttcacctgcgagggctgcaagagctttttcaagcgaagcatccgccgcaacctcagctacacctgccggtccaaccgtgactgccagatcgaccagcaccaccggaaccagtgccagtactgccgtctcaagaagtgcttccgggtgggcatgaggaaggaggcggtgcagcgcggccgcatcccgcactcgctgcctggtgccgtggccgcctcctcgggcagccccccgggctcggcgctggcggcagtggcgagcggcggagacctcttcccggggcagccggtgtccgaactgatcgcgcagctgctgcgcgctgagccctaccctgcggcggccggacgcttcggcgcagggggcggcgcggcgggcgcggtgctgggcatcgacaacgtgtgcgagctggcggcgcggctgctcttcagcaccgtggagtgggcgcgccacgcgcccttcttccccgagctgccggtggccgaccaggtggcgctgctgcgcctgagctggagcgagctcttcgtgctgaacgcggcgcaggcggcgctgcccctgcacacggcgccgctactggccgccgccggcctccacgccgcgcctatggccgccgagcgcgccgtggctttcatggaccaggtgcgcgccttccaggagcaggtggacaagctgggccgcctgcaggtcgactcggccgagtatggctgcctcaaggccatcgcgctcttcacgcccgacgcctgtggcctctcagacccggcccacgttgagagcctgcaggagaaggcgcaggtggccctcaccgagtatgtgcgggcgcagtacccgtcccagccccagcgcttcgggcgcctgctgctgcggctccccgccctgcgcgcggtccctgcctccctcatctcccagctgttcttcatgcgcctggtggggaagacgcccattgagacactgatcagagacatgctgctgtcggggagtaccttcaactggccctacggctcgggccagtgaccatgacggggccacgtgtgctgtggccaggcctgcagacagacctcaagggacagggaatgctgaggcctcgaggggcctcccggggcccaggactctggcttctctcctcagacttctattttttaaagactgtgaaatgtttgtcttttctgttttttaaatgatcatgaaaccaaaaagagactgatcatccaggcctcagcctcatcctccccaggacccctgtccaggatggagggtccaatcctaggacagccttgttcctcagcacccctagcatgaacttgtgggatggtggggttggcttccctggcatgatggacaaaggcctggcgtcggccagaggggctgctccagtgggcaggggtagctagcgtgtgccaggcagatcctctggacacgtaacctatgtcagacactacatgatgactcaaggccaataataaagacatttcctacctgca

SEQ ID NO: 711 - DNA, 6784 bp, Homo sapiens
ggcgccgcctccacccgctccccgctcggtcccgctcgctcgcccaggccgggctgccctttcgcgtgtccgcgctctcttccctccgccgccgcctcctccattttgcgagctcgtgtctgtgacgggagcccgagtcaccgcctgcccgtcggggacggattctgtgggtggaaggagacgccgcagccggagcggccgaagcagctgggaccgggacggggcacgcgcgcccggaacctcgacccgcggagcccggcgcggggcggagggctggcttgtcagctgggcaatgggagactttcttaaataggggctctccccccacccatggagaaaggggcggctgtttacttcctttttttagaaaaaaaaaatatatttccctcctgctccttctgcgttcacaagctaagttgtttatctcggctgcggcgggaactgcggacggtggcgggcgagcggctcctctgccagagttgatattcactgatggactccaaagaatcattaactcctggtagagaagaaaaccccagcagtgtgcttgctcaggagaggggagatgtgatggacttctataaaaccctaagaggaggagctactgtgaaggtttctgcgtcttcaccctcactggctgtcgcttctcaatcagactccaagcagcgaagacttttggttgattttccaaaaggctcagtaagcaatgcgcagcagccagatctgtccaaagcagtttcactctcaatgggactgtatatgggagagacagaaacaaaagtgatgggaaatgacctgggattcccacagcagggccaaatcagcctttcctcgggggaaacagacttaaagcttttggaagaaagcattgcaaacctcaataggtcgaccagtgttccagagaaccccaagagttcagcatccactgctgtgtctgctgcccccacagagaaggagtttccaaaaactcactctgatgtatcttcagaacagcaacatttgaagggccagactggcaccaacggtggcaatgtgaaattgtataccacagaccaaagcacctttgacattttgcaggatttggagttttcttctgggtccccaggtaaagagacgaatgagagtccttggagatcagacctgttgatagatgaaaactgtttgctttctcctctggcgggagaagacgattcattccttttggaaggaaactcgaatgaggactgcaagcctctcattttaccggacactaaacccaaaattaaggataatggagatctggttttgtcaagccccagtaatgtaacactgccccaagtgaaaacagaaaaagaagatttcatcgaactctgcacccctggggtaattaagcaagagaaactgggcacagtttactgtcaggcaagctttcctggagcaaatataattggtaataaaatgtctgccatttctgttcatggtgtgagtacctctggaggacagatgtaccactatgacatgaatacagcatccctttctcaacagcaggatcagaagcctatttttaatgtcattccaccaattcccgttggttccgaaaattggaataggtgccaaggatctggagatgacaacttgacttctctggggactctgaacttccctggtcgaacagttttttctaatggctattcaagccccagcatgagaccagatgtaagctctcctccatccagctcctcaacagcaacaacaggaccacctcccaaactctgcctggtgtgctctgatgaagcttcaggatgtcattatggagtcttaacttgtggaagctgtaaagttttcttcaaaagagcagtggaaggacagcacaattacctatgtgctggaaggaatgattgcatcatcgataaaattcgaagaaaaaactgcccagcatgccgctatcgaaaatgtcttcaggctggaatgaacctggaagctcgaaaaacaaagaaaaaaataaaaggaattcagcaggccactacaggagtctcacaagaaacctctgaaaatcctggtaacaaaacaatagttcctgcaacgttaccacaactcacccctaccctggtgtcactgttggaggttattgaacctgaagtgttatatgcaggatatgatagctctgttccagactcaacttggaggatcatgactacgctcaacatgttaggagggcggcaagtgattgcagcagtgaaatgggcaaaggcaataccaggtttcaggaacttacacctggatgaccaaatgaccctactgcagtactcctggatgtttcttatggcatttgctctggggtggagatcatatagacaatcaagtgcaaacctgctgtgttttgctcctgatctgattattaatgagcagagaatgactctaccctgcatgtacgaccaatgtaaacacatgctgtatgtttcctctgagttacacaggcttcaggtatcttatgaagagtatctctgtatgaaaaccttactgcttctctcttcagttcctaaggacggtctgaagagccaagagctatttgatgaaattagaatgacctacatcaaagagctaggaaaagccattgtcaagagggaaggaaactccagccagaactggcagcggttttatcaactgacaaaactcttggattctatgcatgaagtggttgaaaatctccttaactattgcttccaaacatttttggataagaccatgagtattgaattccccgagatgttagctgaaatcatcaccaatcagataccaaaatattcaaatggaaatatcaaaaaacttctgtttcatcaaaagtgactgccttaataagaatggttgccttaaagaaagtcgaattaatagcttttattgtataaactatcagtttgtcctgtagaggttttgttgttttattttttattgttttcatctgttgttttgttttaaatacgcactacatgtggtttatagagggccaagacttggcaacagaagcagttgagtcgtcatcacttttcagtgatgggagagtagatggtgaaatttattagttaatatatcccagaaattagaaaccttaatatgtggacgtaatctccacagtcaaagaaggatggcacctaaaccaccagtgcccaaagtctgtgtgatgaactttctcttcatactttttttcacagttggctggatgaaattttctagactttctgttggtgtatcccccccctgtatagttaggatagcatttttgatttatgcatggaaacctgaaaaaaagtttacaagtgtatatcagaaaagggaagttgtgccttttatagctattactgtctggttttaacaatttcctttatatttagtgaactacgcttgctcattttttcttacataattttttattcaagttattgtacagctgtttaagatgggcagctagttcgtagctttcccaaataaactctaaacattaatcaatcatctgtgtgaaaatgggttggtgcttctaacctgatggcacttagctatcagaagaccacaaaaattgactcaaatctccagtattcttgtcaaaaaaaaaaaaaaaaaagctcatattttgtatatatctgcttcagtggagaattatataggttgtgcaaattaacagtcctaactggtatagagcacctagtccagtgacctgctgggtaaactgtggatgatggttgcaaaagactaatttaaaaaataactaccaagaggccctgtctgtacctaacgccctatttttgcaatggctatatggcaagaaagctggtaaactatttgtctttcaggaccttttgaagtagtttgtataacttcttaaaagttgtgattccagataaccagctgtaacacagctgagagacttttaatcagacaaagtaattcctctcactaaactttacccaaaaactaaatctctaatatggcaaaaatggctagacacccattttcacattcccatctgtcaccaattggttaatctttcctgatggtacaggaaagctcagctactgatttttgtgatttagaactgtatgtcagacatccatgtttgtaaaactacacatccctaatgtgtgccatagagtttaacacaagtcctgtgaatttcttcactgttgaaaattattttaaacaaaatagaagctgtagtagccctttctgtgtgcaccttaccaactttctgtaaactcaaaacttaacatatttactaagccacaagaaatttgatttctattcaaggtggccaaattatttgtgtaatagaaaactgaaaatctaatattaaaaatatggaacttctaatatatttttatatttagttatagtttcagatatatatcatattggtattcactaatctgggaagggaagggctactgcagctttacatgcaatttattaaaatgattgtaaaatagcttgtatagtgtaaaataagaatgatttttagatgagattgttttatcatgacatgttatatattttttgtaggggtcaaagaaatgctgatggataacctatatgatttatagtttgtacatgcattcatacaggcagcgatggtctcagaaaccaaacagtttgctctaggggaagagggagatggagactggtcctgtgtgcagtgaaggttgctgaggctctgacccagtgagattacagaggaagttatcctctgcctcccattctgaccacccttctcattccaacagtgagtctgtcagcgcaggtttagtttactcaatctccccttgcactaaagtatgtaaagtatgtaaacaggagacaggaaggtggtgcttacatccttaaaggcaccatctaatagcgggttactttcacatacagccctcccccagcagttgaatgacaacagaagcttcagaagtttggcaatagtttgcatagaggtaccagcaatatgtaaatagtgcagaatctcataggttgccaataatacactaattcctttctatcctacaacaagagtttatttccaaataaaatgaggacatgtttttgttttctttgaatgctttttgaatgttatttgttattttcagtattttggagaaattatttaataaaaaaacaatcatttgctttttgaatgctctctaaaagggaatgtaatattttaagatggtgtgtaacccggctggataaatttttggtgcctaagaaaactgcttgaatattcttatcaatgacagtgttaagtttcaaaaagagcttctaaaacgtagattatcattcctttatagaatgttatgtggttaaaaccagaaagcacatctcacacattaatctgattttcatcccaacaatcttggcgctcaaaaaatagaactcaatgagaaaaagaagattatgtgcacttcgttgtcaataataagtcaactgatgctcatcgacaactataggaggcttttcattaaatgggaaaagaagctgtgcccttttaggatacgtgggggaaaagaaagtcatcttaattatgtttaattgtggatttaagtgctatatggtggtgctgtttgaaagcagatttatttcctatgtatgtgttatctggccatcccaacccaaactgttgaagtttgtagtaacttcagtgagagttggttactcacaacaaatcctgaaaagtatttttagtgtttgtaggtattctgtgggatactatacaagcagaactgaggcacttaggacataacacttttggggtatatatatccaaatgcctaaaactatgggaggaaaccttggccaccccaaaaggaaaactaacatgatttgtgtctatgaagtgctggataattagcatgggatgagctctgggcatgccatgaaggaaagccacgctcccttcagaattcagaggcagggagcaattccagtttcacctaagtctcataattttagttcccttttaaaaaccctgaaaactacatcaccatggaatgaaaaatattgttatacaatacattgatctgtcaaacttccagaaccatggtagccttcagtgagatttccatcttggctggtcactccctgactgtagctgtaggtgaatgtgtttttgtgtgtgtgtgtctggttttagtgtcagaagggaaataaaagtgtaaggaggacactttaaaccctttgggtggagtttcgtaatttcccagactattttcaagcaacctggtccacccaggattagtgaccaggttttcaggaaaggatttgcttctctctagaaaatgtctgaaaggattttattttctgatgaaaggctgtatgaaaataccctcctcaaataacttgcttaactacatatagattcaagtgtgtcaatattctattttgtatattaaatgctatataatggggacaaatctatattatactgtgtatggcattattaagaagctttttcattattttttatcacagtaattttaaaatgtgtaaaaattaaaaccagtgactcctgtttaaaaataaaagttgtagttttttattcatgctgaataataatctgtagttaaaaaaaaagtgtctttttacctacgcagtgaaatgtcagactgtaaaaccttgtgtggaaatgtttaacttttattttttcatttaaatttgctgttctggtattaccaaaccacacatttgtaccgaattggcagtaaatgttagccatttacagcaatgccaaatatggagaaacatcataataaaaaaatctgctttttcatta

SEQ ID NO: 712 - DNA, 5915 bp, Homo sapiens
aaaagggccagccctccagctggcccactccccctccgggctttcgcccgccctctctccctcccttttttgcccgccctggccctgcccctgcccctgccccctcctctcagcccctccgcgcccggggtgtcattgggcccgggagacgggagccaacttcaggctgctcagaggaagcccgtgcagtcagtcacctgggtgcaagagcgttgctgcctcgggctctcccgctgcagggagagcggcactcgctggcctggatgtggttggatttaggggggctccgcagcaggggtttcgtggcggtggcaagcgctgcaacaggtagacggcgagagacggaccccggccgaggcagcgatggagaccaaaggctaccacagtctccctgaaggtctagatatggaaagacggtggggtcaagtttctcaggctgtggagcgttcttccctgggacctacagagaggaccgatgagaataactacatggagattgtcaacgtaagctgtgtttccggtgctattccaaacaacagtactcaaggaagcagcaaagaaaaacaagaactactcccttgccttcagcaagacaataatcggcctgggattttaacatctgatattaaaactgagctggaatctaaggaactttcagcaactgtagctgagtccatgggtttatatatggattctgtaagagatgctgactattcctatgagcagcagaaccaacaaggaagcatgagtccagctaagatttatcagaatgttgaacagctggtgaaattttacaaaggaaatggccatcgtccttccactctaagttgtgtgaacacgcccttgagatcatttatgtctgactctgggagctccgtgaatggtggcgtcatgcgcgccgttgttaaaagccctatcatgtgtcatgagaaaagcccgtctgtttgcagccctctgaacatgacatcttcggtttgcagccctgctggaatcaactctgtgtcctccaccacagccagctttggcagttttccagtgcacagcccaatcacccagggaactcctctgacatgctcccctaatgttgaaaatcgaggctccaggtcgcacagccctgcacatgctagcaatgtgggctctcctctctcaagtccgttaagtagcatgaaatcctcaatttccagccctccaagtcactgcagtgtaaaatctccagtctccagtcccaataatgtcactctgagatcctctgtgtctagccctgcaaatattaacaactcaaggtgctctgtttccagcccttcgaacactaataacagatccacgctttccagtccggcagccagtactgtgggatctatctgtagccctgtaaacaatgccttcagctacactgcttctggcacctctgctggatccagtacattgcgggatgtggttcccagtccagacacgcaggagaaaggtgctcaagaggtcccttttcctaagactgaggaagtagagagtgccatctcaaatggtgtgactggccagcttaatattgtccagtacataaaaccagaaccagatggagcttttagcagctcatgtctaggaggaaatagcaaaataaattcggattcttcattctcagtaccaataaagcaagaatcaaccaagcattcatgttcaggcacctcttttaaagggaatccaacagtaaacccgtttccatttatggatggctcgtatttttcctttatggatgataaagactattattccctatcaggaattttaggaccacctgtgcccggctttgatggtaactgtgaaggcagcggattcccagtgggtattaaacaagaaccagatgatgggagctattacccagaggccagcatcccttcctctgctattgttggggtgaattcaggtggacagtccttccactacaggattggtgctcaaggtacaatatctttatcacgatcggctagagaccaatctttccaacacctgagttcctttcctcctgtcaatactttagtggagtcatggaaatcacacggcgacctgtcgtctagaagaagtgatgggtatccggtcttagaatacattccagaaaatgtatcaagctctactttacgaagtgtttctactggatcttcaagaccttcaaaaatatgtttggtgtgtggggatgaggcttcaggatgccattatggggtagtcacctgtggcagctgcaaagttttcttcaaaagagcagtggaagggcaacacaactatttatgtgctggaagaaatgattgcatcattgataagattcgacgaaagaattgtcctgcttgcagacttcagaaatgtcttcaagctggaatgaatttaggagcacgaaagtcaaagaagttgggaaagttaaaagggattcacgaggagcagccacagcagcagcagcccccacccccacccccacccccgcaaagcccagaggaagggacaacgtacatcgctcctgcaaaagaaccctcggtcaacacagcactggttcctcagctctccacaatctcacgagcgctcacaccttcccccgttatggtccttgaaaacattgaacctgaaattgtatatgcaggctatgacagctcaaaaccagatacagccgaaaatctgctctccacgctcaaccgcttagcaggcaaacagatgatccaagtcgtgaagtgggcaaaggtacttccaggatttaaaaacttgcctcttgaggaccaaattaccctaatccagtattcttggatgtgtctatcatcatttgccttgagctggagatcgtacaaacatacgaacagccaatttctctattttgcaccagacctagtctttaatgaagagaagatgcatcagtctgccatgtatgaactatgccaggggatgcaccaaatcagccttcagttcgttcgactgcagctcacctttgaagaatacaccatcatgaaagttttgctgctactaagcacaattccaaaggatggcctcaaaagccaggctgcatttgaagaaatgaggacaaattacatcaaagaactgaggaagatggtaactaagtgtcccaacaattctgggcagagctggcagaggttctaccaactgaccaagctgctggactccatgcatgacctggtgagcgacctgctggaattctgcttctacaccttccgagagtcccatgcgctgaaggtagagttccccgcaatgctggtggagatcatcagcgaccagctgcccaaggtggagtcggggaacgccaagccgctctacttccaccggaagtgactgcccgctgcccagaagaactttgccttaagtttccctgtgttgttccacacccagaaggacccaagaaaacctgtttttaacatgtgatggttgattcacacttgttcaacagtttctcaagtttaaagtcatgtcagaggtttggagccgggaaagctgtttttccgtggatttggcgagaccagagcagtctgaaggattccccacctccaatcccccagcgcttagaaacatgttcctgttcctcgggatgaaaagccatatctagtcaataactctgattttgatattttcacagatggaagaagttttaactatgccgtgtagtttctggtatcgttcgcttgttttaaaagggttcaaggactaacgaacgttttaaagcttacccttggtttgcacataaaacgtatagtcaatatggggcattaatattcttttgttattaaaaaaacacaaaaaaataataaaaaaatatatacagattcctgttgtgtaataacagaactcgtggcgtggggcagcagctgcctctgagccctcgctcgtccacggtcttctgcatcactggtatacacactcgttagcgtccatttcttatttaattagaatggataagatgatgttaaatgccttggtttgatttctagtatctattgtgttggctttacaaataattttttgcagtcttttgctgtgctgtacattactgtatgtataaattatgaaggacctgaaataaggtataaggatcttttgtaaatgagacacatacaaaaaaaatctttaatggttaataggatgaatgggaaagtatttttgaaagaattctattttgctggagactatttaagtactatctttgtctaaacaaggtaatttttttttgtaaagtgcaatgtcctgcatgcataatgaaccgtttacagtgtatttaagaaagggaaagctgtgccttttttagcttcatatctaatttaccattattttacagtctctgttgtaaataaccacactgaaacctcttcggttgtcttgaaacctttctactttttctgtactttttgttttgttcttggtctcccgcttggggcatttgtgggactccagcacgttttctggcttctgcttcatcctgctccatcggggaatgacacactgcggtgtctgcagctcctggaaggtgtcatttgacaacacatgtgggagaggaggtccttggagtgctgcagctttgggaaagctgcctcgtttcccttttcctctagaagcagaaccagctctacgagagtgagactgggaacttgatggctcagagagcatcttttcctcccattttagaaaatcagattttctcctgtgggaaaaaaaaattccatgcactctctctctgttaaagatcagctattcccttctgatcttggaaagaggttctgcactcctggaaccggtcacaggaacgcacagatcatggcaggatgcgctgggacggcccatcttggcaaggttcagtctgaatggcatggagaccgggagatagaggggttttagatttttaaaaggtaggttttaaaaataagttttatacataaacagttttggagaaaaattacagatcatataagcaagacagtggcactaaaatgtttaattcattaatctgtttgtttggcactgatgcaatgtatggcttttctcttgccccaaatcacaaacatatgtatctttggggaaactaacaatatgattgcactaaataaactactttgaatagaggccaaattaatcttttaaaaatgatgataatcatcaggtttactcagtgaaatcatattaattattttccaaaatctaaaagctgtagctggagaagcccatggccacgaggaagcagcaattaattagatcaacacttttctccagggttcaccatgcaggcaacattaccttgtctttcaaaagacacctgccttatgcaaggggaaacctgtgaaagctgcactcagagggaggagtttttcttacataatttgcaatttcaggaatttaatttataggcagatctttaaatacagtcaacttacggtgcacagtaatatgaaagccacactttgaaggtaataaatacacagcatgcagactgggagttgctagcaaacaaatggcttacttacaaaagcagcttttagttcagacttagtttttataaaatgggaattctgacttacttaaccaggtttgggatggagatggtctgcatcagctttttgtattaacaaagttactggctctttgtgtgtctccaggtaactttgcttgattaaacagcaaagccatattctaaattcactgttgaatgcctgtcccagtccaaattgtctgtctgctcttatttttgtaccatattgctcttaaaaatcttggtttggtacagttcataattcaccaaaagttcatataatttaaagaaacactaaattagtttaaaatgaagcaatttatatctttatgcaaaaacatatgtctgtctttgcaaaggactgtaagcagattacaataaatcctttactttaatcaaaaaaaaaaaaaaaaaa

SEQ ID NO: 713 - DNA, 2699 bp, Homo sapiens
ggagcgcttaagaggagggtcgggctcggccggggagtcccagtggcggaggctacgaaacttgggggagtgcacagaagaacttcgggagcgcacgcgggaccagggaccaggctgagactcggggcgccagtccgggcaggggcagcgggagccggccgggtagggtgcagcctgaggcttgttcagcagaacaggtgcaagccacattgttgccaagacctgcctgaagccggattctccccactgcctccttcaaccccgcctcttcctcctcctgtgggactgctcccccctcctgtgaggctagatagatgccctgtatccaagcccaatatgggacaccagcaccgagtccgggaccccgtgaccacctggcaagcgaccccctgacccctgagttcatcaagcccaccatggacctggccagccccgaggcagcccccgctgcccccactgccctgcccagcttcagcaccttcatggacggctacacaggagagtttgacaccttcctctaccagctgccaggaacagtccagccatgctcctcagcctcctcctcggcctcctccacatcctcgtcctcagccacctcccctgcctctgcctccttcaagttcgaggacttccaggtgtacggctgctaccccggccccctgagcggcccagtggatgaggccctgtcctccagtggctctgactactatggcagcccctgctcggccccgtcgccctccacgcccagcttccagccgccccagctctctccctgggatggctccttcggccacttctcgcccagccagacttacgaaggcctgcgggcatggacagagcagctgcccaaagcctctgggcccccacagcctccagccttcttttccttcagtcctcccaccggccccagccccagcctggcccagagccccctgaagttgttcccctcacaggccacccaccagctgggggagggagagagctattccatgcctacggccttcccaggtttggcacccacttctccacaccttgagggctcggggatactggatacacccgtgacctcaaccaaggcccggagcggggccccaggtggaagtgaaggccgctgtgctgtgtgtggggacaacgcttcatgccagcattatggtgtccgcacatgtgagggctgcaagggcttcttcaagcgcacagtgcagaaaaacgccaagtacatctgcctggctaacaaggactgccctgtggacaagaggcggcgaaaccgctgccagttctgccgcttccagaagtgcctggcggtgggcatggtgaaggaagttgtccgaacagacagcctgaaggggcggcggggccggctaccttcaaaacccaagcagcccccagatgcctcccctgccaatctcctcacttccctggtccgtgcacacctggactcagggcccagcactgccaaactggactactccaagttccaggagctggtgctgccccactttgggaaggaagatgctggggatgtacagcagttctacgacctgctctccggttctctggaggtcatccgcaagtgggcggagaagatccctggctttgctgagctgtcaccggctgaccaggacctgttgctggagtcggccttcctggagctcttcatcctccgcctggcgtacaggtctaagccaggcgagggcaagctcatcttctgctcaggcctggtgctacaccggctgcagtgtgcccgtggcttcggggactggattgacagtatcctggccttctcaaggtccctgcacagcttgcttgtcgatgtccctgccttcgcctgcctctctgcccttgtcctcatcaccgaccggcatgggctgcaggagccgcggcgggtggaggagctgcagaaccgcatcgccagctgcctgaaggagcacgtggcagctgtggcgggcgagccccagccagccagctgcctgtcacgtctgttgggcaaactgcccgagctgcggaccctgtgcacccagggcctgcagcgcatcttctacctcaagctggaggacttggtgccccctccacccatcattgacaagatcttcatggacacgctgcccttctgacccctgcctgggaacacgtgtgcacatgcgcactctcatatgccaccccatgtgcctttagtccacggacccccagagcacccccaagcctgggcttgagctgcagaatgactccaccttctcacctgctccaggaggtttgcagggagctcaagcccttggggagggggatgccttcatgggggtgaccccacgatttgtcttatcccccccagcctggccccggcctttatgttttttgtaagataaaccgtttttaacacatagcgccgtgctgtaaataagcccagtgctgctgtaaatacaggaagaaagagcttgaggtgggagcggggctgggaggaagggatgggccccgccttcctgggcagcctttccagcctcctgctggctctctcttcctaccctccttccacatgtacataaactgtcactctaggaagaagacaaatgacagattctgacatttatatttgtgtattttcctggatttatagtatgtgacttttctgattaatatatttaatatattgaataaaaaatagacatgtagttggaaaaaaaaaaaaaaaaaaaaaaaaaaaaaaa

SEQ ID NO: 714 - DNA, 3546 bp, Homo sapiens
gctgacgcgcgctgacgcgcggagactttaggtgcatgttggcagcggcagcgcaagccacataaacaaaggcacattggcggccagggccagtccgcccggcggctcgcgcacggctccgcggtcccttttgcctgtccagccggccgcctgtccctgctccctccctccgtgaggtgtccgggttcccttcgcccagctctcccacccctacccgaccccggcgcccgggctcccagagggaactgcacttcggcagagttgaatgaatgaagagagacgcggagaactcctaaggaggagattggacaggctggactccccattgcttttctaaaaatcttggaaactttgtccttcattgaattacgacactgtccacctttaatttcctcgaaaacgcctgtaactcggctgaagccatgccttgtgttcaggcgcagtatgggtcctcgcctcaaggagccagccccgcttctcagagctacagttaccactcttcgggagaatacagctccgatttcttaactccagagtttgtcaagtttagcatggacctcaccaacactgaaatcactgccaccacttctctccccagcttcagtacctttatggacaactacagcacaggctacgacgtcaagccaccttgcttgtaccaaatgcccctgtccggacagcagtcctccattaaggtagaagacattcagatgcacaactaccagcaacacagccacctgcccccccagtctgaggagatgatgccgcactccgggtcggtttactacaagccctcctcgcccccgacgcccaccaccccgggcttccaggtgcagcacagccccatgtgggacgacccgggatctctccacaacttccaccagaactacgtggccactacgcacatgatcgagcagaggaaaacgccagtctcccgcctctccctcttctcctttaagcaatcgccccctggcaccccggtgtctagttgccagatgcgcttcgacgggcccctgcacgtccccatgaacccggagcccgccggcagccaccacgtggtggacgggcagaccttcgctgtgcccaaccccattcgcaagcccgcgtccatgggcttcccgggcctgcagatcggccacgcgtctcagctgctcgacacgcaggtgccctcaccgccgtcgcggggctccccctccaacgaggggctgtgcgctgtgtgtggggacaacgcggcctgccaacactacggcgtgcgcacctgtgagggctgcaaaggcttctttaagcgcacagtgcaaaaaaatgcaaaatacgtgtgtttagcaaataaaaactgcccagtggacaagcgtcgccggaatcgctgtcagtactgccgatttcagaagtgcctggctgttgggatggtcaaagaagtggttcgcacagacagtttaaaaggccggagaggtcgtttgccctcgaaaccgaagagcccacaggagccctctcccccttcgcccccggtgagtctgatcagtgccctcgtcagggcccatgtcgactccaacccggctatgaccagcctggactattccaggttccaggcgaaccctgactatcaaatgagtggagatgacacccagcatatccagcaattctatgatctcctgactggctccatggagatcatccggggctgggcagagaagatccctggcttcgcagacctgcccaaagccgaccaagacctgctttttgaatcagctttcttagaactgtttgtccttcgattagcatacaggtccaacccagtggagggtaaactcatcttttgcaatggggtggtcttgcacaggttgcaatgcgttcgtggctttggggaatggattgattccattgttgaattctcctccaacttgcagaatatgaacatcgacatttctgccttctcctgcattgctgccctggctatggtcacagagagacacgggctcaaggaacccaagagagtggaagaactgcaaaacaagattgtaaattgtctcaaagaccacgtgactttcaacaatggggggttgaaccgccccaattatttgtccaaactgttggggaagctcccagaacttcgtaccctttgcacacaggggctacagcgcattttctacctgaaattggaagacttggtgccaccgccagcaataattgacaaacttttcctggacactttacctttctaagacctcctcccaagcacttcaaaggaactggaatgataatggaaactgtcaagagggggcaagtcacatgggcagagatagccgtgtgagcagtctcagctcaagctgccccccatttctgtaaccctcctagcccccttgatccctaaagaaaacaaacaaacaaacaaaaactgttgctatttcctaacctgcaggcagaacctgaaagggcattttggctccggggcatcctggatttagaacatggactacacacaatacagtggtataaactttttattctcagtttaaaaatcagtttgttgttcagaagaaagattgctataatgtataatgggaaatgtttggccatgcttggttgttgcagttcagacaaatgtaacacacacacacatacacacacacacacacacacagagacacatcttaaggggacccacaagtattgccctttaacaagacttcaaagttttctgctgtaaagaaagctgtaatatatagtaaaactaaatgttgcgtgggtggcatgagttgaagaaggcaaaggcttgtaaatttacccaatgcagtttggctttttaaattattttgtgcctatttatgaataaatattacaaattctaaaagataagtgtgtttgcaaaaaaaaagaaaataaatacataaaaaagggacaagcatgttgattctaggttgaaaatgttataggcacttgctacttcagtaatgtctatattatataaatagtatttcagacactatgtagtctgttagattttataaagattggtagttatctgagcttaaacattttctcaattgtaaaataggtgggcacaagtattacacatcagaaaatcctgacaaaagggacacatagtgtttgtaacaccgtccaacattccttgtttgtaagtgttgtatgtaccgttgatgttgataaaaagaaagtttatatcttgattattttgttgtctaaagctaaacaaaacttgcatgcagcagcttttgactgtttccagagtgcttataatatacataactccctggaaataactgagcactttgaattttttttatgtctaaaattgtcagttaatttattattttgtttgagtaagaattttaatattgccatattctgtagtatttttctttgtatatttctagtatggcacatgatatgagtcactgcctttttttctatggtgtatgacagttagagatgctgattttttttctgataaattctttctttgagaaagacaattttaatgtttacaacaataaaccatgtaaatgaacagaaaaaaaaaaaaaaaaa

SEQ ID NO: 715 - DNA, 5635 bp, Homo sapiens
ataaatgacgtgccgagagagcgagcgaacgcgcagccgggagagcggagtctcctgcctcccgccccccacccctccagctcctgctcctcctccgctccccatacacagacgcgctcacacccgctccctcactcgcacacacagacacaagcgcgcacacaggctccgcacacacacttcgctctcccgcgcgctcacacccctcttgccctgagcccttgccggtgcagcgcggcgccgcagctggacgcccctcccgggctcactttgcaacgctgacggtgccggcagtggccgtggaggtgggaacagcggcggcatcctcccccctggtcacagcccaagccaggacgcccgcggaacctctcggctgtgctctcccatgagtcgggatcgcagcatcccccaccagccgctcaccgcctccgggagccgctgggcttgtacaccgcagcccttccgggacagcagctgtgactcccccccagtgcagatttcgggacagctctctagaaactcgctctaaagacggaaccgccacagcactcaaagcccactgcggaagagggcagcccggcaagcccgggccctgagcctggacccttagcggtgccgggcagcactgccggcgcttcgcctcgccggacgtccgctcctcctacactctcagcctccgctggagagacccccagccccaccattcagcgcgcaagataccctgcagatatgccctgcgtccaagcccaatatagcccttcccctccaggttccagttatgcggcgcagacatacagctcggaatacaccacggagatcatgaaccccgactacaccaagctgaccatggaccttggcagcactgagatcacggctacagccaccacgtccctgcccagcatcagtaccttcgtggagggctactcgagcaactacgaactcaagccttcctgcgtgtaccaaatgcagcggcccttgatcaaagtggaggaggggcgggcgcccagctaccatcaccatcaccaccaccaccaccaccaccaccaccatcaccagcagcagcatcagcagccatccattcctccagcctccagcccggaggacgaggtgctgcccagcacctccatgtacttcaagcagtccccaccgtccacccccaccacgccggccttccccccgcaggcgggggcgttatgggacgaggcactgccctcggcgcccggctgcatcgcacccggcccgctgctggacccgccgatgaaggcggtccccacggtggccggcgcgcgcttcccgctcttccacttcaagccctcgccgccgcatccccccgcgcccagcccggccggcggccaccacctcggctacgacccgacggccgctgccgcgctcagcctgccgctgggagccgcagccgccgcgggcagccaggccgccgcgcttgagagccacccgtacgggctgccgctggccaagagggcggccccgctggccttcccgcctctcggcctcacgccctcccctaccgcgtccagcctgctgggcgagagtcccagcctgccgtcgccgcccagcaggagctcgtcgtctggcgagggcacgtgtgccgtgtgcggggacaacgccgcctgccagcactacggcgtgcgaacctgcgagggctgcaagggctttttcaagagaacagtgcagaaaaatgcaaaatatgtttgcctggcaaataaaaactgcccagtagacaagagacgtcgaaaccgatgtcagtactgtcgatttcagaagtgtctcagtgttggaatggtaaaagaagttgtccgtacagatagtctgaaagggaggagaggtcgtctgccttccaaaccaaagagcccattacaacaggaaccttctcagccctctccaccttctcctccaatctgcatgatgaatgcccttgtccgagctttaacagactcaacacccagagatcttgattattccagatactgtcccactgaccaggctgctgcaggcacagatgctgagcatgtgcaacaattctacaacctcctgacagcctccattgatgtatccagaagctgggcagaaaagattccgggatttactgatctccccaaagaagatcagacattacttattgaatcagcctttttggagctgtttgtcctcagactttccatcaggtcaaacactgctgaagataagtttgtgttctgcaatggacttgtcctgcatcgacttcagtgccttcgtggatttggggagtggctcgactctattaaagacttttccttaaatttgcagagcctgaaccttgatatccaagccttagcctgcctgtcagcactgagcatgatcacagaaagacatgggttaaaagaaccaaagagagtcgaagagctatgcaacaagatcacaagcagtttaaaagaccaccagagtaagggacaggctctggagcccaccgagtccaaggtcctgggtgccctggtagaactgaggaagatctgcaccctgggcctccagcgcatcttctacctgaagctggaagacttggtgtctccaccttccatcattgacaagctcttcctggacaccctacctttctaatcaggagcagtggagcagtgagctgcctcctctcctagcacctgcttgctacgcagcaaagggataggtttggaaacctatcatttcctgtccttccttaagaggaaaagcagctcctgtagaaagcaaagactttcttttttttctggctcttttccttacaacctaaagccagaaaacttgcagagtattgtgttggggttgtgttttatatttaggcattgggggatggggtgggagggggttatagttcatgagggttttctaagaaattgctaacaaagcacttttggacaatgctatcccagcaggaaaaaaaaggataatataactgttttaaaactctttctggggaatccaattatagttgctttgtatttaaaaacaagaacagccaagggttgttcgccagggtaggatgtgtcttaaagattggtcccttgaaaatatgcttcctgtatcaaaggtacgtatgtggtgcaaacaaggcagaaacttccttttaatttccttcttcctttattttaacaaatggtgaaagatggaggattacctacaaatcagacatggcaaaacaataatggctgtttgcttccataaacaagtgcaattttttaaagtgctgtcttactaagtcttgtttattaactctcctttattctatatggaaataaaaaggaggcagtcatgttagcaaatgacacgttaatatccctagcagaggctgtgttcaccttccctgtcgatcccttctgaggtatggcccatccaagacttttaggccattcttgatggaaccagatccctgccctgactgtccagctatcctgaaagtggatcagattataaactggattacatgtaactgttttggttgtgttctatcaaccccaccagagttccctaaacttgcttcagttatagtaactgactggtatattcattcagaagcgccataagtcagttgagtatttgatccctagataagaacatgcaaatcagcaggaactggtcatacagggtaagcaccagggacaataaggatttttatagatataatttaatttttgttattggttaaggagacaattttggagagcaagcaaatctttttaaaaaatagtatgaatgtgaatactagaaaagatttaaaaaatagtatgagtgtgagtactaggaaggattagtgggctgcgtttcaacattccgtgttcgtactcccttttgtatgtttctactgttaatgccatattactatgagataatttgttgcatagtgtccttatttgtataaacatttgtatgcacgttatattgtaatagctttgcctgtatttattgcaagaccaccagctcctggaagctgagttacagagtaattaaatggggtgttcacagtgacttggatacaccaattagaaattaaataagcaaatatatatatatatataaatatagcaggttacatatatatatttataatgtgtctttttattaaccatttgtacaataaatgtcacttcccatgccgttattttatggttcatttgcagtgacttttaaggcagtactgtttagcactttgatattaaaattttgcttatgttttgctaaattcgaataatgtttgaagatttttaggtctaaaagtctttatattatatactctgtatcaagtcaaaatatctttggccattttgctaagaaacaaactttgaatgtcaaactgatgtcacagtagtttttgttagctttaaatcatttttgctttagtctttttaaaggaaaataacaaaactatgctgtttatattgtcattaaattatacaatcaaacaaatgccaaatgaattgcctaattgctgcaaagtataacccagataggaaatcatatgtttttttccaagagtcattctaatatttgattatgttatgtgtgcttttatgaaagattgttatttttatatatcaagatgatagaacctggaatgttaggattttgaaatgttagacttggaaggggcctggtctgtcaactagtccaaccccttaaaattcatagaggagcaaactggggcccattgaagggtgaagagttactcaaggtcaaacagctggtaacagaatcaagactaagacctaatttacctttccatactctttttttttctcaacttcatctatataaaatcaggcttttaaacataaccactaatatttacctgaagataaccatgagtaaagtatacttttgcattaattttttgagcttatatgcaaacataataaatattattaaatatcaggaaagctaacatttcatacaagatagcttcagaccaaattcaaattgaatttgaataaattagaaatactgtgcatacataaccttcttgtgcaccatgagtatttggaaagttaatccttgtttttgtcgtgtctataaaggaagaacaaaacaaaataaaaacagagccctagagaaatgctgttactttttatttttacacccatcagatttaaggaaaagactttttagccattataatctagtggttggaaggaatgaagaagcttttttagtaataggtccagatatgagtgctaaaaataaagatgatagcatgttcttctgtcttccatagttattacaactatgagagcctcccaagtcatcttatcaactcaactcccttttttttgtcttaatgttgcacataagtttatacagagtggatgaccacactagcacagaagagaacaacatgtattaaagcaggtgattcctccccttggcgggagagctctctcagtgtgaacatgccttctgtgggcggaaatcaggaagccaccagctgttaatggagagtgccttgcttttatttcagacagcagagttttccaaagtttctctgctcctctaacagcattgctctttagtgtgtgttaacctgtggtttgaaagaaatgctcttgtacattaacaatgtaaatttaaatgattaaattacattttatcaatggca

SEQ ID NO: 716 - DNA, 3095 bp, Homo sapiens
ggaggacggacggacagggccagcctgctgtccggctgccgcccgccgtggtgtgagggggtttctgcgcacccacagtcgccaccgtcccacctgggctgccggagcctccccctggacccctggtgcccactgccaccctcatccggtgtgagagcgctgcttccgcttcgcggacgccgcgggcatggactattcgtacgacgaggacctggacgagctgtgccccgtgtgcggggacaaggtgtccggctaccactacggactgctcacgtgtgagagctgcaagggcttcttcaagcgcacggtgcagaacaacaagcactacacgtgcaccgagagccagagctgcaagatcgacaagacgcagcgcaagcgctgtcccttctgccgcttccagaaatgcctgacggtggggatgcgcctggaagccgtgcgcgctgaccgtatgaggggtggccggaacaagtttgggccgatgtacaagcgggaccgggccctgaaacagcagaagaaggcacagattcgggccaatggcttcaagctggagacagggcccccgatgggggtgcccccgccgccccctcccgcaccggactacgtgctgcctcccagcctgcatgggcctgagcccaagggcctggccgccggtccacctgctgggccactgggcgactttggggccccagcactgcccatggccgtgcccggtgcccacgggccactggctggctacctctaccctgcctttcctggccgtgccatcaagtctgagtacccggagccttatgccagccccccacagcctgggctgccgtacggctacccagagcccttctctggagggcccaacgtgcctgagctcatcctgcagctgctgcagctggagccggatgaggaccaggtgcgggcccgcatcttgggctgcctgcaggagcccaccaaaagccgccccgaccagccggcggccttcggcctcctgtgcagaatggccgaccagaccttcatctccatcgtggactgggcacgcaggtgcatggtcttcaaggagctggaggtggccgaccagatgacgctgctgcagaactgctggagcgagctgctggtgttcgaccacatctaccgccaggtccagcacggcaaggagggcagcatcctgctggtcaccgggcaggaggtggagctgaccacagtggccacccaggcgggctcgctgctgcacagcctggtgttgcgggcgcaggagctggtgctgcagctgcttgcgctgcagctggaccggcaggagtttgtctgcctcaagttcatcatcctcttcagcctggatttgaagttcctgaataaccacatcctggtgaaagacgctcaggagaaggccaacgccgccctgcttgactacaccctgtgccactacccgcactgcggggacaaattccagcagctgctgctgtgcctggtggaggtgcgggccctgagcatgcaggccaaggagtacctgtaccacaagcacctgggcaacgagatgccccgcaacaacctgctcatcgaaatgctgcaagccaagcagacttgagcctgggccgggggcggggccgggactgggggcgggactgggggcggggcctgggcggggccgcagccacaccgctggctccgcatggttcattttctgatgcccaccgaggagccccagccccgtcccagaggccgctgcccctgagttctgacactgtgtgtttgggaaggtgggtgaggctgggcagggcctggcggaggtggagtggccactggcacttgcctgctgcttggagtgccccaaggaggtggctgttaaccacccgccccgccccctccctgctcccagctctctctcctggagtctgaagcctgcaggtccggggaggaggttcgggattccctggtgggcctcgacgtcccttggatcagaggtcatcccttcctcctctcctggaaacagacagggagaagttgagcaggtatcaactaggggaggagagagggtctccagtgttccccccatagagaccaggagggagagcctctgttttgtaaactaaggataaccgagtttgctaaattgagaggggctattgggccctagaggacactaggagactggttaggacaaaaagaccttctccctagcccttctaccccacctgacctctgcaagagggggcattgatacatcatcgggaaaaaactttgctccaggcatcactgattccctctcccacccaaggagaacgtttggtacaatcgacatcctagccccacccagaggtggccctcccaggctggtatttatctgcaaggttgtagtcaagaggtttttctccccgctttttgtttttaagcttctagacactccttgaaatgtgtgtgtgatggagggaaggggacagatttgaggactgaagctggggcttggggattgccactaagtacagctgacggtttctccccggacactcgcctactaagtacccttggggtggtgctgggtcattacttctgagccccagccccaatccagagaagcgctgttgcccgccctccacccactaggtgaacagcaggatgccctgttgggggcttcaggtctctgtgggtgggaatgcaagtgaacttgggagggggcacgggcctgtagatcagggatagcgctgttgatcccctctctgtggctccaacccgttgggtcccttgctgcaaacccatgaagctggccctcagctccctgaccccctgtcctaggtcatgaaggacactctgcagggtgaagcaccagggagaggcctcggctgtctcctgtccccggcggggtgcctgctgtccgtcccgctttcatgttactgttgcagcttgtgctgagcctgcccagttggaggagactgggcacccctgcctcctgcctcccgcctcccgccaccctgtctcagtacctcccctccccgccccctgaaacatgtgcccctgccaaggccggagacccacagccctgaaacgagaagtgcccttaaggatcaccccagcccccacagccctggaataaatttcgcaattagtttcca

SEQ ID NO: 717 - DNA, 4916 bp, Homo sapiens
aaaaagtacagagtccagggaaagacttgcttgtaactttatgaattctggatttttttttttcctttgctttttcttaactttcactaagggttactgtagtctgatgtgtccttcccaaggccacgaaatttgacaagctgcacttttcttttgctcaatgatttctgctttaagccaaagaactgcctataatttcactaagaatgtcttctaattcagatactggggatttacaagagtctttaaagcacggacttacacctattgtgtctcaatttaaaatggtgaattactcctatgatgaagatctggaagagctttgtcccgtgtgtggagataaagtgtctgggtaccattatgggctcctcacctgtgaaagctgcaagggattttttaagcgaacagtccaaaataataaaaggtacacatgtatagaaaaccagaactgccaaattgacaaaacacagagaaagcgttgtccttactgtcgttttcaaaaatgtctaagtgttggaatgaagctagaagctgtaagggccgaccgaatgcgtggaggaaggaataagtttgggccaatgtacaagagagacagggccctgaagcaacagaaaaaagccctcatccgagccaatggacttaagctagaagccatgtctcaggtgatccaagctatgccctctgacctgaccatttcctctgcaattcaaaacatccactctgcctccaaaggcctacctctgaaccatgctgccttgcctcctacagactatgacagaagtccctttgtaacatcccccattagcatgacaatgccccctcacggcagcctgcaaggttaccaaacatatggccactttcctagccgggccatcaagtctgagtacccagacccctataccagctcacccgagtccataatgggctattcatatatggatagttaccagacgagctctccagcaagcatcccacatctgatactggaacttttgaagtgtgagccagatgagcctcaagtccaggctaaaatcatggcctatttgcagcaagagcaggctaaccgaagcaagcacgaaaagctgagcacctttgggcttatgtgcaaaatggcagatcaaactctcttctccattgtcgagtgggccaggagtagtatcttcttcagagaacttaaggttgatgaccaaatgaagctgcttcagaactgctggagtgagctcttaatcctcgaccacatttaccgacaagtggtacatggaaaggaaggatccatcttcctggttactgggcaacaagtggactattccataatagcatcacaagccggagccaccctcaacaacctcatgagtcatgcacaggagttagtggcaaaacttcgttctctccagtttgatcaacgagagttcgtatgtctgaaattcttggtgctctttagtttagatgtcaaaaaccttgaaaacttccagctggtagaaggtgtccaggaacaagtcaatgccgccctgctggactacacaatgtgtaactacccgcagcagacagagaaatttggacagctacttcttcgactacccgaaatccgggccatcagtatgcaggctgaagaatacctctactacaagcacctgaacggggatgtgccctataataaccttctcattgaaatgttgcatgccaaaagagcataagttacaacccctaggagctctgctttcaaaacaaaaagagattgggggagtggggagggggaagaagaacaggaagaaaaaaagtactctgaactgctccaagtaacgctaattaaaaacttgctttaaagatattgaatttaaaaaggcataataatcaaatacttaatagcaaataaatgatgtatcagggtatttgtattgcaaactgtgaatcaaaggcttcacagccccagaggattccatataaaagacattgtaatggagtggattgaactcacagatggataccaacacggtcagaagaaaaacggacagaacggttcttgtatatttaaactgatctccactatgaagaaatttaggaactaatcttattaattaggcttatacagcgggggatttgagcttacaggattcctccatggtaaagctgaactgaaacaattctcaagaatgcatcagctgtacctacaatagcccctccctcttcctttgaaggccccagcacctctgccctgtggtcaccgaatctgtactaaggacctgtgttcagccacacccagtggtagctccaccaaatcatgaacagcctaattttgagtgtctgtgtcttagacctgcaaacagctaataggaaattctattaatatgttagcttgccattttaaatatgttctgagggttgttttgtctcgtgttcatgatgttaagaaaatgcaggcagtatccctcatcttatgtaagtgtgaattaatattaagggaaatgactacaaactttcaaagcaaatgctccatagctaaagcaacttagaccttatttctgctactgttgctgaaatgtggctttggcattgttggatttcataaaaaatttctggcaggaagtcttgttagtatacatcagtctttttcatcatccaagtttgtagttcatttaaaaatacaacattaaacacattttgctaggatgtcaaatagtcacagttctaagtagttggaaacaaaattgacgcatgttaatctatgcaaagagaaaggaaaggatgaggtgatgtattgactcaaggttcattcttgctgcaattgaacatcctcaagagttgggatggaaatggtgatttttacatgtgtcctggaaagatattaaagtaattcaaatcttccccaaaggggaaaggaagagagtgatactgacctttttaagtcatagaccaaagtctgctgtagaacaaatatgggaggacaaagaatcgcaaattcttcaaatgactattatcagtattattaacatgcgatgccacaggtatgaaagtcttgccttatttcacaattttaaaaggtagctgtgcagatgtggatcaacatttgtttaaaataaagtattaatactttaaagtcaaataagatatagtgtttacattctttaggtcctgaggggcagggggatctgtgatataacaaaatagcaaaagcggtaatttccttaatgttatttttctgattggtaattatttttaacagtacttaattattctatgtcgtgagacactaaaatcaaaaacgggaatctcatttagactttaatttttttgagattatcggcggcacaatcactttgtagaaactgtaaaaaataaaagtatctcctagtcccttaattttttcataaatatttctggcttttgagtagtgtatttatattgtatatcatactttcaactgtagacaattatgatgctaatttattgtttcttggtttcacctttgtataagatatagccaagactgaagaaaccaaatatatgtgtttactgtagcatgtcttcaaattagtggaacttagttcagggacatagaagagtcttaatgaattaaaatcattcacttgattaaatgtctgtaaatcttcatcattcctactgtagtttatttaatatctattgtaaattatgtgacttgtagcttcctctggttttcaagtaaactcaacaaggtggagtcttacctggttttcctttccaagcattgtaaattgtataccaaagatattagttattacttctgtgtgtacaaagaggattattttattatgtttattaatcacctctaatactcatccacatgaagggtacacattaggtaagctgggcgttgactcatgcgcagtctcagtcacccgtgttatcttcgtggctcaaaggacaatgcaaaatcgccgatcagagctcatacccaaagcattacagagaacagcagcatcattgccctccccagctgaaaaacaagttggctagaagatacatggagaggaatggtgtggtcaacagttaatgaaacggttctatcatgcatgtgtaatgtggatggagacaattataagatttgactataactatttggagggtctttaacattgccaaaaaaacaaatatgttgatttttattttattttattttttattttaagaggcgggatcttgatctcacatgttgcccaggctggccttgaactcctgggctcaagcattcctcctgcctcagcctcccccatagctgggactaggggtgcatgccagcatacctggctacgttgactcttaaaatctatgttctcttattttaaagatacagtgctccccactgaaaattaaacctaaaaaatgtcacatattggtatgttgttaacctggtagattaaatcatgagaatgattagaaagacgggcaacacagcgggttacatccacactgctgatcacaccaacgacaggagctgataagcaagaaagcgtcacagccagcgtctgttcacccaaggttgacaagtgaagtttctctaatgttgattgttagccgatttgtaacctggcatttacttagcaactgccttatcaattacaggatttgccggtaaaagcagactcaaatataaaggtttttggcttaacttggtttattatagttgctctatgtttgtaaacagacaatctctaatgtctgattatttgtatcacagatctgcagctgccttggacttgaatccatgcaatgtttagagtgtgaagtcagttacttgttgatgttttcttactgtatcaatgaaatacatattgtcatgtcagttcttgccaggaacttctcaacaaaatggaattttttttttcagtatttcaataaatattgatatgcccagcctgataatttttaaaaaaaaaaaa

SEQ ID NO: 718 - DNA, 1903 bp, Homo sapiens
gcggcgcggaggggcgcggagcggcgcggagccgggcggctcggggcccagagagagccgcggccgggagctcgcgggctcctgacaacctcctcccctcggcggacgacgaccacggcgactagggcgccggtcatggcggagcaacaaacccggcgcggaccctaggcaccaccgcatggagcgggacgaaccgccgcctagcggagggggaggcggcgggggctcggcggggttcctggagcctcccgccgcgctccctccgccgccgcgcaacggtttctgtcaggatgaattggcagagcttgacccaggcactaatgatcgggctgaacaacgaacctgtctcatttgtggggaccgcgctacaggcttgcactatgggatcatctcctgtgagggctgcaaagggtttttcaagcggagcatttgcaacaaacgggtatatcgatgcagtcgtgacaagaactgtgtcatgtctcggaagcagaggaacaggtgccagtactgccgcctgctcaaatgcctccagatggggatgaaccggaaggctatcagagaagatggcatgcctggaggccggaataagagcattgggccagtccagatatcggaagaagaaatcgaaaggatcatgtctgggcaggagtttgaggaagaggccaatcactggagcaaccatggtgatagtgaccacagttcccctgggaacagggcttcggagagcaaccagccctcaccaggctccacactgtcttccaggtctgtggaactgaatggattcatggccttcagggaacagtacatgggaatgtctgtgcctccacattaccaatatataccgcacctttttagctattctggccactcaccacttctgccccaacaagctcgcagcctggatccccagtcatacagtctgattcaccagctgttatcagccgaggacctggaaccattgggcacgcccatgttgattgaagatggatacgctgtgacacaggcagaactatttgccctgctttgccgcctggccgacgagctgctctttaggcagattgcctggatcaagaaactgcctttcttctgcgagctctcaatcaaggattacacgtgcctcttgagctctacgtggcaggagctaatcctgctgtcttccctcaccgtttacagcaagcagatctttggggaactggctgatgtcactgccaagtactcgccctccgatgaagaactacacagatttagtgatgaagggatggaggtgatcgagcggctcatctacctctatcacaagttccatcagctaaaggtcagcaacgaggagtatgcttgcatgaaagcaattaacttcctaaatcaagatatcaggggtctgaccagtgcctcacagctggaacaattgaataaacgatactggtacatttgccaggattttactgaatataaatacacacatcagccgaaccgctttcctgatctcatgatgtgcttacctgagattcgatatattgcaggaaagatggtgaatgtgcccctggagcagctgcccctcctctttaaggtggtgctgcattcctgcaagaccagtgtgggcaaggaatgacctgttccaggcgccctcctcaggccaaccacagcgtcttgggtgggcaggacaggctctggagggaaaagccagagagaccaagatggaggctgtggagcagcatttcccgttgcctccatagcaagaagagtttttgtttgtttgtctgtttttttaacctcatttttctatatatttatttcacgacagagttgaatgtatggccttcaacatgatgcacatgcttttgtgtgaatgcagccaatgcattttcttacagtttacagaatgtgaagatgaaaaaaaaaaaaaaaa

SEQ ID NO: 719 - DNA, 3263 bp, Homo sapiens
ggagcagtggcgctatagccacgaaagtgactggcagtgggctctgcggcgcagcttcatctgtcggcacctgcacagctatcccggggctgccctcgaccagctcctcgcgctctccgccgcctggaccaaccacgtcttcctgggctgcaggtacagcccacgcttgatggaaaaaattctccaaatggctgaaggtattgatattggggagatgccttcatatgatctggtgctgtccaaaccttccaaaggtcaaaaacgccacctctcaacatgtgatggtcaaaatcctcctaaaaagcaagccggttccaaattccatgcgagacctcgttttgagcctgtacattttgtagctagtagttcaaaagatgaaagacaggaagatccttatggccctcaaacaaaagaggtaaatgaacaaacacattttgccagcatgccaagagacatctaccaagattatactcaagactctttcagtatacaagatgggaattctcagtattgtgattcatcaggattcattctcacaaaagaccagcctgtaacagccaacatgtattttgacagtgggaaccctgccccaagcaccacatcacagcaggcaaactctcagtcaactcctgagccttcaccatcacagacatttcccgagtctgtggtagccgagaagcagtattttattgaaaaattaacggcgacaatctggaagaacctttctaatccagaaatgacttctggatctgataaaattaattatacatatatgttaactcgttgtattcaggcgtgtaagacaaatcctgagtatatatatgctcctttaaaggaaattcctcctgccgacatccccaaaaataaaaaacttctaactgatggctatgcttgtgaagttagatgccaaaatatctacttaactacaggttatgctggcagcaagaatgggtccagggatcgagctacagagctagctgtaaaactcttgcagaaacgtattgaagttagagttgtccggcggaaattcaagcatacatttggagaggacctcgtggtgtgtcagattggcatgtcctcctatgaatttcctccagctctgaagccaccagaagacctggtggtgctgggtaaagatgcttccgggcagccaatttttaatgcttctgccaaacactggaccaattttgtcattacagaaaatgcaaatgatgcaattggtatccttaacaattctgcctcattcaacaagatgtcaattgaatacaaatatgagatgatgccaaatcgcacatggcgttgtcgagtgtttttacaagatcactgcttagctgaaggttatggaaccaagaaaacaagtaaacatgcagctgccgacgaggctttgaaaattcttcaaaaaacacagcccacttatccatctgtcaaaagttcacaatgccatacaggctcttcacccagaggatctggaaagaagaaagatataaaggatcttgtagtttatgagaattcttcaaatcccgtgtgcacgctgaacgacacagctcagtttaaccgaatgacagttgagtatgtctatgaaaggatgacaggcctccgctggaaatgcaaagtgattctagagagtgaagtaattgcagaagcagttggggtgaagaaaactgtcaaatatgaagctgctggggaagctgtgaaaaccctcaaaaagacccagccaactgtcattaacaacttgaagaaaggagctgttgaagatgtgatttcaagaaatgaaattcagggccgctcagcagaggaggcttacaaacagcaaatcaaagaagataatattggaaatcagctgctgagaaagatgggttggactggtggtggtttaggtaaatctggtgagggcatacgggagcctatctcagtgaaagagcagcataagcgggaagggcttggtctggatgtagagagggtgaataaaattgccaagagagatattgaacagatcatcagaaactacgcccgctccgagagccacacagatttgactttctctagagagctgactaatgatgaacggaagcaaatacatcagattgcccagaagtatggtcttaagagtaagtctcatggggtgggccatgataggtacctagtggtaggtagaaaaagacggaaggaagacctactagatcagctcaaacaggaaggccaagtgggccattacgagcttgttatgcctcaagcaaattgagatcttactaatttattttgtaaatgcctaatgaggcagatttttgaattaaagaaatgctacatgttccggttgcagagtatattcataagatgtctcaccttgttcatttcacatagtggtttattagatattggaacctaaagaattctgtccacttgtattagcttaatccagcagatgatattgtgcagttactgtttgtgtctttgatattgctgtgtccctcagattttagtagtttgacaagcaagaacacatatccaaatggaattttaccctgagaaattatcattttaaagggcatagcacagcaatctgcaacaatatgtaaagttgatattgactacaataaaaatccagtcttaattccagatttactgaaaatgtcagatcattttgtattaatctattttcatctttgtgtgaagccagttatagaatgtttgacaataaattgtgctgtacacgtaaatgtccttaccaactaaatgatgtaaaactttcttaaagtaattttagtgttcatttatttataacttctaccatgtgatttccagactattggaagtgatttactgtatcttgtgatatatgggttttaacaaattctagtcttcacgctgagagagcactacttgagagagcagttgaaagtttcaaaaactttggttcaatctgaagaaaggaagcttgaactgtttgttcttggtgccttgcagagagactcacagcaactctccattatagctttcacacggtttggatgtgcagcacatccaaggcaaccacagctgtggtagagcttggtaaaagactgaagatacattggtgctttgatgaaaaggtcagttggctggtccctctctcaaaaagcttattaagcctgaaaagccaactttgtaacatatttaaaactgctattttcgcttatttctggaatgtaaaaaaaaaaaatgtataaaaagaattagtgtatgcttcctgaataaaaaggagccaaagttgatcagaaaaaaaa

SEQ ID NO: 720 - DNA, 155952 bp, Homo sapiens
gatcagatgattatgatggaagcctctgctaaagaaccactgcttttctatcaggattcctaaacctggcttctcatcctaatcataatcatcttaaaaacaaacaacagtcaggcccagtggctcatgcctgtaacctctgcacccagggaagccaagggaggaggatcccttgaggccaggggttcaaaatcagtctgggaaaatagagagtactgagaccccatctctacaaacaaattaaaaattagctgtacatggtggtgtgtacctgtagtcccagctaccagggaggctgaggtgagaggatggcttgagcccaggagttcaaggctgcagtgagctatgatcacgccactgcactccagcctaagcgacatagcaagactctgtctcatagatagatagatagatagatagatagatagatagatagatagattgatagacagatggattttaaggaaattttgctgatttgccaggtttgggagccactgtgtcagaagtgttcaaaccacagtgactccatcataaatagggacttgataaaacaaagctgagacctatggggctacattcccaggaggttaggcgttcttagtcacaggatgagataggggtcggcacaagatacaagtcacaaggaccttgctgataaaacaggatacagtaaagacaccagccaaaacccaccaaatccaaaacagtgatgaaagtgacctctctggtcatccttactgctcattatatgctactcataattcattagcatgcgaaaagacactcccaccagtgccatgacaacttaaaaatgccaggcagtgtctgaactttagaccctatagggtctaaagtggagaggaaccctcagttctgggaactgcctgtacctttcttggaacactcatgagtaatccacccattgtttagcatataatgaagaaataactgtaagtatactcagtcgaacagcccattcttttattcctttgctttcttaataaacttgctttccctttacgggcttgccccaaattcgttcttgtgcaaggcccgtgaacactcccttggggttgggaccagaacctctttctggtaacaaatacagtagagccagaactccactaaatgaactttactggttatagtctctttaagaacaggaattgggctgggcgcggtggctcacgcctgtaatcccagcactttgggaggctgaggcgggaggatcatgaggtcaggagatcaagactatcctggccaacacggtgaaaccctgcctctactaaaaatacaaaaaattagccgggcgtggtggcgggcgcctgtagtcccagctactcaggaggctgaggcaggagaatggcatgaacccgggaggtggagcttgcagtgagcctagatcatgccactgcactccagcctgggccacagagcgagactccatttcaaaagaataggaattggctgagtgcagtggctcacgcctgtaatctcgccagcactttgggaggttgaggcaggtggatcatttgagcccaggagtttgagaccagcctgggcaacaaagtgggacccccatctctacaaaacaatacaaaaattagccaggcatggtggtgtgcacctgtagtcccagctactcgggaggctgaggtgggaggattgcttgagcctgggaggtggagactgcagtaagccatgatagcaccactgcactccagtctaggcaacaaagcgagaccctgtatcaaaaaaataaaaataaaaaataaggaacagggatcattcccatccccatccctatcttccaaaaattttggatggggaaatttccaaaacatcccaaatccaaacatttcaaaagacaaaaagcaagacaacctgaataacagcgcttctagggattgctcactgtagggcaggcaggcaaggacccactccctcttcatgactgcaacacctcaccatagctataaccagcctccaggaggacctgggcattctcagacattatgtaccagacgttttggaaatgttcaactgaatgagatttggaagtatacatatttttctatgatatatgcactcaagttaaaaatgtctttgtacaggagattcgaaaaatatgagcctctagtctagagacttaggaagagtgatggtgtaactgctgacctacaagcatcacacagaggcatcatcactttggcattggtttataaactcaccgacaagataatcttttcctcctccaaactcccatggcacctctagcataaagtgcactgcacttcaacactgttgttcatctgtcacatccattacactgtgagctccttgacatcagggtaggcaacctattcatcttttagaacccagcagagctggtaagaggctattctttttttttttttttttttttttgagatggagtcttgctttgttgcccaggctggagtgcagtggtgcaatctcggctcattgcaatctccacctcctgggttcaagcgattctcctgtctcagtctcccgagtagctgggattacaggtgcaagccactgagcctggctaatttttgtattttttttagtagagacagggtttcgccatgttggccaggctggtcttgaactcctgacctcaggtgatctgcccacctcgacctcccgaagtgctgggattacaggcgtgagccaccacacccggccagggctgttctttttttttaaggcaatggcactctttccatctcttcctcctgaccattccaccaaacatctcccacagatacaaaccatagagaatatcaggtattttcaactttgctaatcaactctttaaaatgatagtccattttagaacttgaacaaatatttactataccatttatcgaccccaagttgggctttcctcctcttaaagaagttcagtgaactacaagaatttgtggattaaaaaaaaaaaaatttaacccaaagactcctagtgacctttgctggagctaacacagcatctcttaatccagctctaaaggatgtgaagagctccaggcctgaggcaccatgctgtgcagcaatttacttcttcattgcaccaggctcatccctcattgcccacagcatccaggggtaaactcggaacaaaagattgcttacactttcataacttcaaaaattacatcacacatgcatgtccagtgttaaactacaactgattacatgtactgtctaacgaaattgttgaatacttgctctgcttttctccctgttggccttacaatccctgtttctaatttccttccatcctcgggtcataaaactttatacccagtggcctggcacaaaagtttcttttcttgtttccctaatatccttaaagcaggcattgcagtccactgtacttcttccttctatacaagctggaacaccctgagtcctaagctttactgtgcttaagaatgacccgtgggaggctgaggtgtgtggttcacgaggtcaggagttcaagaccagcctggccagtatggtgaaaccccatctctactaaaaatacaaaaacattagccaggcgtagtggcgggcgcctgcaaccccagctacttaggaggctgaggcagagaactgcctgaacctgggaggcggaggttgtagtgagccaagatcatgccactgcactccagcctgggcaacagagtaagactccatctcaaaaaaaaagaatgactcacaaagcgaattggagactccaatgcaggtgtaccacaaactacactttgatctatggtgtggcagatgtcacagccggatcacccgcacatccacaaactatacgttgagaccctccgcacacttagttgttatatacattattaataattcacaagtgaacacaactgtgaattattaaaaattcacaattcattcattcattcaggtcgaggtggtctctttcacttcttaaactcccatccttttcctacacccatgacttaatatctctgagaataagtgagtttctaaatgtctgagttaatagaaacattctttttacaagcaaaacagaccatttcctcagtaacccttcccagaaccacccatcttaccactcttaccactactgattaaaaaaaagaaaaacaggtagtgccgatcaaaccaggcaagctgaagcccatggctcctggacacaaatgatgacagctgtgactaaactcctaggcaaggctctttgatgtgtctatctggccaataggcctctacatcttgaaagcaaagtagcaacattgagaaaaaaaagggccaggctgtgaaatgcaagttcaaagcaagcagcaaagtattaatagttgagcttctttctgcaaataaaacacagagctctagaggcagcccctgcaaaatcaagagcagaactcctcaaggagtcctctcacaaacagagaagtactcagagaggacatcattttattcacctccaacagtcaattcttcaaatctgacttgatcattttatcttcaaaaaacagtcagcacggccgggcgcggtggctcacgcctgtaatcccagcactttgggaggccgaggcgggcggatcacgaggtcaggagatcgagaccatcccggctaaaacggtgaaaccccgtctctactaaaaatacaaaaaaattagccgggcgtagtggtgggcgcctgtagtcccagctacttgggaggctgaggcaggagaatggcgtgaacccgggaggcggagcttgcagtgagccgagatcccgccactgcactccagcctgggtgacagagtgagactccgtctaaaaaaaaaaaataaaaaaaataaataaataaataaataaaaaaacagtcagcacaatactaaaatccattccctgtcttattttcccattgcccctgcattcgttcaaggtgtcttcttttcttacctccatgactacaatatccatctaattgctacaacagctgattgccttccttgcccctccacttcactatccacaccagtccattctctcaactgcccccagagcttttttttctaaatctaaccttagaatctgatctcatcatgaccttgcttgaaacccttccaaggaggcctatccccagaaggatgaagtccaaactcagtagcaggaatggcctacaaggcctttcatgatttggctgcccgactacccttccaacttcattctctgccatttcttcaccacatctcatgttaaacccacactatttgcacatccctgaacagagggtgctcaggcttgtatttttgcatatttcacttctgctattggtatgcttttcctatatcctcctctataccaggttaacagaatttttttttttttttttttttgagacagattctcgctctgtcgcccaggctggagtgcagtggtgcgatctcggctcactgcaagctctgcctcccaggttcacgccattctcctgcctcagtctcccaagcccggctaattttttttgtatttttagtagagacggggtttcaccatgttagccaggatggtctcaatctcctggcctcgtgatcccccgcctcggcctcccaaaatgctgggattaaaggcatgagccaccatgccggccagtaacagaatatttttaaaagacaagtcaactcaaatctcaccttcgccgggcacgttggctcacacctgtaatcccagcactttgggaggccaaggtgagtgaattgcttgagtcaaggagttcgagaccagcctgggtaacatgacaaaactctgtctttacaaaaatataccaaaaattagccaggtgtgcatggtggtacacatctctagttccagccccaggaggctgaggtgggaggatcacctaaacccaggagtttgaggctacagtgagccatgattgcgccactacactccagcctaggtgacacagtgagaccctatctcaaaaagaaaaaaatatatataatccaccttatccattcaggcttctctgattccccaaggagtgccacctactctctcctttatgcttccattgtactttgtgtccatctcaacataacacttaccatgctctgctgccattatttgctacctgtttctctcctcaatcagattgagagcttcttgaaagcagagatcttgtctttgtatatctggtttctaagaatgcatactgagtaaatgaatagaagaaaaaatgaatgaggcaattagtatgtatgccttgaatggcattaaatttaggcctatgccaatcaatgtgtaaaggttgagaaaataaataaggggaagccaaggatagaaaataaaaccatgctcatcagaatagaagaggataggctgggcgcagtggctcacgcctgtaatcccaatcacttggggtcaatagtttgagatgagcctggccaacatagtgaaaccccatctctactaaaaacacaaaattagccaggcttggtggtgcgcacctgtaatcccagctactggggaggctgaggcaagagaatcacttgaacctaggaggcagaggttgcagtgagcctagatcgtgccactgcactccagcctgggctggacagagcaagactccatctctgaaaaataaaataaaataaaataaaacaaaaaaacagaatagaagaagatagctaagaaccacagtggtcaagccagcctggcttcaacagagatgaatggagagaccacggtcagccccattaacagaagaactggggccaggaacggtggctcatgcctataatcccagcactttgggaggccgaggcaggcagatcatgaggtcaggagttcgagaccagcctgaccaatatggtgaaaccccatctctactaaacatacaaaaattagccgggtgtggcagcacatgcctgtcatcccagctactcaggaggctgaggcaggagaaacgcttgaacccaggaggcagaggtagccatgagccgagatcacgccattgcactccagcctggcgacagagcgagactccatctcaaaaaaaagaagaactgagttcaaaatcagttcgaaaggttcaatgttgggtcacaggatcaggcaaaaagcagaggcagaaaggccttaggagtgttccaagaactagcactggaccagctgagagtcagagagagttcaccacgtgggaacaatgcagccagtcatgtgggatggtggcaccatgacagtatctagtcaggacaatgacagccctagggataatgctgatgagttcctgcttcaaaaaaggtcattgtcattcctttagtcctgatacctagaactatacaagattgttccctgcctctccccaagccccataacttgatcttaaaggcattattgtcaattaaagtagtcccaagttctagaagctatttttattcagcctcgtctaatagggctttcattttaaaatagctttattttgaatctatttactgttcccagcccctatcactttgttcttataaacatattcattccacatgcatcactgacaggcactgctaggaaaggaaactaacccatcttggccacctttacacatcaggtacttatactaaggtgatttctatatattacagtattgaatcaccacaacaatccagtgacgtaggtatcattacatattattatccccaattaagacattagggaaatgaaacgtaggaagattcagagaaagcacaggaaggtgaatatgcccaagatttcacattaagtaaatggaatgcaggattcaaatttacccctgtctgaatctaaatctcattctctttccatggcatcattctctctcctctctaggcctttatagaggaaatataggcccaaataaaatatcaaaatctcaggatgggatgacaggcttgattaagaaacccagtcaccaagaccacgcagtaagaaatgaaaaagaaaaaaaataataaaatgctgagaaccatagtctgcaaagtgaaaggaagaatacctgggagagctagagtgacctccacatgcaaatacaccctgcagacaggaacagtcttgatgggaagagcaaactccctaaatggtcggttgtaactttcctactagttgaaaagtcaggaaaagccttgtgtgctaactctctggacaagcgcacaagaatccagggttgtgacttcaaaaaaaaatatgctgacaagtcagagctggcagaacaagaggaggtcgagttgatgagaaaagagagagagagagagagagagagagagagagcgctgtaatcaaggagaaccaactgaagctggagggaagcagaaagaatagccaggctggttcaggaggcagttctggtacctctgaccccattgcccacccccagtaggcagcatgaaatatgccagaggtcaacaattttttttttttttgtattttttagacagagtctcactctgtcacccaggctggagtgcagtggtgcaatctcagctcactgcagcctctgcctcctgggttcaagcaattctcctgcctcagcctcccaagtagctgggaatacgtgcccaccaccaagcccagctaatttttgtattttcagtagagaaggggtttcgccatgtttggccaggctggcctcaaattcctgaactcaggtgatccaccggccaaggcctcccaatgtgctgggattacagttgtgagtcaccgcacccgacccagaggtcaacagcttctgccctagatcagaagtttactcactttgctcactcggtataaatcaaggaccctctcatacctgggaatgagttttgtattccagcctagaagtagagccagtcccagtttgaactttttgcctttctgtactcccagttcttacccttttgctgagcctaggacacatgcaaggcctgcccttcttaatccagatttttgagtcttaatcccaatttttcctatagtttcccatacactccatggcagcttagagtaggctgaaaactgctgaactgtttaagacttaatccttcagagtaacatggcagaagtagcacacttttttaacataaagctgttcaggactctattacagaagaggctatacttccttaattacattctattctacagccacctcaaaataactagtgaacacgttcaaccaggatcattggcaacagccaatgggcacagtgatctggaaatggtctagccaagctgtttgggctgtagaccatggcattcctaagagcaaaataggcaaggagtccattaatatttcacttgacttatgtcaccatggaaacccctggagtagtgaatggctttggggagtggtcagattcaaccaaaaataacagaaatctctgtcccccaggtaaaggattcctactttgtgtgtgtctgtgtgtgcacacaggcacactcgagagacttttggcattctttgaagtcactggaggggcacagagataaacccactcagccttggcctccaagactaacagaacacaacgtttccctgaaagaataaaaaaaaaaatacaggcataagaaaacacacaaacatgggcttagagatttaaatacacacacacacacacacacacacacacacacacaggccctagaaggaacatacaccctgagatacgcactcattctaaaataaactcgggaatacagaaggacacgggcatgtcctttcagagaggcacacttctaggccctaagtaggagaaggaagaggggagaggaagaggcagggagagggacagggaggggggaggagggagggagagagagagagaaacgaagaagggggcggaggaggagatggaggagacactctttattctataggaggagacatcacggaagagaaatcaacactgaggccttggccgggcgcggtggctcacgcctgtaatcccagcactttgggaggccgaggcgggtgcatcacctgaggtcaggagtttccagaccagcctggccaacatggcgaaacccggcctctactaaaaaatacaaaaattagccgggcatggtggcgcggacctgtaatcccagctactcgggaggctgaggcaggagaatctcttgaacccggagacggaggttgcagtgagccgagatcgcgccattgcactccagcctgggcaacagggcgagactccgtctcagaaacaacaacaacaacaacaacaacaacaacatcaacaacaacaacaacaacaacgaacaaaccaaaaaccaatgaggcctgaagataaagacacatgtacaaccacggatgtcagacttccagaggcacggccaaggcaaaagacaaacacatacagactgcagcaggcagacaggccggttccagagtcaggctccggtgaagctccgaagaaacaaacacgcagggagatttcggaggcgtccgaggacaccgtggggcccggctggctccctctgtctctgtgcgcgccccttccccgggtcaccccgcctgcgcccgacctgcgcccgcgcaccgcgccctcggggctccctgggacagcccgcggcctggcccgtgcgcccgggctcccctccccgccggcccggcacttcccagctctgacgcgggagcttctttcacaccaatggggctcgcgcgcggaggggccctgcccctcctccgggaaggtgtgtccctgtttcctcacctgaaacttcctaggagaacccgatccctccctcccgtcgggcggccaggggcgggccgcgggtggggcggccgggcctgcgctggggacggctctggggactgcggccggcgccgggacctggaggggacgctggggccgaagcagcatgtgacaccgaccaggtgggtgccctcctcccgtctcggccctgggctcccggcggctgtggagcccggcggaggtggggcagggacaggaaggaagaggaagccaggcctttcccagggatcagcccccgctgggtccggggcgcaggctccggaaatgggggggctgggcccgcaggcagggctcggggtgtgtggctgaggaccctggtggggaagaggagaggaactagaggaaatgttgttgcctacaagtttgcttccggtcgggtcccgcctaggaaatgggcaccctgcccccagacgttccccgggccaataatcagggctctttcttcaaagtaggcgccctggggaaagctaagccatatcagaaggaataactgagattccctttctaggctgttccttacctggagaggttttatcggctccttttccttaaccaggccggggcctttccttatgtatctccataggtatttgcatactgtgtgagtctatgtgtagcttctctccgtgttaaccaaagctccgtaacctggaacagtgaatcctgccctgcccctcaccccagttccctacatatggggagcctcctaaagcttgatgtgaatcacaacgttgcattcttagcaaggtggaaagaagttatttagagttgggggctgaggtaggcgttggggtgctagaatgcggacgcagagctctagaacccctgagcatcttttgcagttgccttccggcaagactaccggaggagagccagttgtgatactacgtcatttccagatctcagtccctttcttcccttcctggatcttgggttccaaagacagatttgccctcctgtctacctagaagtgaactctggccaggactcttgtctggttgagagagaagggtgtgtcaaacagatgagagagggtggttttcctttcgagcttcctccctagcttgctcccctactgcactccactgtctggccttgcatcttgggcctaatccagaggtcccagctccagctaaaaagctcttgatgtggcctctgtctcagacgtcttgttttatccacatttggagcatgaagaagttcctggcataggccttagcaaaatgggtgtcatttgttaaccaatctgtgggcctaaaagtgaagccatggctagtgaaggagtcctggggagctgggaagatgggatgagggcgtgtcagttctgggtgagactgatatgcaggaggaatgtatgtcatggtcctagtggggaggagagagaaatcaggaggagtgcaaaggaatccctctcatcaacagaatatagtgattctcaatagagagaagagtgttcatatattagaggtcctgagagtgtatcagtgcccttaacgcggtctgtctgaggttccgtggccacgttacacgtggtgtctgtgggatagacaggaatacgtcatttgtggtgtctggagaggtcagtcgctatgtggtatggacaggaatggagtcactcgtagggtcttgggttcaacgggagcagcattactcaagtgtcagtggtgtagacaaacaggtgaccaacagctctagtgtagacaggggctgggtcactcacagtgtctgtggagtaagcaggagccgatcacttatagtgcctgcaaggtagactggaacaaagtcaccctcaaggtctgtgttaatacacaaacacgtcactcacactaatgttatctgtgtgtatgccaccaggaccacagatgagattgtagagtgtaagtcagcattgacactaataatgttcttatataaactatctggtctataaggcagttggtgtgacattttcagacattagagaatagataaatgtgtattacagctttcactggcatggtgggactttcctgcaatggatagaacacacactgtagtagtcagtggtccagaaagctacccctgttttgatatctttgtagtattgagggcagtgatgtcaaacagtgaataaagttatatatctatgtggtgatcttattttaacctcaatattattttagtgatttgtaagtcagaatatttgaaatcaaccttgctagaaaatccaggaagcatggtcctcaaaaatatatatatggcactgagtctcagttcaaagatttggcagtttgattggggaggggttgtatccttgaaatacagtgttgtttctagtgactagaaatagacaagagctaaggtgttggggggggctctagggaagatagtgagctctgtcacacattatgttaaagggatgacttgaagctttgcctctcaagaagtcacacgtgggtgaggttatgtggatgcagaatgtctgtggtctgaagcaaggccgtatccccataatcccatgccctggctttgcctgtacacagataaacagtgattattcaccctcagtggagaaggagatgaggatgtttgcactctaacgtaatgagcattgcaaaaaactctctcctgatgcctttacgtgagtaagaccatgatttacagatttcctttcactttgtcacattttagctttgtcatgcctgattgcaacgggatcactgagataggatcaagtatagggaacgtggggtatgttctccctttgcggtaactggtggctgagcaggtgaccactgatatttccaaatgaaaaaagacagttagaaacggtgtcaatgggcttgcagaggcaggcatgcactgtgccactagattggaacagaaaatgtccaggtagcacatggtatttatagatataccctagatatggcagaaacacacttttatttagaggctacttgttttgaagacgtgatggtgtatatggaggagagggcctgaaccatgcagatgtaagtgaggagagactacaggtttagtcccatggtctccttaggccaagtttcagaaagtgtcttaaagtaagcaagtatattattcgatgtgtggttgagagaacagggccacatcacagaatcacccatagggattatagtattttgtacttaagggctagacatagggagccaatcgcatatggtgtcagttaactggaaaaggacataaaagtccttctgcctgtgtacaattatgtcagacatatctctttgccccatatagatggtatctctgtctctgggatggccagaatcttgtcacatactactctgcagtgtgctagggacctgcctgtttggttatgtcaggctctattgcaagagtttgtaaggatggctcagtgtgtgtgtgtgtgtgtgtgtgtgtgtgtgtgtgtgtgtgtgtacacacacagtggctaagcaggacagtattctgagcaggtgagttttcagtttaagcctggaccagacaagaaaggtgcacggtcaggtgcagcattgggtccatagaattctggggtcttctctggactgatggcctgccagctttctttcagtaggacctctaagtgcttacaggagacttaagtcaagcgactttgcttcaggtttgcccataccatttgcttaggagatttgagcaagggtctagggtctttgacctttagtttcttcatctgtaaattgagcagtttctgtgtgtctctgaaggtccttccggctttatgaatcctgtgtttctctcttacacttattctctgtctctcaggtcaacagtatttaccacagccaccatttctatgacccttaaagatagcagtgtacatttttatgttaccttatttaatctttactagaactgtgaaggaatccttttatctcctttttaaagataagaaaatggatgttcaaataaatttaatggtttctacaattgtcttaaaaccagcaaagataccagagaggcacaaccaaacactgatccacactcttctaactctatattcttccgtcattcattcatacgatacatctttgttgagggccaactaggcttcaggcagagggggttatatggcagtgtttgtcccttcatggtgctcataatctagcctggaaaatagacattaaatatgacatgacaagtgcaaggtgtgtttgaggagaagcaaaggattctctgttgcaaaagaggattccaggcagaggagcagtgtctacaaaggcctacaggtgagagacacagagagaagtgagctaaagacactgaaagccagtgggagaggggggggatgggggcagggacagatggtgacaggtgaataggctgctagagaagaaggcagagccaggttgtgcagggagtataacccatgctgaagatttagatttcatctcaagagcattcagaggctgctgaagaatctaagctagaactggtgcttttgaagctcacttaggtgctgtatggagaaaggactggaatagcgtgaaatgggtggaggccagtgcccaagctgtggccgggtgcagtggcccgggcgagacggtagcagcatgcaccagtggagagggatgggatagaagtggacagtcttaagggatatttagcagacgaggtcaatagcacatggtgattgattagatatggggaatctgggccaggagggaaacaagaattttattttattttaattaattaatttatttatttagagacagagtctcactctgtcacctaggctggagagcagtgatgtgatcttggctcactgcagcctctgcctcctgggctcaagggatcctcccaggatccctctcctgcctcagcctcccgagtagctggaactacaggcacgtgccaccatgctccactaatttttgtattttttgtggagacagggtttcaccaggttgtccaggctggtctcaaactcctagattcaagcaatcaacctgcctcagcctcccagagtgtcaggattatatacataaagtgcattgggaaactcagtttttcatctgtaaaatgggcagaataatggtacccatcttatacgatgactcttagatgtatggcacatacatatttaaagaagcatttcattatttttaatgacatgtatgcaggaaaaccttagtgtttcagaatgaaaaataagaaaaattaatttgttgtgtatagagctctaaatgtttaaagttctgtgtaaactgttaatcatgattttaggaaaaggtgggcatattccattgaagtaaaaggatcacattttattctgacctgaattttattctttatgtgaaaaatatttattaaacactgagtataggccactattaggctaagtatggataattcagcaagtcatagttcttaatctcataaattttactatctattggttgcaatagagggtaactcaaaatacacacatcattatataattataattgtataaatgctacaaaggaaaagtaaagagaattatagttggtaagtgctacaaagaggggtacaatttaacctagttaaaagatcaggggaggccaggtgtggtggcttacgcctataatcacaacacttcgggaggccgaggcgggtggataacgaggtcaggagattgagaccatcctggccagaatggtgaaaccccgtctctactaaaagtacaaaaattagctgggtgtggtggcacacacctatagtcccagctactcgggaggctgaggcaggagaatggcttgaacccggagatggaggttgcaatgacccaagattgcaccacggcactccagcctgggtgacagagcaagactccatctcaaaaaaaaaaaaaaagaaaagaaaaaaaaaaaaagactggaggaaactgaaggggtaaaaccaggaaaatgtaataccacaagtaacaagagagtatttctaacctcagtactgtcaaatactgacaagaaccacccaaaatgaagatccataaggtcttctttggaattaacaacatgtcgattgtagggaatattggcagaatgccgctatcaaagctcagttggaggcaggtgggatgtgagagtatgaagacagcagataagagcaactccttctagtcatttgaaagatgagaagaatgtgggaatgcttccataccccaggggttgttcagcagggatgttgaaggtatgagtgcacagtgttcctggggaagcaggcaagaaatgacagagcatggaaaggagggatacgtcttttcctgactgagggcggaagatagaaagagtggaaatacaggttgctttggatcgcaagaaattgaggtgagagaaacccagttccatcagtttctattttctttgcaaaataggagatgaggtgttctgctggaagtgagaagaaaggcaggaaggtcgaaatcaaaagacaggaaggtcaaaagaattaatgagaagagttcatatggatactgaggccaaggggagagtaaggtgatgcagaaagcacccttctgtggtcttccttcaaggtggtaatgtgtctagttcaacactaatccaataaggctgttatcatcccactttacaacagctgcctctagaattggaaacaaaactgttagttacaatgctgtagtagacactatggaaaacagaaagatgagtaaactccaaaccctctgtaaagaagatgaaaccatagcacctcacacattggctatcatagcctggcctattttaactgatgtccacagcttaagaggaagaccctctcctgacactgcttctctggcctaatagatctgaggtgtgtcccttgctgtgtctgggggttatatgaggatgagtcactcctagtgtccgaagagtagacagggagagacagaagatgacataatggagtctagagagaactgacaactgggagcttctgggcactctctgacaatggtcctctgctataatttaattgttcattatgacctgtttccctcacaagaccacagtctccatgacgacaagatctttatctcattcactactgaatgccccacacttaacagggtcgctaggaaaatatttatgaaataaatacatcaatgacaagttttttagaggctattgcttattttgttgagaacctgttgtctcaaagaatgaccctaaatggaaccaaataaatgcatcactcttcttttttatggtctcttcctctgataggtaaaagcagagttgttagaaacatttgtctttgattcctccttaggattcagccctgatggaggctgaggaggcccagcgtggagcctctcctcccatctctgccatagaggaattcagcattatccctgaggctcccatgaggagcagccaggtctctgccttggggcttgaagctcaagaagatgaggacccatcctataagtggagagaggaacacagactctcagcaactcagcagagtgagttaagggatgtgtgtgactatgcgattgagacgatgccctcttttcccaaggaaggttctgcagatgtggagcccaatcaggaaagccttgtggctgaggcctgtgacactccggaacactgggaggcagtaccccagagcctagcaggccgacaagcaaggactctagctcccccagagctctgggcctgccccattcagagtgagcatctagacatggccccattttccagtgacctgggaagcgaagaagaggaggtggaattttggccaggacttacttctttgacattgggatctggacaggcagaagaagaagaggaaacctcttcagataactctggtcagaccagatattattctccctgcgaagagcatcctgcagagaccaaccagaatgaaggctctgaaagtgggactatcaggcagggggaagagctgccacctgaggagctgcaggaaagtcaagggctcttgcatccccaggaggtccaagttctggaggagcagggacagcaggaagcaggatttcggggggaaggaactctgagggaggatgtttgtgccgatgggctattaggggaggaacagatgatagagcaggttaatgatgaaaagggagaacagaagcaaaaacaggaacaggtacaagatgtgatgcttgggagacaaggagaaagaatggggctcactggggagccagagggtctgaatgacggtgagtgggagcaggaggatatggagaggaaggctcagggtcagggaggtccagaacagggagaagagaggaagagggagctgcaggtgccagaagagaatagggcggactctcaggacgaaaagagtcaaacctttttgggaaaatcagaggaagtaactggaaagcaagaagatcatggtataaaggagaaaggggtgccagtcagcgggcaggaggcgaaagagccagagagttgggatgggggcaggctgggggcagtgggaagagcgaggagcagggaagaggagaatgagcatcatgggccttcaatgcccgctctgatagcccctgaggactctcctcactgtgacctgtttccaggtgcctcatatctcatgactcagattcccgggactcagacagagtccagggctgaggaactgtcccccgcagctctgtctccctcgctagagcccatcaggtgctctcaccagcccatttctctactgggctcctttttgactgaggagtcacctgacaaggaaatagatcaaaacagccagcaagaggaatccaggctgaggaagggaacagtgtccagccaagggactgaggtggtctttgccagtgcatctgtgactcctccaaggacaccagattcagctcctcccagtcctgctgaagcctaccccatcacacctgcctcggtatctgccaggcccccagttgcctttcccaggagggaaacctcttgtgctgcacgtgctccagaaactgccagtgcccctctctcaatggatgacccatctccctgtgggacttctgagatgtgcccggctgccctctatggcttcccctccaccgggaccagccctccgaggcccccagccaactccacaggcaccgtccagcacttacggagtgactccttccctggttctcacaggacagagcagactccagacctggtgggaatgttgctttcctactcccactcagagctgccccagaggccccccaaacctgccatctacagctctgtgaccccaagaagggacagaaggagtggtagggactacagcaccgtttcagcatcccctactgccttatccacgctgaagcaggactctcaagaatccatctcaaatctagagagacccagcagtcctcccagcatccagccctgggtctccccacataatccagcctttgccacagagtctcccgcctacggttcttccccatcctttgtctccatggaggatgtgaggatccacgaacctctgccccctcctcccccacagaggagggacacccatccctccgtggtggagacagatggccatgctcgtgtagtggttcccacgctgaagcagcatagccaccctcctccattggccctaggttcagggctgcatgccccccataaaggcccacttccccaagcctctgaccccgctgtggccaggcagcaccgacctctgccatctaccccagacagctcccaccatgctcaggccacccccaggtggagatacaacaagccgctaccccctacccctgatttgccgcagccccaccttcctcccatttctgctcctggtagctcaaggatctacaggcctctacccccactacccatcatagaccctcccaccgaaccacccccattgcccccaaagtccagggggaggagcaggagcactcggggaggacatatgaactcagggggtcatgccaaaacaagacctgcttgtcaagactggacagtccccctccctgcctctgctggacgcacctcctggcccccggccacagctagatcaacagagtctttcacttccaccagcaggagtaagagcgaagtgtcccctggcatggctttcagcaacatgacaaacttcctatgcccctcttcccctaccactccctggactccggagctccagggacccacctctaaggatgaagcaggggtctcagaacaccctgaggcccctgcgagagaacctttgagaaggacaacccctcagcaaggagccagtggcccagggaggtcacctgtgggccaagcaaggcagccagaaaaacccagccatctgcacctggagaaggcgtccagctggccccacaggcgggactcagggaggccaccaggggacagcagtggacaggctgtggctcctagtgagggggccaacaagcacaagggctggagccggcagggcctgcgcagaccttccatcttgcctgagggctcttcaggtgagcaagaaccgggaccacagtgacacatcagaccaagcttttcccagctcttcccacctcatcccatcttctgtccctagggttcctaacattctctctgctggcttcgctcacatgtgtgcctaacctcaacacagagagagccccgaagtgccctccaagctccttgggatgctcttccttcttcttcccctctatctccctgtctctccctcaaccagcaccttctttggatgtcccaaggttattttggactcccttctactcttcagttacagtccctgcttgctctcctcctggggagtagaaaaggccttctgtacttgtcccagtcccatcctgacccgtggctcgggacgtcactggtactgatctctttcacgctctctgctttgccactttcttccctcccagtttcccaataaagcccattttcccttctggacccctgcatctcctgctctagatcttctttggctctctctatccctctgaaatctcagttatcttccccatttccacttttagattcaagaggtccagccgtggagaaacatccgggaccctcagacactgttgtttttcggtaagtcaccctctcccctaacagccacactgtactctcttcacttgggatactgagagtcccctagtgaggatttcagttgataagggttctgagaccccgaatggctcattcctgtttcttcttggtgtaaggaggagaagagagagatgccgggatgccagcttagggagattgtctttatctacctcattcggtcagccgagcctacgagtcatccatcttcccaagccctatggctgtgaactaaaccccacaaaagctccatgttagcccaagtgggtcaagttgcaactctgtgcctctccgggggatttggtcttgacatcccagcacacatcccagaggctagagactttgtcccccacagtcacctggggtgctctgtgtctaatggccagtaggtaccccagagcccttctttactccacagggagaaaaaaccaaaggaggtgatgggaggcttttcaagacgctgctccaaactcatcaactcctgtgagtaccttgaagtggaactatagaaccaggtgggcattctgcccagcactggagaggggcttgtggatgtcagcagtggggtggggatgtccctagcgagaaggcattgcagaagatctgtttccctgcctccgctcaccgtcccttcttcctgcttctcttccttcccatgcttctttgccctgcagcccagctgctttaccaggagtatagtgatgttgtcctgaataaggagatccagagccagcagcggctggagagcctgtccgagacacccgggcctagctctccgcggcagcctcggaaggccctggtctcctccgagtcgtacctgcagcggctctccatggcctccagcggctccctctggcaggaaatccccgtggtgcgcaacagcaccgtgctgctctccatgacccatgaagaccaaaagctgcaagaggtactgggcaggccacggtggggagggggctacagaaaagatgacaaggtcttgtttgctagcatccttctctcctgctcaccactgccaccaagagtcggctgtccccaccacacaggcgcgtgtacatgccacagctgtgggtcatgtccattctgaagaagttgaattgttttctggatttcaccacctcccctttcatcctcacctcctcatgccataggccacttgctcctacctgatgttggtctgggctatacatggtggccattgcctctgaatttgtgtggaggaatgtggagttaatcccatcatcactgctgtttcagggtagaggaaagcttccctgttcaaccagggtttcaggctacactacagttttcctctttagccaaggcacattccggggctctttgttgggtcccttgaagagggccctttgcagctgtcctgtggtccatcaatctaacaggggccttagagtgatcatcagtccctgcttgattgttactcccaacagcaagactgaactagaggctgtttgtctgattctaagctattaccattagtaagttttacatggagagcgcctcttattaatttgtctgaaatatggggtaaaacctttcttcccagaaagacagtatggaacaatggaatagaataatgtttaagaaattaggttctggaagaaatgacctggatatgaaaaccacttttttttaaaattattaatttattagagacagggtcttgctctgtcactcaggctggagtacagtggtacaatcattgttcactgcagcctcaacctcctgggctcgagcaatcctcccgcctcagcctcccaagtagctaggactacaggtatgtgccactatgcctagctaattttttaattttttgaaaagatggtgtctcactatgttgcccagttgtctcgagctcctgggctgaagcaatactcccgcctcggcctcccaaagtgctggaattacaggcatgagccactgagcccagccccagagcccactttaatatttccaatttacctttggccaaatgacatttgtaaaactgagatacaaacagttactgcaaggatcaagaaacatgaatgcctggtacatagtaatttctcaaaaaatgttgacttttcattttaagtaagccagacctaggtttgaaacatgacttcaccatttgctagcttaggcagccttataacatcactaaatctcagtttcctcacttgcaaattgaggataataatgcctacctttcagggttgctgaatggtttaaatgaaataatgcatatctaatttagcagtaatatttgatgtatagtttgataaatattagtgccgtactctctgcctttcagaggcagggaggagtaaaatttgggccaggaggacttatggacagacaatgcttttaccaagtcagagagagaatacatttttagactttgcaaagttcagacttgagagccctgttgtggctgcaaatttttaagcacagagaagatatttagaaaataactcatcttccccatatttgttgaccaaacagtgggagatgacacgagttctagctctcttttaccaactccagcatgctgggaagtccagcaggactcctattccagccctggtctcatgtttgtgagaagaaagggctttacatttctatctcttaaacacacatattcattttataaagtagtacctctggggttcacaaagtgctttcacaggctccatttctttcaactgttgcatcttccacagtgagatgggggtcactatatccacataaaaggacacgaaaagtgagattcagagaggttaaatgagccacccaaagtcagtcgtgtagtgaatgttagagcaaggatgcaaatgagccttcagtgtccctgttcagggttgttgtatgggagggtcatctggctgtgtcattggtcatccaagtcatcaccagggtgtgtctcctttctcttttctatccaggcatctctcttgaggccacatgcttggatgaaaagcatgaggagcccagctagaggcacggtcatgagtcatagcgccccctgctggaacctccagacaagttctcacatgctgggcatgcattaaaccacagctgcgccatcttgttctcagatatcctgcttctgtctcctgcttctcgcgccatcttgttctcagatatccggcttctgtctcctgcttctcatctgtcctcaaacctcaaactgagctcatcaccttcatcccctaaatctatgccttttcaaagttctctggctcagtaaatgactccatcattcacccaggtgcccgactcaaaaagcttttgctgtgagtacaaaacattagctttgaaccttccttctctttgaggccccatttctagcaaataatccaacccttccaattctacctcataaataattataaaattaatctacttctcttcagctccatggctattcagaccttcatctctcatgtggaattattacaacagtttcttaacatggatggcttttgcttcttttcatcttttcttctcattctgcttagaaataactttatgaaaaacaggctgggcgcagcggctcacacctgtaatcccagcactttgggaagccgaggcgggtggatcaactgaggtcaggagcttgagaacagcctggccagtatggtgaaaccctgtctctactaaaaatacaaaaattagctgggcgtggtggtgcatgcctgtcatcccagctactcaggaggctgaggcaggaaaatggcttgaacctgggatgcggaggttgcagtgggctgagatcgtgccactgcactccagcctgggtgacagagcaagactccatctcaattccaaaaaataaaaaaaaataactttatataaaacaaatgtggtcaagttattctcctatgtaaagcctgttttcattgtcccattgtcttaagtccaaacaattttacattgtttacattacccttcaggcctcctcgactgctgcagcttcatctctggccactactgctgtacacttggttcaaaaaatgctcaatttatttagtttagttagtttgtttgtttgttttgagatggggtttcactctgtcaccaggctgaagtgcagtggtgcaatctgggatcactgcaacctcacctcccaggcacaagcaatccttccgcctcagcctctcaaatagctgggactacatgtgcacgccatcacatccggctaatttttgtattttttgtagagacagggtctctctacgtcgcccagcctggtcctgaactcccagactcaagtgatgcacccacctcagcctcccaaagtgttgggattacaggcgtgagccactgcacccagtctatttagcttttttaatataaatttcattgtgtatattaaagatatacaacatgatgttatgggctacatataaatagtaacagaattaccctagtgaagcaaattaacatatccatctcactttgttactcattttttgttcttgtttttgttatttagatttcttgaaagcatatttttcttttatacctttgaaggcctgtacctgtaccctagattaaatcctactcaaatgctcttcccctccccgcagatcaacttaggttctggtgtgactgtgaaccataaaaggatcttgctcactgctctatccccaaaacattacacagtggctggcatattccagggggtaaataaaatccttaattaatcttcctcatctccaacctcctaggtcaaatttgagctgattgtgtcagaggcctcctacctgcgcagtctaaacatagctgtggatcatttccaactttcaacttcactccgggccacactttccaaccaggagcaccaatggctcttctctcgtttacaggatgtgcgagacgtcagcgccacgtgagactccccttctcctaaataccactcactcagcctcactgttgttaggctttaaatgttccgttatttttttcccctcttagaaaccctttcattttcacagttatgggaagaaattgggcctcagtttcttccatgattcccgatggttataggaagaagaatggcaagaagaggagagggtctgtgggtggatagatccattaatggataagtaaatgagcaatgcttcctgggttgaggttttggattactgtggtcatgcactgcattggagatgaggtggaaaaaccatctaaagatcagaaaacctgaacagggtcaaaagaagaatgagaaatggaatattagaataaaagtgttaaatcaggctcaaactcaggacagttttggagcgaattctagtgcatagcaaggagcacagagcagagagtcaatagaagttattggctaatggagtgaagaagtcaccagctcagtgtacaccaggggccagtcagctgtttagctgaggtccagaagtctcatgagactcgtttaaatcctgtacaggttcctttcagacctggaagagaactttgagaacaatatcttctccttccaagtatgtgacgtagtcctgaaccacgccccagacttccgccgggtctacctgccttatgtcaccaaccagacctatcaggaacgcaccttccagagcctgatgtgagactcatcccccatttaatccccatgtaggccctgaggtgaccatgcaccagtccccagcccagagggctatcccaagagcacactttccccattccgccctctgtattggttaccccagcatcacatctgagcgccctgtacatcagctcccaccgctctttcccagcccacagatactccactgacctcccttccccgcaccttcactgcatcccccattgctccccatatcccccctcccctaaggctcactctccgtgcaggaatagcaacagcaatttccgggaggtcttggagaagctggagagcgaccccgtctgccagcgcctttccctcaagtcctttctgattctgcccttccaacgcatcacccgcctcaaactgctgctccaggtagggcagatgctaccttgatcctctccccttaactcaaagggatgccctcaggaagacccacaacaaaggaccaaccattcttctgccaggtgtccacatcctgtctccctgctgcccactgcctgcttgcttggaaatatttgctgctaaaatgtggtccctgggcttctccattcaccagcccccaatcatttcttcctgtttcccatttcttcctcccatctcactcctgcctactgtctgttcaatagaacattctgaagagaacacagcctggctcctcggaggaggcagaggccacgaaggcacaccacgccctggagcaggtaggcagccaccacctccactctgaccctctgtgtgttcttctcagagaggtctttcccacctaggcccatgactccagggagcatgggaggtgggaccctgttgggagagctcagccacctccctgcatccgccaaacttccaaacatacacaccccacggccacctctcccacgccgagcacactccacatcaagggactgtgccctctccaccatcacccccccattcagtctcacttttactcagttcaggaatgttctgccaagtcatacaaagttgcctaggacttgtgcttgatactgcctgcccaattccagcctgggaaaaatgactgaggctgtcataacctatttccagattgcttgcaagggactcaaaggtcaaagcctctaacacagtgcccttcccctttcctcactctctgcacccctagctgatccgggactgcaataacaatgtccagagtatgcgacggacagaggaactaatctacctgagccagaagattgagtttgagtgcaaagtgagtcggtcccatgcaccccatccctgcccatgaactcccttaacatgtcctgcagatcaccccctaacctggaaccaccttgctcacattatccccagcccctcccctcatttctgcccaccttctattctgtcctatttctgggaggcctacttgggtctccaagacatactgctaagtgaaatgatgaaggtaaagaattgtgtgtatattatatcacctttggtataaaagtgggaggatacaaatctatacaggtgtctgcttgtgtgtgcataaggaaactctggaaggagaacaagaaaaaaaggaacagtggttacctgaggacaaggggggtgcatttgagaaatgggcaaatgagagagaacttttcaggatgagcctttataaaagaatgttttggtgcttgattcatttattactttatcaaatctctttctagtctaatcaaacccacataagattggatccaaatttagagccagcatccctcattgaaatacaaatctaaaatagacattccacattcaaattccaacttagaacagatactatcttttttttttttttgacagagtctcactctgtcgccccaggctagagtgcagtggtgcgatcttggctcactgcaacctccacctcccaggttcaagcgattctcatgccttggcctcccgagtagctgggattccaggtctgcaccaccatgtctggctaattttagtatttttagtagagatggggtttcaccatgttggccaagctgatctccaactcgtagcctcaagtgatccacccacctctgccttccaaagtgctgggattataggcgtgagccaccacgctcgtgcttagaacacatactatctttacactcctgaaaaagaaggaaaatcccttattcacatactaagcatagaccacaccctcatctttaaccaaattccagctccaagacgccccacctagttcttctcacccccatgtttgattccagctgctcacatatctctggtataaaaaatggaattgataccagacctgcctctaatattttattttaacctctaagacacatatagtgttcactgacttgttccatcacataccctgattggactcttccatccctccttcagttcaggcttctagggcagagctgtcccacacactcactatcctgagttggaccataggcatcttctatttacctgagcatacaaccatgggagccacacaccagtggacagtggtagttagagggttcagagagaaagagaatctaagtgatgggttatgagccagaaggcagatgtggaagagatgcttgttcaagtggaacttgcatggaagtggcatggggaggagggtgggactgggagcaaacctcatgcttctcccatctgtgacactgccttctctctcttcctctgccctgtagatattcccgctcatttctcagtcacgctggctggtgaaaagtggggagctgacagccttggagttcagtgcttccccagggctacgaaggaagctgaacacgcgtccagtccacctgcacctcttcaatgactgtctgctgctgtctcggccccgagagtcagtgactggagtggcaggccagggcacaagaggggaaggggatgaggaaagaggggggtctgaaagggagagagaagggtcatgttcctagaagagcccttctcaatggcttaacccatagagcccaggtcatagcctagagaagagaaaaacaagcccaaagcaaaaaggggatcccatcaaactgtatcatgagaccacatagcaggacatgtaatatggtatagacacagagcaaaatgtagcaaattagcttatcacattctcacatgagtctatttgtggcttctttggactggcctcaacctgctattctagagatacttagctaattccagagcttaagtctctggtcttaaggttcttgggaaatgtatataaattccatctcttcacctctttaaagtggtaatgtatccactgcactaggtgtgtggtttgccagactaggacaaatccctgaggaccctggagctaccatcttgggagcaagttaggaccatcttatggtttttgtgggaatttgcaggctgtagatgtagggatttcgaacccaaggttatgagggtaggtgaagtatggaaactctagaatcaggttgaaaagatttgtattttgcaggggtagccgattcctggtatttgaccatgctcccttctcctccattcggggggaaaagtgtgaaatgaagctacatggacctcacaaaaacctgttccgactctttctgcggcagaacactcagggcgcccaggccgagttcctcttccgcacggagactcagtgagatggggctgggcagaggagctgggggtgggggaagatgggcagccgagaaaagaagtgagaccaaggcagaaaatgtgtccagaagacagccacagcctcatttagcccattctggactggggaccaccatagagaaattcagactcctaaaactaatggataacttgcaggagattggggtgggagagggtacaaagtcaccaccgaggcttagcatctattttatactctttactcaagagggacaaggtctgtgtagtatcagaaaggagaaggactggtatggagtgagcaaggaattggaatactggtatctgtgagcacatgcctccatgcctgaggcagaaacccttctatgccccagctggtgggcacagatgtgaataagacaagtgctgggtgacttttactttctgtgctcccatcttccaaaccagtcctctattgaccagaaatccatagtgttgagaatgctgatttgctcatgttttcaataataataaaataaaatacattcacacagacatacatttttgagagtattaatagtacctataaaatctggaacacagtgcctgcaataatgaacatgtaaaagcctgtagctgttattgctattataaaagatatatgaacagtcatttaaaagtttgacgtatctaagtgtttgaggatccctatgttgtagacactttttcagttttgtcccttggaagatacttcagagtgggaccgataacacctgttctcatttattgaacagaaggactagtatcggagtttgtgtgcaaaacagcacataagtcaaataatcaggtgcagatgcatgttgttggtttggtgctttgggcactgtgcctggaacagtaatagtccattcccagttacctaggcacaactgggcacagaggctaacagaatgcagaaaccttcagatgattacaaacctaagcttggattacaccgtgcaacaacaacaaataaaacagtagacatatctccctgatctaattattattatgaaacaatgatcatctctgagatagttagttgaagggagataggcaagcgagtgtcaagaatcatgccaaatgatggagggaatctaaactgaaatgaacacttcgcttagcacaatttccaaaacagaaaatctccagactttatgactaatgaacattacgccccaacttggaagatatgagaagccattaggaggataattctggaaagagaagaggaaaagtaaagtgtgacaagacacattcacatatagttcaagattgtgtcatgtttccaaccaaaaagagtcctatatagtgtttgatagaagtcatggaactagataagtccttcccacagtcttttgccatccccatccttggccctcctcctacacccccacaattgatgctatgaccctgctttgttttctcagaagtgaaaagcttcggtggatctcagccttggccatgccaagagaggagttggaccttctggagtgttacagtgagtgagggtctaagagggagagaaaagaaagcagggtcagatgtcacctttggatacaggagtttaaagggctgggtgggaactctaggctttcatttattgatattccgtaaaatgtcagggtggaagattggcctctagagcttaaaaacctgaaatatatcgcctaaaactgctcatcactatggcagtcccccttccccatacattcccttccttgggcaatagtttgctctttttaaaaatatttgtccccttaagtctaagctgacattattttgcctagattttacctgcttgaaggtcttgttggggtaggggaagaaagcctgacggtggtagaaggtgtgcaggaggatagcaccccagatctatcttgaccacacctaagaggatgacctgaggtcacctaccccaggcttctgggtgcccatggggagccacaggcacacacacattatgtatgtgtctgtgttcacaccaagactggacttcttatgcctctcatgtcagccccacagttgtcctccagcaaagattccctaatttaaatccagagagaatctgacctcaaccctggacctttagtgactgaaaagaacaaacaactacaaggaaccctgggaatgaagtaggagagccgtgtagtaactgaacgctgttaacttgctcactgtgcactccatctgctggcttcagttccccagtgggtgaggagggcaggagcattcttcctccttcattttgaccttgtgaatggcagatggggaggatcttgagaaagcaaatagtaatgcagtattccatttattttacaagagaatcaaggcagtgtagtaacaaaaaagagccataaacccacatatgatggaatactgataggtgaagcattctctgaggcttgttttcttgagcttcagatctatggacatgtctcctggttctcaaaaacatagaaatagagaaatcttgaatgtcctcaagattcatctgatcaaccttgatcaataaccatcttgatcactgatagatgagtaaactgaagctccagggctttcagtctctggcttaggtcaaacctgggacaccactagttaagtctttcttggttccacatctggtactgggaagaaaatgaagaataagacacagactcagattttataatccagttggagaggcaaaacacgtccatgtagcagttaaataagggataaatgccttggcatgaacaagcagtcttaaaagagttcagaacccattgaagactagagtcagggacggtttcagagggaagatgggtcattagctggatctcaggtatttgagatgatcacatgtatttctcaacccgtctcctctggagaagtggaatttttggtccatttcatttctggtatgtctatttctttattaaccattttcaaatttcctcttttgtctgtgactttcaacagcccaaatctgtctctatctcaagtcctcccacgccacccccctccaagtccctgtctgtgttccaatcccctgcctctcctaacctctcttcacactcttctcttccaaagactccccccaggtacagtgccttcgagcctacaagccccgagagaatgatgaattggcactggagaaagccgacgtggtgatggtgactcagcagagcagtgacggtaagcgggagcatgcgtgagcagcaggccaggcactgcaggcagggcagtgctgggagtgtgttcacttcctgcagctgccatgacaaagtaccatggactgggtggcttatggcaacagaaatgcattctctcacagttctggaggcaagaagtcccaaatcaaggtgtgggcagagccacgcgtcttttgaaacctgtagggaagatccttccgtaccttttccagtctggtagccccagctgttccttggcttgtggcagcatccctccaatctctgcctctgtcttcctgtggctagctgccttcctgtgtctgtgtccaagttttcctcctttatttttttattttatgtattattattatttttgagacagagtcttgctctgttgcccaggctggagtgcagtggcgcaatcttggctcactgcaacttccaactcctgggttcaagtgattctcctgtctcagtctcccaagtagctgcgtgagccaccacacctggctaatttttgtatttttagtagagatggggtttcaccatattggtcaggctggtcttgaactcctgacctcaagcagtccacccacctcggcctcccaaagtgctgggattacaggcgtgagccaccacgcccagcccaagttttcctcctttatatagacacctgttatactggattaatggccaccttactccagtatgacatcatcttaactttattaattatatttgtggcaacctcattccccataaggtcacattttgaggtatagaggattagaacatcaacataaatgttaggagggacacgatgcaaccataacagtggtgaaggctcaggaatggacagctgtagacttggccacacccagggccgccatgttaggacacttggaggctgggtttatgctggaggctccccagttcactcagcctgaggattcagaaaactctccaggaaggtgatccagagaagctatcgtgagcctttcccaggtaattcttcccactcaccctgtgcccacaggctggctggagggcgtgaggctctcagacggggagcgaggctggtttcctgtgcagcaggtggagttcatttccaacccagaggtccgtgcacagaacctgaaggaagctcatcgagtcaagactgccaaactacagctggtggaacagcaagcctaagtcttctctgagaggagtttcgtgagctgaagaacaagctgctcatggcaagggctggccccagaaccctgcaagagaggccttctgtggatggagaactaggccttctcaaagctcaaggacaaaatccagctaacccagtccctcggcccaggcctcctttcgtgctttgtgcttggtgggggggatttcgagggactttgcactggactctgggaacctttcatcattaaaaaaagggggaccattggggcctgagccaaggaactttccttctactgccttatagtgcttaaacattctccgcctccagggtgcagattcagagctggccagagtttcagtgatagccgtatgttaaacagaatctcacctcagtctcctggagggagatgtttaagaggggttaacacatcagatgggagggtcagcccggtgacctctaaggtatcttctaacctagaaattcaccataattatggtgcaaggtcagtgtgtctctgagatctatgtctgttggtggcaatgtgagggtgatactctctcactctaataaacttggcacttctccgagtattttcttctcaaactcctcagcactgaaaaaggttcaaaacatggaatcccgagagttcctgcctgttgggtttaggtgtcataaaagtctaaggtggtgcataggtgatggcagttcctgactcctgctttctgacccctgagagtttggacagattttctgcttgttacagcttcaaaggttgtagaaaaagttagaagtaattgataggtgatgaaaaccccatctttgctgtacccataaggtataggtatagactagtttgggtggattgggcaaatccgactcggaccatccatgattttatattgtgacctgaattattgtgaaaatatcttctcagctgctttagctttcttctttgtgaaaggcagaatggaaagaggcctgggatccaagtcacaagacccaaactgcaggccccacactgccacagttcaacccttctgtgtctctgtgccctgaaatgtaaaacatgggcttgaaccaagtaacgtccaaagccctacttaactctaacaaatgtgttattctctagtttctttcaggttgcctgtctcagttgaagaatatgactaaatttttttctcattagcatccatatataacaataccatagtcatcttttatgccatcttttcatctataatagtccttcctttgatactctactactctgtttcatatttaggaggctcaaaagtagaattgcattgcagcctcgtacagaggtaagaatgatgctataaaatttgtcctaggcccacttaacaatgatgtgacatatttgtcgtccttttaataacacacactgttttcaatgtatcctaacatgttagcttgcttaattttttattttttaaatgttttaagtttaattaatttttttgtagagacaggatcttgctatgctgcccaggctggtctcaaactcctggccttaagcaattctcctgacttggcctcccaaagtactgggattacaggtgtgagccactgtgtttggccagtttactttatgttgaaaaaaatcatcaccataaccattaagatgtgggctaggctggatgtggtggctcatgactgtaaccctagcactttggaggccgaggcgggtggatcacctgaggtcaggagttcgagaccagcctagccaacatggtgaaaccctgtctctactaaaaatacaaaaattagctgggcatggtggtgcatgcctgtaatcccagctacccaggaggctgaggcaggagaattgctggaacccaggagtcagaggctgcactgagccaaaattgtgccactgcactccagcctgggcaacagagtgagactccatgtcaaaaaaaaaaaaaaaaagttgtgggctaatattattttatcataaacaagatgacattgctaaaatatccaaaacaggatggttttagagaagttcaattgaggtttttcactcttttcaaaaagccagatttttaaagtaaataacatgtattatttgtatatgctataatttgcatatactaacatataaaataataattgattcatattgattgcaataacaataattataatccaaactatttgtacaaaccagtatttgaatactggccatatggctcaaacagttccatatccagccctatattattttcaaggcaaattctccattattttctcagagaggtacaatagcagcttctgaatgcaaataatttttttgagttgcatggctgctgctttgcttgaagttgttaaggctttctcatccttttgaacataagttctgtaagacttctaactaaaactattctttagatttttaatatgtattcatttaattgggttatactcacctaatctgggatattagaaagcattaggctttacctgtcttttaagtccttggttaaaaaaagaaaaagagaaatttagatatgagtaatgtctcttcggttgaattactgaactatactttaggtttagaaaaattgaatataggttcactcattgtcctctccgtcttcaaatttccagaattgaactcaacttcttcagtgattactggaaccattacatggccatttcttaaaagagattatgaaaacaatcattaaccaagactttttggacagaactgcatttgaagcatgtatgattatacagtattttgttgctttcttaagcaaaacaatgcattgagtagtgtcttcaggagacaaaaatagttctattcatagaaccttttctgaattgtaatatgcttggagcttaaaatcatatagatgtgtgctcaattattttatttgtgcacttgaccacactggacttctgtcatttttgcctaagcacacagcttagaaagctatttttttaagtttatttttactaccaacttttacttaaagttaactatgacctttagcttttagctgtgcactacttgctctgtcttggccatttatagtgattttaataagaccagcctgcaagtatctggaaggcacaccgtttaatatgtgtttattttccctaattttgttttttgtctcaaataacttttatatccatgacagataaaatgaatctgagttctatgactgattttgttttaaattagcctttaggatagaagtggttaaaaagtcttttaaggctgggtacagtggctcacgcctgtaatcccagcactttgggaggctgaggcgggcagatcacgagatcaggagattgagaccatcctggctaaccaggtgaaaccccgtctctactaaaaatacaaaaaattagccgggcatggtggcaggtgcctgtagtcccagctactcgggaggctgaggcaggagaatggtgtgaacccgggaggtggagcttgcagtgagctgagatcacgccactgcgctccagcctgggcaatagtgtgagactccatcccccaaaaaacaacaacaacaacaaaatgtcttttaaaaccctgattacatttgctggttccccttcctttgcacacatatttacccccttaaataaacttgattccctgagggacctcatgttggtctgttctttttttttttttccctgaaatggagtcttgctctgtcacccaagctggagtgcagtggagcggtctcagttcactgcaacctccggcccctgggttcaagcaattctcctgcctcagcctcccgtgtagctgggattacaggcgcatgccacaaaataatttttgtatttttagtagagacggggtttcacaatcttggccaggctggtctcgaactcctgacctcgtgattcacccaccttggcctcccaaagtgctgggattacaggcgtgagccaccgtgcccggcctggtctattcttgatagtctgtgtgctttttaagtatttagtgatgttgcccttatcataaactcctcttgtttatggggtcaaatgagaattccagtgttttgatatagtggcccttcacagacagttattccccacccatcccctcaagacacaccactgagacttgtgcaggtttatacttgttgatgtttcagacttacacgtaaatatcttttgtggtggtaactctgctctatcgctaacacagtccagtgaccccagagccacactggctgtaaacatgactcagaagctgtgtgattacagcagttccaagcctgtagttgagggtaatcttctaactctgaagtcaggtgtgtggaagggccgaaggttatgagtaaatgagctgaagagagacagatgccaaactcagtcgtgattcaaatgcacttcttgcttagatttagaaaacattctctatgcttaatagtctttgacccattttttccaacccgcccattgtaaatgacagtcatggagtggaaatttccctagcttcttccttggaagagcatccattcaccctgcagttcccaaggagcgtcgcaaaaacgaggctaagggcacagacaaaactcgggcagtgaaggtgagtgagtgaggttgttgattctgggtggctgtgagtggggcatctgtgtaggaaaggagccgggttggtgtgcgttacaaactttttccgcgctgctggggtgggggtagctggtgtctgctgctccatgaatgagtcatgggctgagggtagaacttgctctagggaggggctgcgtctggctcacagcattctccaggagcaccaaggggcagatgaatattttctggcagtttacctgagcatttcagagaggcaactagctctgaacaatgcagatggaaacccagaaggagagagggagccagtccacatggtgtgctgagatgggggctctgcatttgctcagaccaaggggctcctgagcaccagggagaacattcagactgttggggaaagggtgggcaagagcaacagaccgtgggatattgtgggagagtcatagcagctcaacaggacagactgtaggctatcccagaagcagacagtctcagggagaaaagggaaatgcagaaagcaaagaaatgatgggccctcagtgggactcagccagcccgttctaaagtactttcttattgagatcaacgtgtggtgcaaatgagaaaattatccactgctggatttgaaagaaccttgaaagtctttgtgtctaacaccctcactggttacagtggagcctggagaggggaagtgatttacctaaggtcatacagtcggttgcttataaaggacagatttgtccagctctatgtccactgctaggatgtaagcaagtgacctgctgagcttgtgctcatcacccaaagggtgaaggtgacctgccatacactgcaaaggttgagtgaacagaaaatgcacaggcagaatatttttgagagagcaggaggaggtggtggtcagacttgtggaattgttaataagcaggtttgggttatggaattgagcttagtcaggcaacatgatccagaaaacacgaatcaaggtggtgttttcaaagcagttcattgtccttgcacaagcagggccttaaagaactgaagagtcctctgtgtgtgtgtgtgtgtgtgtgtgtgtgtgtgtgtgtgtgtgtgtgtgtgtagaggtggctgcttagattcaagggaggagagtacaaacagatctttgggagaaatgggatttatgcagtaagactgggcttcctccccgaaataaaataatacttgtgatgggctcagtggctcacctctgtaatcccaacactttgggaggctaaggtgggcagatcccttgggcccaggagtttaagaccagcttgggcaacatggcaaagccccatctctacaaaaaatttaaaaattagccaggtgtggtggtatgcacctgtagtcccagctactggggaggctgaagtgagaggatagcttgagctcaggaggttgaggctgcagtgagccatgatcacgccactgcattccagcctggacaacacagcaagaccctgtctcaaaaaaatggattaaataaaataatatttgcattaacaaatattaggggaaaaagataaggtgtgttccagttaagaaaccaagagaaatgaatatatatattgagataggatgtcactcttgcccaggctagagtacagtggcataatgtcagcttactgcagttttgacttcctgggctcaagtaattctcccacctcagcctcccagagtagctgggactacaggcatgtgccaccatgcccaactaatttttttgatttctagtagagatgaggtcttgctatgtcacccaggctggtcttgaactcctgaactcaagtgatcctcccaccttggcctcccaaagtgctgggattacaggcatgagccactgcaccctgccaaatgtatatttttttaaagtgtttgacagtcatcttttgaatatggttctgggaacattttttgtttatcgggtatgaaaatatacctgatctcaccaatttaagtaatttataggaagtaatagaaaagtcagactaaaatgaacaatctgttttgtatggggcaatgaagtgaaataatgaaatagtcaaattggaatgcttggaaacattaaatgcttgttgtggttggtagctcagatgaaggggcttttgagaaacagaggattgtatccctggcaggctagatgaatatgggttggggtaagggtgcaggagcttgagaaggggcactttgggtagaattatgtggaaagaatgacataaaaaccaatagaatgaaagtgtaccagaaagcactctagaatctctgtgggtggaaattccattcttagataatgaagctgtggcagtaggaatgtatgtgaggcaacctgccagggtaatgagatgaagaaacaaataaaatgtaaaggctacagaatgaagaagcaagtaaggtgtagatgccacaaccctgggtctgacaccaactcctcccctgggcttgtgtattttgcacatcttactcccagatgcctgggctctgaaacccagagtccgtttgatattctctcctcctcactcatgcagtcaactcattgatttcttcacagcattgatcacattgactgctttcctatttccctactgctgttttggtctcggtcccctcatctctgggtactggaatgacttccccactggtccatctactctcagtcttttcacccacaatctatctggaagagtgttccacagtctcaaatttgactttatattatttacccccctcgttgtctaccaggtaataatgctgggcccaacctagccatccagcgtccatgagccccctctgtttctcacactgctccttaggttacacgttcactaacctcactacctgttcttctcacacatcccaactccctttctagttttggaacattcagcttcctgctccctttgacgactattctctcttgcctcttacatatcacaataatgtgtctatttctttttaaatcaaactaaacagtactgagtatttaagttatttaaacacagacccagggcctgtggaaagatttgattctagctcaaatctagcttatacccactcttttctgacatgtcccacccaatcccagcttttgaccttctttaacacctccttctaaaactatcactagacattgcttattgcagttgacacctcatgaatgggcttaaatcatgtccagaatgtattccttttgcaactttgggcaaataacttcaatctctctgagtctcagattttcagttgtcaaataaagaataccttatacggtggttgtgaaataaaattacctagcagagagctagatacatgatgaatgccaaataaatagctagcatcatcattaatattttgcctaaggaccaatttctggattaagtaagctatttcagctcctgatggttttgtaaaacatacaagcacacaaaattggctatcatttatagccttttacttgttaaggctctttcagttttttcaaagatatattagcattcccaaagcaagactcttctatctgcacttgctgaagtggagaataaaaaactaaaagacttctatctagacttggtcaaggcatttattttaatttcattttcttaaaagataattgtaagataatttttaaaatagagatgggggttgggaggggggggtggtctcgctatattgcccaggctggtcttgaactcctggactcaagtcatcctcccacctcggcctcctaaagtgctggattacaggcatgagccaccacacctgaccttggttaaggcatttttaggtaatcgtttaaacctgtttcttgctctgtgaatttggataattgcatttatattttcacacctgttcaacctccctccccaggacctatggccctgtttgggcttttgatcatttcccaatccagcacctcttggagctctttctacttgtactctcaggctgtccctgacccattatcaatgccactttttcttctgcccagtgctccttcactatgttgttctttccgtaggaaacatagtgagcctgcctaagaccagttttcttcctgctacgtgctgtgcctgcgtgactttctcttgacttgaactagtgttctctatgctgaataggcctaagagctgcctttggtctttttagtccttgtctctgttacagaccctagttctatatttttcttacaacaaagatctgtaagttctaccctatggggggaacttacagaccctactctacccagataaccacttatctaaccagataactacagaaattttatcctcaacatatataaacgaactctccttttccctaaatttgcttcatctctgatatggtctggatgtttgtcccttccaaatcttacgttgaaatgtaattcccaatgttggaggtggggcctggtagaaggtgtttgggtcatgggggaggatccctcatgaatagcttggtgctgccttgcaatcatgactgagttctcgctttgatttcatgccatatatggtcatctggttgtttaaaggagtgtggcaccctcctcctcttcccttgcttgttcctgctctccctttgccttcgccatgaccctgcactttctgagaccctcaccaggcaaatgccgccaccatggttcctgtacagcctgcagaaccgtgagccagttaaacttcttttatttacccagcctagcaatgcaaaaatggcataatacaatctccattattttttctcaattatagcatttcttagttaccaaagtcttattttctttcagttaattatctaccacattatattgattctgacttaaatattcgtcaaagctgggcacagtggctcacacctataatcccggcacttcgggaggctgaggtgggtggatcatctgaggtcaggaggtcgagaccatcctgaccaacatggtgaaaccctgtctgtactaaaaatacaaaattagccaggtgtggtggcgcatacctgtaatcccagctacttcggaggctgaggcaggagaatcgcttgaacctgggaggcggagtttgcagtgaaccaagatagtgccattgcactccagcctgggcaacaaaagtgaaactccatctcaaaatattcctcaagtctgttcgctcttctctcttcaccctgccctactctacacatctctcagtgaggctgtctcagcagccttggattatgtccctgcatctcctctttccttctatcaatctcattctctgttcaactttctttttttttttttttttttttttgagacagagtctcgctctgtcactaggctggagtgcagtggagcaatctcggctcactgcaacctccacctcctgggttcaagcaattctcctgcctcagcctcctgagtagctgggactacaggcacacaccaccatgcccagctattttttgtatttttggtagagacggggtttcaccatgttggccaggatcatctcaatctcttgacctcgtgatcctcccacctcagcctcccaaagtgctgggattacaggcatgagccaccgtgcccggcctgttcaactttctaaaacacaaatgtgggcgagtcatgcccatgagttaaaactgccagtgccactgtttgcccaaagaatacatgcaaacactcagcatcgtgtgaggcctttcccaatctccctgccagcctcatctgccaccccagcccctccactcaaaccctaccactctgagcatctctctcatcctcttaccaatctcagtggtcttatactggctatactttctgcctgaaatatccttccttccttcctctgcttatccagattccactgttccttcacgagctagctttaatgccttagactctagagctttcttacgtggcttttcctccatttgagttcctgccactctttgttcccaggctggcacctcacagcattggccccctgtattgtaactggtcatgtgattgtcagactccccagagagagtggcagttccctgaaagctgagacgagattttgtttatctttgtgctgacccagtactgtctgtgcctgtaaacccccgtcacctgatggaatggatgtctgccctatatctcagggctttgttataaactcaaatgaaaggatatttatgaaagaacagtatgaactaaactacaaacacaagaacgctgaatctcccggactggccctctggactcgaatatcagcacttggggatgaatgaagaaggtgcatcatttccagggaagcagatttgctgttgactaataaagaccatttacttggagtggggccaacaaaagcctaattgtcttttgtagcctgtttctgttttgtgttccatttccgcaaataatatttaaatagacatttaaaattaattctaatgggctatctcataaaattatctgaataactaatataaaagattcagggccaggtgaagtggctcaggcctgtaatcccagaactttgggaagccaaggcaggaggatcacttgagctcagtctgggtaacatagtgagaccccaactttacaaaatatcaaaaatttagccgggcgtggtggtgcttgcctgtagtcctagctgctcgggaggctgaggcgacagggttgcttgagttcaggaggtcaaggctgcagtaagccatgatcataccactacactccagcctgggtaacagagtgagactctgtctcaaaattaaaaaaatattcagcctacaggaacaaaaaatagaatggggatcaaacagttttagaacatgaaaggaaatgatttttttggacagttgcagagcctgtatgagagtcctaatggtgaggggtggggtgaggagttactaaaatgccagcagtgaacccagggctgcctaggcgtctgaacagtaagaaagttgggtaaaacatggaggccaacttcaggattatctgtttgaactgcaaaactaacatggatgtagatgtccttagcaaagtgctacaactaggatttgccaggtttagcaaaaaaaaaaaaaaaaaaaaaaattaaaaatgcaagatatccaaatagtgcagggaacaggcttatgctacaaaattatttgttgtttttctgaaattcgaagttaactgcacatccttttttttatctggaaaaccaagctataacccaaatgacttcaacaactttgagcccgatattattgacaggatggggctctggggcattttggagaaagaattgaggaagattcgcgtggactcttcttgctgtaaacaaccagagtagtttagggccacagtgaaactggtggtagattgccatctagtggaaagatattagtagtgaaagctaaaattggaggactggacagattttttgttttttgttttttggttttttttccggagtttgccaggaaggattccgctctggccaactgcaaagtcctgaggttgcactgttagacgaggaggacatgggtggggggaagggagggtaggaagcagatggaataggagcaaggctgaaatgcgtttacctcgtgttctaagcagagtgcctggaccattgttccattccagcatgcagaaactttgctccctctccacgcaaaaccagagcaaaagctagagcttcctgtaagaagcgcaagattcttccacctgaggatggctcaaagtgatgtggaactatcagaaacaaaattgtaaagatataatcactcatcgttacaaccagcgacaaaggaagtcatccaaaaggtgacagtgtggctggctacacaggcaagctcagatcttgaaaaggttgaaaaaatgcaaaagttaaaagaaagcacacactggaattccaaagacggtatctcaaagtgagaagcctggaagaaactccgctctgcaagcatgctgaagaccaatacgaacagtaacactagcaatgataataataaagccaaacttgggacaggaaggagagagaaaagagaaatgtactcctgcgggcagacatcataatgtcaacatacaatacaaacacagcagatgcacttgagttttatttcagactatcttcccaaagaaatgaaaatattctagaaattaaaagagttgggccgggcgcagtggctcatgcctgtaatcccagcactttgggaggccgaggcaggtggatcacgaggtcaagagattgagaccagcctggccaacatggtgtaaccccatctctactaaaaatacaaaaagtagctgggcgtggtggcacgtgcctgtaatcccagctactcgggagtctgaggcaggagaatcgcctgaacccgggaggcagaggttgcagtgagccgagatcatgcaattgcacttcagcctgggcaacagggtgagactctgtctcaaaaaaaaaaaaaaaagagttggataaaaaaaaaaaataatactaagatggacttaaaaacccaaattggagccttataacttttaaatcatcctatatgttttctagtacaggacaagagagggtttctaagacttactagaggcaaatatcctaatttccaatgacatgatttgttgaaactaaaggacaataaatttaatgtaaaatcttatggaattctatgagattcttgaaaaatggcttatgaacacttaggtaaaaattagccagaaaagacaacaggtgttctaagctaatctgtctcatttgttatatatttaggtttacaagaatgttatattatcagagtgctatacagagaatatgtttttgattttattgaatcatagaggagttttattcctaaatccttgagggagatagtaaaggatggtatgggatgataatacagttaaggaagatttgtagctagtttaaccctctatacaaaaaaagaagtacccattaatggagtattttcaaagaggagtaccaaaatgtcctgtgctgacctatattctgtttactaatttattaatgatttgattataaaatgtgtaaaacatattgatcagatctgcaggcagaacaaaactgcaaaaaaatggctaatattatataagaactccagagcatcttaagctcaatattgggctaaaattaacaaaatgaaactgaacaggccatataaatctctgtatgtttagattagaaatgttaattctccaagtgcaaaatgaggagggtgaactgcctttaaaacagcttctgtttaaatgacctagaggtcatagttttggaccaagaatatgaaccagctgcacaaaaatgctaatgtgttttaatagagacaccatttgtagggtatcctatttaatggagatgacagctgtaccaaaatgttgaccagaccacattcaaagtaggcttcatttctgacaccactcctaaaaggaacatgggcaaactcacatttatttgaaaagaggcatacagggtggcaaagagcctggagcccgagccccatgagggctagcagacagagctcccaccatcacctgtagaaggcaaagcttttataataggaatgatatacagtccttagatttgtgatttattttttgtagtacttggaaaacaaaacccagatcaatcaaacaagatattggtttatttctagtagaagaattttataataaagctcttcaaaaattctgcaggttcttgtgaaagggagttagccccaagcctcgggccctccactgggaaaacaatactgaatgatgccccatcaatggtgggtagaagagattcctgcaagtcaggagcttggattttttctttcacccctaagtttccatgcttctaagaagttttcacgattttctctttgtttagtgtttgtttttaattctcaattcattttatttttagtatactattaaatcaacactttttatctaagagttgcatgtaaggacagatgtcaaagttgatttccgttcgattcttggtgttagatgctgtatttgctccatacaaaggtgctgctaatcattgaatagcgggagcatgaaccaattaagatctggaggagaaaatatccagccaccatgtagggctttgaaagcaacggaatgctctggtgattaatagaaagagcagttacagtcttccatctattttgccctatgtctgtctttaggctgttcatttcatgagcctcatgagacagaatgtgaaaacaaaatgagatatgtaaatatatacttttaaaaactcaattgttatgcatcataaaacatttcataatttaacaaatacatatcctaatccctaaattaagggtactgaaacctggctattacaatctccatcacatatccgccaagtcgaccttctggttttctcctgacttctgcccctctggtggatttctgcattctttcagagacattttctcattggcttgcacttatctattgttttaatcacacctctctaatccctaaacactcctcttctttatctattaggaggacattgatctttataactatttactgactctcccccttttcatattcatcttcctgtcccttcagcttttttttttttttttttttgagatggagtctcgctctgtctcccaggctgaagtgcagtggcgggatctcggctcactgcaagccaagctccacctcccaggttcaccccattctcctgcctcagcctcctgagtagctgggactacaggcacccgccaccacacctggctaatttttttttttttttttggatttttagtagagacggggtttcaccatgttagccaggatggtctcgatctcctgacctcgtgatccacctgcctcggcctcccaaagtgctgggattacaggcgtgagccaccgcgcccggcctttctctgctcgttttccattccactttctgactcctgtgccatctcctgtctctcccgccccctagcctctttcctttgttcccttcctgacctgttctttcctactttagtacctctcaggtccctttcctccaatctccagatctgtgccttaccttttcttttctgtttagatgtattttaggatagatttttcttctgtggttatctttctctttcatcacccagtcaatgttttgctgcttcttatactactgtcttcacccttcattcatctttctggtccttttcagtcccatctcgcccttctcccaggcaccacccacttctctttttatacaaattggttgtttaccctccttctcatgctccctttagcccttaacatactaaagcaggatctcaagcatagaaccaataaggtctaattgatgtttcttccttcattgcctaatttgtcatttgcctaatttggctcaccaccagaggacggaaggaagttattcaagttcaatgtggatgcagaatcactctgtgcaatggaacaggagggtggtacatcctcagtcagtgtccattctttcctgagctcctgaccccttgtgcagacatctagggagcattctccatctttggttaagttctctcttgttccctcctcttcctacatctcaacctataaccaaacctcccgagattagcacccaacctcaaacggtaaccataaacaaatggaggaggtaaaattgcagtctatgggtgagagttaagcatgaaatggttggtgatcattttagggggtgatctctcaaggtgcttagcaaagtgtcttttggtgcctctgcaagctagggtgggagagacagagaacattctggacccttcgtcctggcccagtgaggtctgggccattatagtctggggatgctgtcacatcctcctgtgcgggagagaactgtctacttgctatcctcggagtgctccccagccccgccccccatacacaaaaacaagagctgtgggaaaataagtcctagttcacaatactagagaagtgacttcagatattctcaggcttctcttgtgatcctgtccctatggggcccaacttccagagaaaggcccagactcagatttgctcagagtcagtcatgggtttgggaatagaatatggttaaatgtcaggaccgaaggaaaagcccaagatgcccagttccttctttagtgggagagatgagcccagggaagaggccctccatgtggtcatgcctggtggtgcccacttgagaatggcatccaatgactgctcagccaagtggaataaaaggacgaaaatggagctcttcattagtgtgagtgtggagacacataatggagacacataaccacagagaaaaccgcaggacggactagtttactgcttacggtggacactccagctcatttgtcaagcaaggataggaaacaaacaaaaacacctgatacaacattcagaagtaacacaggccacctgcttccttcaggacccccacacagagtgtgaagaaaagggaagcgccagccctctttcttccttctcatatcaacaagacgagcctacacaggggaaacgtctaactctcccctcagtctacagagtccacactctttcccaaacccccaacccctgtcctctcagcgagcccaatcctatcccacccaagcagcctcttttcactctttgaccccccaactaggggacatggctattcttgtcatcccctctggcctcctccagtgctgagggctgatccagggaagcagctggtggttcctcttttgccttgctgagtaagggcccagtccctggtctggccccttcaggcatccatgagagagctgacgaaggctgcctgcccagagcctgggggcagggagttggaaatagatcaggaaagtagccatcccctcctgggggatgccccagagcttgtgggcagaacggaccagggaagggcagctctggcaaacaggggtcactccaggaggctgtacctgtggggtcggagggtgtaggaattaccagacaggatggagagtatcaactatcattaacagtgttctacaacagatccccccgtgccccaacacacatagacgcagcttaggacctcagtgtaagtctgggtcaaactctagcctcagggtctgtccttaggaccacacaggctccagcactcaaggtcctgtggtttagtaacattgacacaaagtgaaccatggatcaggccaatgctgtttcgtacatgcaacaaggagaccaggaaccacctgatctttcctccccttctgctagaatctagtcttaatatgacagatgtttctgggatttcagaggtccaagtggcccagcagaatattagctgccatctactctaggccaaatattttcactcctattgtatctaatcctcaccaagtccctccctgacatagaactgtgagtcccatttcagagtcccagaaactgagactcaggagagctagtaactggctgagctggacttcaagcctgttttcctgatgccaaactccagagttctctgctaactctcactgtgctctgcagcctctgcagaattcgagggagaagagcttaatagaactaggggcaaacagaaggattcattcaccacccatgacctgcctcagtctaccctccagataacttggctctttgtcccctcccaccttcctcaatctcaaggggaccttctctcccagcctcaactcacctatattcccagcaggtggttgcatcaggatctgtcctgaggaggcacctgggcaatagccctgcgatgtgcccccgctggggccacagggaaacataaagagagagtcttcgggcggtggaagcgtcagtgaactgggcatggagaaggggaaagtggggaggtagggcaacttgggctgaggggactggaaaagcgggggctgtggagcctgggagaactggaagggtcctggctggttgctctgttggtaatcctggggctccagctcctccaaatatgaacaggggggtggcagggtgatgctgcaaggacagaggaacagctggtgaggtgcaggggtgggggagctccccgttcctaccacagtagcggagtccctacctctcgcctcctcctcatctccatggtaagcccagccttgcaaggctgctgcagctgcctcttctccccactcccgctcctagcatcttacccttgtttctgctctattgctgtgatcccctaggtcattccccagatccccttatccctttcatccccatctcctgtaccactctgtgctcctctcagttaaccctctcctctctgtgtctatcttctctccatctacacccccctacccccacccagataactagagtgacctacccccgtaggttccttaccttgtcccccaggacccacaggggccgtccttgtggctgctgtcactgccagcaacatccatcagcagtggcatcagttggggggtgtggacagggccaagggggaaaggaagatcggcccttcgcacaggtggggggctgaagagtgggggggtcaccaccctctgagcaccctcactgggttgggtgggggccaaagtctggtcagaagtcagcagcatggggggctctaggaacagaaggcaaagaggtgctataacggtaaggaaatgggaggcaggtttggcatcgctgaatggtagacacaagccatgcccaggtccccctgaataggccctgctggctgaaacactggaggactccagtcactcccacctccatcaaacaaggcctgtcttcactatctttagttgccattttcccccagctctgaaggtgggaactcacctggaaaggtatccagaggggactcctgagggaaagggtcaggctttggctccatgggcacagcaggtaggatctcagctgcagagctggaggcaggaagaatgaagactgtagctttggtggtctctggatttgcacaggtgcctcattgccaggagagacaccaattcccaaactctgcctcctacagggcattggcaacttcccgatcccatggcagccaaaatccctctaaatcttagctggcaaccctaggactcatgcctagccttccaatggtctccttctagaccctcaggatcccagcttggaccccacttctacccacagggatgatacagaaagaggaagaattctgacctgcattgactgctggcagggccaggggctgcaggattgtccttgctttctttcccattcagtttctccatttttcgccacttggcccggcgattctggaaccacacctatggggggaaaggtgcttgaagaactggagaagaggggcagagactgaggcttaggtcctggctgttgcacaaggagctacaggactttggaaggtcactccagcactctgcttctgagccctccgtcaggctggttttatcaaaagtctctgcagtgccttcctctcctaatgctctcaggctgtggcactctggaaacagtcagggacacagccacgtctgaggcctcaattcagctcctacccaggctaccgctgagcgctcactctgcaattcgagtgtttcaatggtgggccctccgccactccaccctgccaccagtgagccggccccctttaccatgatgcgctggggggtcacccccaccgtctgggcaatctctcggcgtttatcactgtcaggatagtggtcttcttggaatatcttctctagctcctccagctgatctgaaagaagaagaaacttgtgtgaggaggacaaatgccagtgacaggtaggtgaagagaaagagaggtgctcaccaagtatctccaacagatggggccactgcccctaacccaacactttcccaaagcctttttcctattgggctgggccttctcgctcttgggtgctacagcagagagcagtatgtttactttctttactcttctaccctggtcccaacatcattttctttttttcttttttagacggagtctcactctgttgcccaggctggagtgcagtggcgcaatctcagctcattgcaacctctgcctcccaggttcaagcaattcccctgcttcgacctaccaaatagctgggattacaggcacaggccagcatgtctggctaatgtttgtattttcagtagaggcggggtttcaccatgatggccaggctggtctcaaactcctgacttcaggtaatccacctgcctcggcctcccaaagtgctgggattacaggcatgagccactgtgcctggctccagcctcattttctgatgtgataacccaaccttccctctgagggtcagagatagttgcactaccgcggcccaagagagaatccgggacgaagtgacatacaaactaaccccatccctcaggtctcctgggggtagattcttcacacagccccacctttccccaggatgaccccagatctcttcggtttcctctctttagggacttacctgagcggtatagggttcgtgtctttttcctaatttggcaggtcacttccgggggcccctgcttgtggtctctgttttggttgctctgcgccaatgtactgaggagattggccaggtggcagggcccccggcctgacccacagggcactgggttgtgtgtggcacgggctgagttaggggcacccggagatgatgttggggccagacccatggcattaggctttttctgcttcccgggggctggagaataggacctctttcctatcttcacctctcccactgggagggaacaatcttccccctgagtctggggcctggagcgggctagagttctgtctttgtggggagccctggagcgggggggcgggcacagtctcccagcatcagccccggtggcttctccagagactgctggcggcttcttctctcctgagatggtgcaggagggtggcagttcctcactctgagtgtcctgagcatgaggggctgagccccggagcagttcctcctccccgggtcctgcagccaggggcttctctccagctttctggcctgtggggagccaacatccactgaccttagcaccagggagaaggaagaactggaccaagaggaagtgctgcttcctgctttgcaaacggtttgatcttaagctttaatttgtctacctatcaaatggggtaataattccacacttaccttcctagcttgactattgtgaggattaaatcagataacccaacttctttgaaaaatgtagacaaatttatgcaattctgagacggcgttagctcatggtatctcctaatttgggggtactcaccccttgtgagttcccttttcccagacaccaggggtatgagtttgagggactgttcaggtatctctaagggatcatgttggggctgcggatggaccaggaagacaaagagaaacagattgacagagattctgcttctcccaaggcgggatgctgtttctgctgcacaacaggcattattgcttggagaagggacaagaaaggattcgattgtctccagcagccgaggcaagagcatcaaaagagataacagggagaaccatggaactctgtctctgccaactctcctcagctccatacatgcccccccgcccgcaccccccaccccactaccatccagcacatccacttcctccccctccctgcaaagcaggatctcactctctggtaaacctctctttcgagtaaggaaactgggacccagctagaactaaaaaccctaccactcatccctaaagcttgccttcctttctgtgagctgactgatgcattgggagcttatcatgttccaggcatggcgctaagcacctttcaaagattagcacagtgcatatttaatctctgcaagaacggcactgctaatattcccttctaacagatgaagaaatgaggatgagacagcagagtaatatgtccaagatcacacagcaccctgagcacgtactctgtgtacttaatcaccacatggagtccttcctggggccatcaaatgatccccccactttcacctcccaactgactcataactccaagaaccctcagctcagggagctgctttatcatttccaactaaattggaacatttgtaatgaatgctaagtaacgactaagagctactgttactttaatgaaaattgcatgagataggtcttaaggaataacattttttttttttttttttttttttttgagatggagtctcgctccgtcgcccaggctgcagtgacatggtgcaattctggctcactgcaaccttggccccctgggttcaagcgattctcgtgcctctgcctcccaagtagctgggattacaggtgtgtgccaccacacccagctaatttttgtatttttagtagagatggggttttgccatgttggccaggctggtctccaactcctgacctcaggtggtccaccagcctcgccctcccaacgtgctgggattacagacttgagccactgcgcctgaccctaggaatgactttgtaacagagtgtcaaggaaaaaggtcatggtcaagggtgctgttccaagtcctttcctaggacacaggctggacccgacttgcatgagagggtctgggctggtgaagagggtgagcaggcctctatggagtgaagggacaaagctggctggtggtgtggggaagcagggacaaatttgttttacagcattttaggagagcttgtactgtagcaaaaagcctggtacccagcactgtgggtgctccgtaagcacgtgtcctatgggagtgatgtgcgctagtaagaaggggacgggtgtcagacctaagactagaagggtcctggggctcccagggttctctcccctgcgcgctgggagactggaggcgggcagggggcgcgggggagcggggaggggggttgcaatcccaaagcacagggggcagtgaggtcggcctcctcccaccctaccccacccgactccacccggccctcggcctactgaagctcttaggtcggctaacgctgacctggtgatcacaggcctccccccctccccgaacccccaaagcctgaccccctcgcacgacggggtctccacactcacccagcggtccctggcagggattctctgtgggttccatggcctggactcccgccgccgcggccggcccgtgatgcacaggcgcggcctaatgaagcctcgccgggcgggcaggtgtgcagcccgcacgggccgggccgggccgggggagccgtagcccgaggctgcgccccctcacccccacccccacccccagggcgaggccggcccgggaggctcggctggggcagctgcgagggcggggaggacccgggcctgggcgccgcctgctccgctccccccagccaggagcccaggcccaggtgcgggtctccttcaggcggcccctcccgtggcggggctggagggcgaggctggggtgggaggcgggagcgaggctacccggtggtcttcggggggctgggcccagccgtggggctcacccacaccctatggaggactcagtcctggatcgtggctaaagcccttccctgtggactgtggaaggcgatttctagagccactcctcaaaggggaagcgctgggttgcccaactcccatgctagggcccctccaagcctcagtattaaggagcttcaaagtccccttcctgattttgtttgtttttgtttttgagacggagtcttgctctgtcgcccaggctggagtgcagtgggggatctcggctcactgcaacctctgcctcccgggttcaagcgattctcctgcctcagcctcgcgagtagctgggactacaggcgcccgccaccacgcccggctaattttttgtatttttagtagagacggggtttcaccacgttggctaggctgggctagaactcctgacttcaagttatctgcccgcctgggcttcccaaactgctggaattacaggcgtgagccacagcgctcgccccccgtactgatttgagggtctccagagcacaaaggctgcaccggatgatgaagaaggagctgaaagagccacagactccgtagatccggtacagtccacacacaggaaattcaggtacagccaggggcggccctgccagggacggtgtggttactgtgtttccatccatttggtgtttcgattttattctctgagaatggaagggactttcttgggggagatctcacaggggtgcagccttatgattcctggttcacggaatgtttcttactatctttatacaaacaaaatcagaatttaaaaattcttgcctcttctgagcggggaggggtagaaagtcggagggctggtcagatagaaacaggtgcttggagctgggtggggagcggggcggcctggaacagaatccaggtgttttgctttaaggatttaaaagactctggacaccacgtgctttcatgctgaaatcagctgtgggtacattttcctattcctttaattgccttgaggggcttggcctacacatgtggactttggaggattgtgagacctttagttctttctgaaacacaaaaatgtaaactaacttcgaatatgatcaagacttcaggcatctgctgtttcattctgatgccttccataaggcggatagcttctgttttatgaggcgttcagatagatggggcccagtttctgtgctagaaatgaagcattccaggacaagtgagcaagcagttgtggggcactgacattgcttccaggatcatttgatggtgaaaaatcaggaccatttggtggcgacatggtaaatggaacccaggcacgtccttgctcacagaagcttactggtggagggaagatcatcaaatgatcatgtcagggtagtgtggtcagtggtgagttagaagtatgaaaggctactatggagtacggaggagcaggaaccccttctggactaggatggaagcttcttggagaaggtgacacgtgggctatgagctgtggagtttaccacatcacagtcccgcttaaaacctgacagtgacccctgactgccaggatgaacggcaagctctgacatctgggtctttcccctggatcctcagctcccctgtgttgcccacctgggtatttcagtggtggtgtgtgtatgtcttttttggcctaatgtttctcaaagaatgttcttaaaaccccctggatcagaatttcttagggaatttgtttaaaatgggggttccaatccccagaaatcttaattggttggtccaaggaggtacccagaaacatccatttgaatcccctcaggtaatttttgtgcgtttcagagtttgagacacttttagactttgcaaaaactaagtcagttaaaaactatcctggggataggagtaggggcaagggatggtaggggcctgtgtggggaaaggaaatgaccttttgccctttactgaggtgtctgctgcagtgagaagcgggtgcaattaatttcttaacagattatcctgtcacattaaactgaaaataagtcatccttctctgccattgtttatgttgtatttcctctctctagctggctcccctctgccagggtgaaggtcagaaagcaaagatccaaattgcccataggctgtatggcacccttccacaaactgaaagatacagggtctgagtctacaatagatttgcatagggacttagagaatttaaaatattggcatttttccagcggggcacagtggctcatgcctgtaatcccagcacgttgggaggccaaggtgggcagatcacctgaggtcaggagtttgagaccagcctggccaacatggtgaaaccctgtctctactaaaaatacaaaatttagctgggtgtggtggcacacgcctgtaatcccagctacttgggaggctgaggcaggagaattgctggaatccaggaggtggaggttggaataagccaagatcatgccactgcactccaacctgggtgacagagtgagactccgtctcaaaaaagaaaaaaaaaaaattggcatttttccaaacatagaaatgaggtttttttcccccacaaataatatagttggatgttttgtttatttacatgaagaattttattggctgcaagtgaattttatctaagatgtacattgcatgggaaaatgtctggtgagttttgttgggaaggtgttgtgtttttgatatatcttgttaagtcatatcttccatggatcaacttcaagtgaaggaggtttgctatggaagttaaaatacgggctagagcaaagagacggctcaattatatagaggacaacaaggtattgttttaggggaacttggggctgtttcttcctaagtcctgtttggttgcatttcatctttgtgatcagctgactagttcatagcctaactcaactttgtttagaggacagggaggtatttttttttaatttttaattttttttttttggtttcttagttttcagagctagactttacaccattaccaccatgcacttagaaagagtcatttcttccaaaatctttttttcccctcacagatatgagaatgccagaacaaaaagaaaggtgtctgatactaaaaaaaaaagtagttaatttttttcagtctatgaagagtaagtgaaataagtgttcttgatccttctccctctctctctataatgagaaaaataaccagaagaaggcggctgattgagaacattttttgaagcaaaaccacaaggtaatgtgttcttgttctatgggccacaccccagtgtaggcagcatcaggtcattggaacacctaggaccagaaaggcaagaataagttgtgaaagacaggcagaaatctgcagggagattgtagtcacagccagggagatcgtagtcacagcaaggtatgggaggtcagggcccccggaaaaccaccaggaagagatgacctgtccaaagcagagagagcgaagggaagcctgagccaggcacgtgctcagggaccggcactgccagagcccgggcaaatggccagatgattggataaatactggggaccgatgacagggaaaaagtgaatggtcccagagactgggagagacactggcaactgccaaagtatctgcccaggggcttcctttgaaagcccagaaaaggatggtttcaggttgcctgtgaagggaattaggaacacctggctagagtggaaactgccgggcagggccaggacaagttctggcgtgaattagcgttgtaacttctaatgcccttgccccagacactcaggataatctgcgtttaacaagaatggtgactgtgttttaaacattctgctgctgctgccattgtttacaattaatcgccactgctggtgttttgtaatttagaatgtactttcacatccattctaattctcctgatgtgcctgagtctgggatgcactttcttctttctattctattctagtcttctccaggattgcaatcgctgtgctaattatagcatggcattcaaggacccctcaaaacccggccccaaccttcactcaggcttcctctttggccaccaccactcccctgccctgccccaaagtctcccccactcttccaggtttttgttccaagcttttaccctttagaaatcgccatgccttctcagggtcactgatcaagctgtatatcagcatgaaactttttttttttttttttcctggcaaagtcttactcatcctccaaaacccaacccaaatattccctttctggggaagcctggctcagccttccacagccagaattaactgccccctcctaggtcctccccttgtactgtgtttacatgtatattacatcactgcatacaggctgaactgattagcgttttgtgtattctccactggattgggagttcttagatggtaacatgcatctattcaggcccggtgctttcttcttgctttctaagtatcaactcattgaattctaacaacctatgaagttctatcatatgattatccccatcttattgaagaaaatgtagcataaagagtttaatacttctccgaaggtgacagtggccacctcagatttgaacccagttagtctggttcctgcctgcactcctaaacactaggctacactgtttatttgattgtatccatcactgtactggcatagtgaatcccgcatgggggatggatcattgttcagtgacaaaaagttgaccattgccaggagttagggagcaggggagggaagtggctgtgagttcaaaagcgtagtagcagtgatggaaccgttctgaatcttggctatagtggtggttccacaagtctacacacaagataaaactgcacagaactaaatacacaccagtgcatgaaaactggtgaaatctgagtaaggtcacagactgtatcaaagtcaatttcctggtgtggtattgtactggcgtgacagaagatgtaaaacggggaaagtgtatatggaatccctgtattatttcttacaactgcatgtgaatctacaattatctcaaaaagcaggaaaaaagttgatcctagtgttctgaccacaagtttggttctcctggacttggttaaatataattcacagaaataatgttttggtatagtagcattattaacttttgcttaatagtaactttaaaatatagatttaaatgatatctacacctttaacaggggtgtgggtgagcaagcaggagaatttatatctaatttgttctaaaagtaaaacaataacatgtctcataataggaatgcaaatttattagaaaaaagggtaaataccgaacaactgaaaaatgaagaagatgctatttctcatcaaacaacagtatcggttattaacaatttggcacatttcctcacagcattttttccattattgctgttttgtatatgattttcatgattgtaattacactccatatataatttcaggcatgtctcccttaaaatgtactatgaaaagcacagttctgtattgtttcaaagtcttcagaatttattgagtggcagtactgttatttaactatttttcaactgttggagcaatcttttgaacttaaatattatacgttttaaaaaattaaaaaggcaaatttgaaatacagcttgcatatttttcccttaatggcttttaaaaaataaaaacctcttccacttggttattcatctccctctagatttttttaatagtcccaaacccatgagaagccatgaggctgtttatttcacaggaatagacaggctgcctggctggcaagtggatagctaagcgtaacttcaagaaggggtccgggattctaaggtcgtaaacctgacagccagcagggcagctttagtgagaggcaagaaatgtccctgaacaaggtattttttcctcctttggtatcttgggtctgtaccagttctgctggtggcttgatagatttttccaatgtttgagtctagggtcactggctcccaagaggggatgctctaccaagagtcctcagtgtatgggaagacaactctgtcttctgttcagagtgtggtgctcacaattttgctgttgcttccaggacatgagctcaccctcctgggctttgaagccatccttgtctctggtgtcccaggtaccctccaggtctggtgatgttagtgtcaaaaggagagccatgtcatggccagcaggttcctctatccttttggggcaacacactttaagctcactaactttatggtgacaattctagatctgtaaaattgaagatactcgagcttgtctttaaatatctcctttgcttgatgtcaattgagggcaagatcagtagtgtgggttagaagctgggagcagcttcctttgcacggaggagagaatggtgaaatattaggcttgcgtttagtgaggcgtagagattaaacaatgatagcagactagattgattacctgacaaataattaggcctgcaaaacctgtcattccgttgcttggaaggaagcaatcaaactggataggctatgagatccagcctttgttttgcaaagggattctgatcgtttctgttttacaagctgcattgctgtatgctgcacatgttattaaggtggtgcaaggcagtgcaggttgtgagtgggcaacctggagctcagtcaggctctcattcagagcagtcctaaggaaaaggagagcagagcaacagagagggaaaagccatatttggaactagagatgtactagatatcactggatatgcattcttgagtcaggagacctagtttatgatctgagctcttagagatcctgctccaaggtccagttcttcagcttctcggttgatgtgggctcctgagcaagggaaacacatctctcaaacttaacctgattttcaaactgaattcctgattcccacccgcaaacttgtcactcctcctgtcctcccgatctttgtatcctccacccagctggaatcacccttgatttctctctcacacacagcatctatagaaactgccagattattcctgttgccctctttttactcccagcccactgtcacccattttccagagatttgcatgtgaaagtcttaaaatgtaaattaaggccgggtgcggtggctcacgccggtaatctcagcaatttgggaggccaaggcaggaggatcatgcggtcaagagacggagaccatcctggccaacatggtgaaaccctgtctccactaaaaatacaaaaaaattagctgggcatggtggtgcacgcctgttgtctcagctactcaggaggctgaggcaggagaatcacttgaacctgggaggctgagcttgcagtgagccgagatggcgccactgcactctggctacagagcaagattctgtttcaaaaaaaaaagaaaaaaaaaaaaaggtaaattaagccatatatgtttttctcctatttgtatgcttcagtgattttccagtgtacttacaggaaaattaaaacttcttgctgtggtcctgtgtgatccggctccggtttaccaccccagcttcatctcaggtgactcttctgatccttcaagcacttgaaatagatcaaattttcccatttcaaggtgttcacatatgctgttcctgtgcttggccaaactattctctttgttcttgtgattagttcatagtcaggattgagtttaaatggtatccctcaatgtcaagtccttcagccacattatctgcttaacatctgcctcctgatactttctgtttccattacaactcctaacacaacatataattatatgtttatttgtttacaatctatctcttttactatattttaagtttcatgggtacagaaactatcccagtttgtttcaacaatgtatacctgtgtataggacatatctagcacagtggctgggctctaagtgttaactgtttgttgaatgaataaatgaactaataatgtggaccttttagttggaaaaaagagaaaattatcagatttatggcacaaatggcagttttgggaaattcacaatttgatacattacaggtatttggtaagcagattaagttacaatgcttcctgaaaatatggattggccattttgagaactgaagaatccagaaactagggataaaatgtggcattttaatgtccattctagagaatataatgagacttgcattacactttggtaaagtccatagtcaccagaggccattgcttttcagaggctgagaagaaaagcaatagtcagagctacagcccattaaggctgttacagtcttcaaagatgggcacagacaacaaaaaatggctttgtaggcaacatatagttgaatcttgctttttaaaattcagtctgacaatctctgccttttgattagggcatttagaccacatataaaagttgttgagcctgtaattccagtactttgggaggccgaagtgggtggatcacaaggtcaagagatcaagaccatcctggccaacatggtgaaaccccgtctctactaaaaatacaaaaattagctgggcgtggtggtgtgagtctgtagttccagctactcaggaggcagagtcagaagaattgcttgaacccaggaagtggaggttgcagtaagctgagatcgctccactgcactccagcctggcgacagagcaagattctgtctcaaaaaaaaaaaaaattattgatatagttgagtttaaatttatgatcttagtgctctttttctatttgtcacacctgttcttatttcctgttttctccttatttttgagtcattgaatatttttatgacttaattttatctcatttgttggcttattgagtatattattgatttataaaattcattgattttttttttagtgattgcattgggacttaaaagatatatgtttaatttatcagaatgtgccttaaagtgacattaaatcacttcattgaaatataagaaccttacaacattagacttcttctttttttttttttttttttttgaggcagagtctcgctctgtcgcccaggctgaagtgcagttgcgccatctcagctcactgcaacctccgcctcctgggttcaagtgattctcccagctcagcctcccgagtagctgggattacaggtgtgtaccaccacacctggctaatttttgtattttcagtagagacaatatttcactatgttggccaggctggtcttgaactcctgaccttaggtgatctgcccgccttggcctcccaaagtgctgggattacagacaacattagacttctgtgtctcccctctcagcctttgtgctatcattatacagttttcttctatgtgttataaaccccacaacacattgttattttttatttcaatggtcagttatctttaaaaatattttcaaaataaggaaaaagagtattctgtatttacttacatatttatcatttccagtgctctatccttcggatatatccaaaggatatcattttccatgttaaagcaatgtcttcaagatttcctgtagtaaaaatctggtgacaatttctttcagcttttatatttgtgaatggtgtttattttgtcttcatttctgaaagctgggtatagaattctatgctgatatgttttgttgtttcttgaatactactatgaagatgttggtccattttcttctaccttatataatgtcactaaagaaaaagctgctatcacaattcttatctttgtttctctgcacaggtgactttttgtctttagctgattttaatattttctctttatcactaattttaaatagtttatgatgtgccttagtgtagttttctgtatgtgtcttgtgtttgggattcatttagcttcttgaatttgtgagtttatagtttccatcaaattaggagatttttttcattgattatttcttcaaatatttttttccatccttctctctctccctttctttggggccaccaattttacagatattagccttttgaagttgccttatggttccctaaggcaactgtttttttgtctctgtgtttcattttggagagtttctattgctatatcttcaagttttgtatttttttcttcttcagtgtctgtagttattatatccagtttgtcatctcagacattaatttttttcatccctagacatttgatttgggtgttttatatcttcaatgtctaaacatgcaaatattctcctttatcttcctgaatagatgaaataaaattatgtaactgctttaacgcccttgtctactatttttatatctatttctatcaatacttttgtctagattatggctcatttttttctgctgctttgcgtagctggaagtgttttattagatgctagacattgtaacattgtgaattttaccttaccggatttactgtgtgagagggtgtgtgtatatgtaagtgtgtgtgtgtgcttgtgtgcttgttctgtatcctgttacttggaagtactatcaccttttcaagacttacttttaagttttttaagatagagagggattccaactaaggctaattttccctgccaaagcaatatcttctaaatactccacccaatgccccatgaattacaatgtccttccactctggctggtagaaatccaaactattcctggccctgtgtgaacttcactggttattttaccttttctttttcattggttctttcctcgctagggtagtttcctcacacacatgtagtaattagtacccagctgagggttctctttctccatccttctctccttcagctcctctctgggtggtgctctccttcccagtacccaccttcgtcttcccaaattctcaattctgtatcctcaactcagctagaccaccctctggcctgaaatctggaactttcctctagacaataagccacagtaattgtgggctcatcttgtttcctttttctcaagaatgattgtctcgtactggctgttgtgcaatatctgaaaaccattgttttacatattttgtaaagtgttctaattgtttgggatggtagggtaaatctggtttctgtttgcccattttggctggaagatgaagtgcccacaaactgtacatattgactagttctccactgtgtacaggataaagttcgaactcattagtttagcatacttagtacattacaagcagacttcatgacaatctcctacccacacctcacccacttctagtaactcaagacggcatgccacctcttgaccatatccatactttttcatgtcttagtgcattgcacatgctcttgtctttgtctaggatgactttattcccctgtatcttccatctttccaaatcccgcttgttcctcaagacccaactcaattaccagttcttctgttaaattttaccagacctgagtgttagttgctacaggatatgattttattatgttcttataacactattatagagtgtctttatttgacttacacacctgatggagatgtcttcatctcctcaagggcagtaacctcgacatcttattcacattttcatctctcagcctagcttagtgcctgacttaggttcttggcaaatgtctacttctgaatgaatgccctgtcatagtgcataatcttgctttctgaaaatagtattggcttgcttatttggaggcatgtgggaatgattaaaaaaataaaataaaacttggactggaatagccaccatggtctagcaggtgttctgtgttatgttaatcacagaggatgctgggcaggtgctggttcccttctaagcctttatctcagcattaaaacaattcatagccaatagctgggatttttctctcacagatggtggagttctgtgacttatgtctgggagaggtaagtgcaggaagagttgttccttggaagttccataaagggaatataatcacttccaaagcatcagcttcaactgaaagagctggaatcagctacttctggcctgaccaaagccagtatcttagacagctatgtctcaggtatgccctgaactgcctggggcatgtgtctcaggataatgtatattaaggattcaagattcttaactgttcttgaaggctaacaatttaggaaagagcaaacattttagaagcccacctccttattcaagatggagaagagtaatcagatatgtctctgaataaaacaaagtccaccagaatgttaaacacacacacacacacacacacacactcacacactcacacactcttactcttactctctctctctcttctgagtttgtttacttgcctgccagacaaaggagtatacactgtcaacaaaattcactgaatacttaatgggagggggtcagggtgaggaacaaaaggctttattcactagaaaagggcttcaaggtggttatactaagtagtgattgaaaactccctctctgaatggaaaaaaatgagttcttgtccatacatgtttggcttaatcatgtcccattttagaaagtaatctgtactttggtacactgaggttctgacataccagattactcacaattctgagtcctttatcagcttgagatgttggcttgctgaaagttcatggctgttcagtgacttcatctgattggaaacagttttgatgaacccaacactcagttttgacttcttctatgcacatgtagctataagtgtaaaattgtccttttatagatgtgatcatgtaatttatcccacgttgaatttgggcagggggcatacctgatttagcttggagaagggcacaacatgaactgtatattggtgggcgaaaattaatgatatttgatatatataagactctaaaaaatataatttatcaaatgctgaagaaaagaatttgggctttgcagtaaggaagacttagttttgcattgcatttctgaacatattcatcttaatctgtttttttcatataaaacaaaatatcagtcttatcagctaatgggaagattaaatgagatgatgtatgtaagcaactcccacagtgtcctactgtgtccggaatcggtgggttcttggtctcactgacttcaaaattgaagccgcggaccctcgcagtgagtgttacagttcttaaaggcggcgtgtccggagtttgttccttctaaggttcggatgtgttcggagtttcttccttctggtgggttcgtggtctcgatggcttcaggagtgaagctgtagaccttcgcggtgagtgttacagctcataaaggcagtgtggacccaaagagtgagcagtagcaagatttattgcaaagagcgaaagaacaaagcttctgcagtgtggaaggggactcgagcaggttgccactgctggctctgccagcctgcttttattctcttatctggccccacccacatcctgctgattggtccattttgcagagagccaattggtctgttttacagagagctgattagtccgttttgacaaggtgctgattggtgcgcttacaatccctgagctagacacaaaagttctccacatccccactagattagctagatacagagtgtcaattggtgtatttacaaaccctgcgctagacacagagtgctgattggtgcatttacaaaccttgagctagatacagagtgccgattggtgcattcaaaatcccttagctaggcataaagattctccaagtccccaccagactaactagatacagagtgctgattggtgcattcacaaaccctgagctagacacagagtgctgattggtgcatttacaaaccttgagctagatacagagtgctgattggtgtatttacaatcccttagctagacataaagattctccaagtccccaccagactcaggagcccagctggcttcacgcagtggatcccgcaccagggccgcaggtggagctgcctgccagtcccgcgctgtgtgcccgcactcctcagcccttgggtggttgatgggactgggcaccgtggagtagggggtggtgcttgtcggggaggcttgggctgtgcaggagcccacggcggggtggggggctcaggcatggcaggctgcaggtcccgagccctgccccacggggaggcagctaaggcccagcgagaagttgagcacagcatctgctggcccaggtgctaagcccctcactgcccgagtgtggggcccgccgagcccacgcccacctggaactcatgctggcccgcaagcgccatgcgcagccctggttcccgcctgcatctctccctccatacctccctgcaagctgagggagctggctccggccttgtccagcccagaaagaggctcccacagtgcagtggcaggctgaagggctcctcaagcacggccagagtgggcaccaaggctgaggaggcactgagagcgagcgagggctgtgagggctgccagcaggctgtcacctctcaatcccccctctaaacaggacaccccaactgctgttgggaatttggccgatgaccgctctagctacttcctgctggataggggcaaagaaggggccctgcagttgtagtgtcctccagaggggaactctctaggccagtggaagtgccagtggatcggtccaggggtccttggtagaagttgttagttgaactcatttggggttccatttgtaagaccatctgtagcttgatggcttcgatcctagaggaaacaaatttgacaagaaggttaaaaatacagggcccaaaggcgagtaacagcaagatggctgccatgggacctagaaatgggagaagccatgttgcccaactccagaggttggtataagagtttgaaaggcattgtctgatatcagaagccctttcctgtaaatgccaggtggcatctcgtactatccctgactggttagtgtaaaaacaacactcttcccctaagaaggtgcagagtcctcctttctcagcagtgaggaggtgtgggcctcggcggttttggagagtcattgctgccaaagagtctaattgggattgtaaagtaagaatagatttcattatttcttgcaaactgtctgagaaattctttgagagtgtatggtagtaggataatgaagtagataaaccggctattccagttcctgtagcagtagccattcctaaccctataaatagggatattagttgtatggctctgcactgacggactttagctttgacaggtaccaatagggtctgatttcctggggcaatgttaatgttgggacttagaaagactaaggttcaggtgcctgtccagttagtggggaggcagatataggttgatgttccacataagaagaatatgccttggctaggtagacagaaatttaccctggcttttaaaggaatagggtatactgttttttctttactacttctttctctcttcaagttcttctttgtttcttcctctctttttttctttctctgactttctctttttttctttacttcttgctggtctttccctacttctgccagccacttttgctgctgttttcccctctccttccccattttgatggctttggcagtgtaagactgccacctccttgtgtttttgcattgggtgcaataactctataatttccttgtggtatttaatggtggttgccccagaggttaggaactccctctctttccatattgcagcataggcatgtaggattagataagcatacttgctatctgtatacacatttattctttttccctttcccagttctaaggctcgggtaggtgccactagttctgctaactgggcactggtccctgggggaagaggcttactttcaagtatggttacatcactaactatggtgtaacctgcccttcgtatcccattctccacaaatgaacttccattgatatataggttaaggtcaggattagctaaggggacttctaagagatcatcttgggtggcataagtctggactataatttgttggcaggcatgctcgattggtttcccatcctctgggagaaaagtggcagggttgagggccatgcacatgcatatttgaagcaccggtccctcaaggagtagcgcctggtatctaagtaggcagttatctgatagccataaacttcctttggcacctagtatgccatttacatcatgagtagtccagacagtgagatcctttccttgtattattttgatagcctctgacattaagacggccactgctgcaactacccttaaacagtgaggccagccttttgctactacatcagtttccttacttaggtatgccactggttgtggggttgtcccacaagtcagtgtaaggactccaagggctatcccagcaatctctgtgatgtagaaagagaagttttgtcctgtgggagggcttaaagctggagcttgtactagggcctgctttaaggttttgaaggctgtttctgcctctggttcccattctactagatgagtatttgccctctgggtttccttgattaaagtatagaggggcctggctatctcactgtatccagggatccatagtcggcaaaaggcagtaattccaaggaacccccgcaactgttttaatgtcttagggtgaggataagccagtataggctgtattcattccttgctgagggccctggtccctctggaaaagattaggcctagatatttgacctgctgtaggcaaagctgggccttcgacctagacaccttgtacccttgattagctagaaagttcaagagatctacagtagcctgctgggacgaggcttctgaactggtagccaagagtaaatcatccacatattgaaggaccagagtgcctggacttcagaagtggcctagatcttgggccagtgcctgaccaaacatatgagggctatccctaaacccttggcacaagaccatccacataagttgggacgtgtggtctgtgggatcctcaaaggcaaagagaaactgggagtcagagtgcaggggaatacagaagaaggcatccttgaggtccagaaccatgaaccattctgcttcctctggtatttgagagagcagggtataggggttgggtacaactggatatagaggaattactgcctcattgatgagtctaagatcttgcactagtccccactgaccattcggtttttgtactcctagaattggggtgttgcagggactgctgcatttccttactaagccttgagctttcaaatgtttaacaatattctgtaatcctttatgagcttcaggccttaagggatattgcctttgataaggaaaagtggtgggatcttttaacctgatttggactgggcgggcatttttctcccttccaaattgtcattccaatgcccagacctcagggttgattccctcctcaagtaggggacaacaaatgggtaacttgttccccatattcatgtagataatagctccggccttggctaatatatccctccctaataagggtgtgggactttcaggcataacaagaaaggcatgtgaaaagagcaaagtctcccaattacaactgaggaggtgggagaaatacctggttacaggctgtctcagaattcctcggatggtaacggaccttgaggatagtcatccaggacaggagattaacactgagaaggtcatgccagtgtccaggaggaagtcaatttcctggccctcaatagataaacatacccagggctcagtgagggtgatgacatgagctggcgcttgccccaggcaccctcagtcctgttgttggatcatctggttgggggcttctgacccagggaaccttcatcctctggggcagtgcaccttccagtgattgcctcggcattgtggacatggatgagggggcagcttgtttctcattggacaatcttttttaaagtgtcctagtaaaccacactgataacaagccctaccaggtgattgacctgccccattttctgtcctctctgaaccaccagggtttgtttgtctgagggccatgactaaggctgtggctttcctctgatctcgcttttccttttgggcctgttcctcttggtccctattatagaacaccaaggttgccaggtttaataatgcctctaagattttgttcagggcccagggcttgcttttggagctttctcctgatatctgcagctgattgggtaataaacttatcttttagaatcaattgaccctcgagtgattcgggtgacaggggagtatattttcttaaggcctctcatagccgctcgaggaaggaaggattttcttcctttccctgagttatggtggacatcattgaataattcatgggcttttttctaattctccttagtccttctagaacacagatcaacagatgtttatgactccattccccatgatctgagtcaaggtcccagtggggatccatactggggatggcttgctgaccagtagggaatttgtcccttttttcagctgtcattctatcatttactgactaagataccaggtatctccaaactctcaggctgcagctaaagctgcgttcttttcattaaaggccagggtttgaactaacagtagcatgacatctttccaagcgaggtctaaggtttgccctagaccctgtaggacatctatgtacctatcaggatcatctgaaaacttccccatgtctgccttgacctgctttaaatcagagagggagaaggggacatgtacccgggttgggccaaattcccctcctcctgcagcttgaaggggacataaccgataacctgggggtctttgtggtcctttggagatttctttgcttatttccttctgggcaggggagattagaggaggattatcattagtaggaaggggagctattgggaggctgggatatgggggtaagctgagaggtcctcctgtgggatgtaaattgtaagctttgcatagttgtgtattctccctcaatgaaaagaaagcttggatgtaaggtatttcactcgatttgccttccctcttacagagaaggtcaagctgcaggatagtattgtaatttgtacttccctcaggtggccatttttccccatcagagagaatattggggccaagccatagtgcagaaaaaaatgagccacctctttttcagggtttatgggtcaaattggtcccaatagcttaggatgcatttcaagggtgagcctgttgatgcctgagtgtttcccatctgaaagacaaaactgcccatggttttgatttgttttgtttctccccctgcccaagaacccacaacagtccctggaccctgctgatcggaatagttgtgctcaccgacgcagcagcagaaacactagttttcctcccagaccacatggaggaccaaggaaggttggatttagtggcctttaccaatgcattctcaaaaacctgcatccttgcctgtcctcctagaccacaaggaggactgaccaagaaaaatcggatttagtggcccttaccgacacattctcgaaaacctgctagagtcctaagcattctcctgttagtattgggacgttacccctgtcctataaagatgttatgccccaaaaatgaagtggagggctatgcccttagggagggaagggatctccagggttggaatagcgacaccttttgtcctcacttatatgaataggaaggatacaatttctgaggctccccatattctagcttcaggaataggttttgttaggcctgttagtctgaggagggatcctaaaattccaagtagtccccaggacaatggggctttgggcaaaaattatgtctttctgattggtgagcccaggtgcctaaagaaggtaacaaagtcctggagtttatactagaaatcatttttatagaagaaactagaaaagcaccagagacaggtagcaatttttagaagcgggactaaccttggagaagagaggcaagaggaagtttgtctggcaggcattaggacccagggggcaagggtcaggatagataggagagatgggcgagtcttgcttgggcaacatgcctttgagagttccactcatggccgcagggtcaaccaacttgttgtcgggaccccggagctgcatggctttcctctctgtcaaccctaggctcagcccagaagtacaagaaaagtggaagctggttcgaggcacaccaacgctcccaactccaaagagtcgggggttgttagagagccctatcccagaaaacctgacacccatgtctttagtctggcggccacgctagtcgcttttaactggccgacaggtacccggtatttagccccggaattctaaggaaaaataggacagaatagcaagcgaaaggggtccaatggtactcactgcttggcaataggcgattgtcttgccgctcagcaataggtgatggtctcaccgcccacgcctctccctccacacctccctgcaagctgagggagccagctccagccttggccagcccagaaaggggctcccacagtgcagcggcgggctgaagagctcctcaagtgtggctagagtgggcgccaaggccgaggaggcaccgagagcgagtgagggctgcaagggctgccagcacgctgtcacctctcactacctgcttctcatgggataaacagtgaatagctgatagcttttctgtggtgcaaacccccacctacatgtaccccacatatgtgcgtgcctccactgtccttgcataccctcctgcactctttgcctccttctgacaatgtcccttccacttctatacttgcaccccccttttcatgtataacttatttcttgtttctccctaaaaacacactatttgcagatctaaaatattaccttaattcatagtcttcattaaaattagattctattgtaacttcagtacactgttcctgtttattataagattctgaatgcttggtgttggaaataagactgccctgaggaaggcaaatcatcaaatgcatctgcaaaacagttttagatttgggaacatcagagaactagcatcttagatgttcagaaccagtgagtattactcccttcatcctctattcccaatacggggccctacatggcctatggcataattctaattttactcaaatggcaaaggccttctttgatacactgagaacactgtggaatatttggtacttgttgaccaagactgggagatctgtccttctttctgtgcacaggagaaaacagtcatatttgagatcaaggaatttgtgcaattataaaccaacaaatgctcaacttcccataaaacaagatggagaactgggtgccctatttcattaaaaaaaaaaaaaaagcatatcctttgagaatatataagaatcctggatatctggccctgaaatctgagggactttcttcaccattttctcaccaaatctagtttaaagctttctctagtgcatttgaaaggagtgacaaaagtacatggtacaaagtggcttagagtgactgcaatgttgttttgcaacattttaggcaagattgggactgtaatattcattattgtttgatatagtttgactctgtgtccccacccaaatctcaccttgaattgtattcccataattcccacatgctgtgggagggaccaggtggaagatgattgaatcatgggggtggattctcccatactgttctcgtggtagtgaataagtctcatgagagctgatgattttatcaggggtttccactttcatgtcttgctcattctctctttgcctgctgccatccatgtaagatgtgacttgctcttccttgccttccaccatgattgtgaggcttcccgaaccacatggaactgtaaccaattaaacctctttcttttgtaaattacccagacttgggtatgtctttatcagcagtgtgaaaacaaactaatacactgtttgttcaaaaagagccatccattaaagatgtgtacagtgtgaaacttatcaaagagggaaaagaagactgcagtgtgactgggacaggatacgttatgctgcaatttaaaaaaatgaatcctcaaattccagagtcttgaaacaacaccactcatttgtcactcatagtacatgtccatcactggtcagcagggcattctgctgcatgtacacaaaggcccaagctgaccatcttacagctccttcatctggaaagcacatcttcctcctcagccctgccagcaggagaaatgaaggcctttcaactgcctcagcttcttctatctctccattcttcctgaaaacttactatccatgggtccaaaagatgatctttattcatattcctcattgggagaatggaaattgaagactgaccccctcctttctgctcatattttgttagcctgaagtagtctatggtcatgattaattggaagggaaccaggaaatgtgtgagaaaaatggaatggaatatttgggacaacagtattgtctttgcctcagcctgctcttttgatcactgaatgtctatttaccccccatattagtccatttttgcactgctagtaaagacatacccaagagtgggcaatttacaaaataaagaggtttaatggacttaacagttccacatggctggggaggtttcacaatcatggtggacggcaaggaggagcaagttacatcttacgtggatggtggcaggcagagagcttgtgcagggaaactccccttttaaaaaccatcagatctcatgagacttattcactatcaagagatcagcatgggaaaggcctgcccccatgattcaattacctcccaccgggtccctcccacaacaggtgggaatttgagatgagatttgggtggagacacagccaaaccatatcatttagtccctggcccctcccaaatctcatgtcctcacatttcaaaaccaatcatgccttcccaacagtcccttaaagtcttaacttatttaagcattaactcaaaagtccacagtccaaagtcttatctgagacaaggtaagatccttttgcttatgagcctgtaaaatcaaaagcaagttagttactccctagaaacaatgggggtacaggcattgagtaatttcagccattccaaatgggagaaattggccagaacaaagtggctacaggcctcatgcaagtccaaaacccaaaatgatctcctttgactccatgtctcacatccaggtcacactgatgcaagaggtggcttttcatggtctttggcagctctgcccctgtggcttggcagggtacagcctctctcctggctgctttcacaggctggtgttgagtgtctgtggcttttctgggcccatggtgcacgctgtcagtggatctaccattcattctggggtctggaggatggtggccctcttctcacagctccactaggcggtgccccagtggggactctgtttgggcgctctgaccccacatttcccttctgtactgccctagcagaagttctctttgagagccccgcccctgcagcaaacttctgcctgggcatccaggcatttccatacatcttctgaaatctaggtggaggttcccaaaccccatttcttgacttctgtgtatttgcaggctcaacaccatgtggaaactgccaaggcttggggcttgcaccctctgaagccacaggcaagttctaccttggcccctttcagccatggctggagcagctgcaatgtagggcaccaagtccctaggctgcacacagcacaaggaccgtgggcccagcccatgaaaccattttttcctcctaggcctccaggcctgtgatgggaggggctgcccagaagacctctgatatgccctggagacgttttccctattgtcttggggattaacatttggctccttgttacttaagcagatttctgcagctggctttaacttctcctcagaaaattggattttcttttctattgtattgtcaggctgcacattttccaaacttttatgttctccttcccttataaaactgaatgcttttaacagcacccaagttacctcttgaatgctttgctgcttagaaatttcttccaccagacatcctaaatcatctctctcaagttcaaagttctacaaatctctagggccggggcaaaatgccaccagtctctttgctaaaacataacaagagttacctttgctccagttcccaacaagttcctcatctccttctgagaccacctcagcctggactttgttgtcctattgctatcaacattttgggcaaagccattcaacaagtctctaggaagttccaaactttcccacattttcctgtcttcttctgagcccttcaaattgttccaacctctacctgttacccagttccaaattcgcttccatatttttgggtatattttcagcaacactccactctggtaccaattttctacattagtccgtcttcatgctgctgataaagatttacccaagactgggcaatttacaaagatagaggtttaattggatttacagttccatgcagctgaggaggcctcacaatcatgggggaaagcaaagagaagcaagtcacatcttatgtggatggcagcaggcaaagagagagagagcttgtgcagagaaactcccctttttaaaaccatcagatctcgtgagacttattcactatcacgtgatcagcatggaaaagacctgctcccaagattcagttaccttccactgggtctctcctacaacctgtgggaatttgagatgagatttgggtggggacacagccaaaccatgtcacttccttattctcaatttccatagacaaccaaaaagttcaatttgatcaatgcatctggcacccattccaggatcactgagtgctatacaatagtcactatatcagattaggacctggctcttcttggtctgcagatctaagagctaagaagacaagttttctgctgcccatataactagtacccagtggaagaacaagaacagattaacatcaataaacacattctggaaatccaagaatggaagttatgagccttcactcttctgctttattggcctcttctcactagaaagaaggagctcttcttccactttctggcttttttctgctgtctgaaagggatctcatagttctaattataatctatcccactgcataattagtgtaaatgatgttaaagtgtctggtggggaggagagaggcgagtatctttgaaaggggcaaagacatttcccaaggaggaagaggtcatggtgggaacccaggtactgctttggcaaagttttatgcggagggagaggaaccccacagggttggcttagtttgtatctcaggacacccaggggaactgccattccacctgtttttcctttttcaaggctcagtctttcctttcttcttccctgcctcccttacataattctggagcacacgctgtgtgcagacagcccttggaagtggcctgtggatttttcagggaatacgtgatagttcttaccctgttggcaccaacagtctactgggagaaataattataatattgtatgataattcttaaaatagaaatattatcaatgtaatctgggaggagagaaaaggaaatggccagccctagaacatcggtttcttcagtgaactctttattaatttctgtggtattgtgctctcctgaatccttatctcaagaaattatctgactctttgttttttgaatgtgctttctctgtctcatatctttgtagttctttttaatatccagaggaatttatcatgggtctgtttttgtcctctagggttcttcaaatcttataaactgatgcagtatgggaatttatggaaaaatatataagtagctcatagattctagcagcagtgaaaaacaagacttggaaaatggcttagcagaagagaagttcctactccagtaagattctgggtagggcattaccgtgggaaccttgacactagagtggtggttgctgggacatctctcaactctttctgctttgagtctccaattcaacacaccaagtcctgagtggaagcatctaattgacctcaccttgatgtgtgtttacatcctggtcactagagggtagggggagggaataactgacttctttgctcccatagtgaggggtggggccctgctcccaccaagatccacacagtaaaggttcttccaaaataggagagtgtttggatattgaatatatagacaagcaacttctccctgtgtcattgcctgcctccattttatcagaaaattctgattcatcccggttctataacaacagctctgaccatctactcctgtttttccaaatgcattcggggcatcctcttgggtgctccatggcatctaaactcacataggataatgaccaggcacatcattcttcttccccttctcagactgtttctttgagaatcacctgagaaatgagttaaaaatgcagatttcctagacttcctctccctcctctgcaatgctgatttttgagcttctggaggaaagccgaggaatctgccattttcagcaggtagcccgggagattttcagactaataatggctatgctctttgggaaacagggttttcacctattacaaatttttgccaatgttttctctgctgtatctctcaagtcttcccactctattccctaaaacagtatgtcttctctattgcaaagactactttcacgccatctttattattggctttatactgtatatgtcccaccatcaccagtacagaacttctcataggcctctctacctattctgtggcgatagcatcagggagagccagggaaactaccttctactttctgcatcccttggaatttgtctggatttccagaaattgagttttgtgtggctgtttcggttgatacagtatgagataactggaggccgggcttggtggctcatgcctgtaatcccagcactttgggaggctgaggcgggaggatcacttgagcctaggagttcaagaccagcctgagaaacatggtgagaccccatctctataaaaaataagaaaattacccgggtgcaatggtgcatgcctgtggtccaagctactggggagactgaagtgggaagatcacttgagtccaggaggttgaggctgcagtgagccatgttcatgccactgcactccagcctgggtgacagagtgagaacctgtctcaagaaaaaaaaaaaaaaagataactagaaaggcacaggtactgaccatttagaatggatactgaatagaagcaataggtgactgatgcaaaagtggcctgaatcctcatcatagtaaacagtaactctttgactagacttctgtttctgcaacccaacaggttttcactaaggcagatttgcacaagtcatgccataagtcaaattatttgtccatgtgacctggccctgctcaagggatgttctgtatgacctgcggtgaatattcactctctcgtttgggcacagtatgggcacattatgatccagcccttatgatctcctttggatctttcttttcaggcatgatggtttaaaggattgttttgtaccatggaactatccatagaaaattattttcagggttcttctattgttcactagcctggcttaaaagtatagctttactttctgtctttacagtaagcgagaggttagaaggatatgcttgaataaggagactgccttcctctacactgccagtattttattaagagtattagaacattttctttgtcttgtattttatatattgatatgattttatgtcttctctcaccttgaaactttcattgtagattttaatttaaaaggtgaagaggtaggcctcaatttccttgattcttcgaactctgagttggaagatgatggtagtaaatcattggaggcttagaggtgagagagtaccatttgttctgggaggattctacgtcgtaaatttgtacttagatgtacaagaatgttaaacaccaaagaaagaagcctacatgatctctattctcgaccttgagcaaggattagcattgtcctgggcagcctgtaggaacacacagtatcactgctcccttgcgtttgtacactaaagctttgctcttcctggtcagtcagagcagtacaaccaacagctgaataatatgggaacttatcctgagagcttccaatctatttaacaacatacatattaatctaggttcacatattcatattatgtgagaaatactatctttccttttttttttttttttttttttcgagacggagtttcactcctgttgcccagggtggagtgcaatggtacgatctcagctcactgcaacctctgcctcctgggttcaggtgatcctcctgactcagcctcctatgtagctgggattacaggcatgcaccaccacacccggctaattttgtacttttagtagagacagggtttctccatgttggtcgggctggtctcgaactcccgacctcaggtgatccatctgccttggcctcccaaagtgctgaggttacaggctactatctttctttatgttctccaagtcagtctaattttgactttgtaggctatatctctccaggctggcaagaaattgggcatgtcatgctgagtgtttctttgggtcctgggccttatacagaagagactgcctgcttgtctgttatttgtccttatagatcgtcagagacatctgctctccttgtctacacattctctttaggtctgagatctctctgcttaggaaaacaagatattctgggccgggcacgatggctaacgcctgtaatcccagcactttgggaggccgaagcaggcggatcatgaggtcaggagatcgagaccatcctggctaacacggtgaaaccctgtctctactaaaaatacaaaagaaaaattagccgggcgtggtggcccgtgcctgtagtcccagttgcttgggaggctgaggcaggagaattgcttgaacccaggaggcggagcttgcagtgagccgagattgtgccactgcactccagccagggtgacagagcgagactccatccccccctcaaaaaaaaaaagaaaaagaaaaagatatctgtaaactgtaatctgtaaactggttcagtggttctatctctgtagaagcagcacagtcctcttctctgaggtcttgcttctcctcactgacactccccacctcctcagcccagggacagatctttcttttatgaagctccttcctgctgtctgctttcccactccattctacaatttccctcaaaccttgttcttacactgaatcattaacgacaaaaatttagtttctctttccttgagaacacaaggacaaaggctcagaaattgaggggtctatttgcatcttatccttctagtgtagcaaagaaaaaaagaaggctgaaactagaagtctcatatcctaacaaccaggcatttgttgagttcctactatgtataacactcaatacgcattccttcttgtgaattggtgctgatggtagctcaggcactctgttaagcattgaaggcatatggttgtccttgcctacatcaggtggggttcagggtgcagtcaaaaaaatcaattcttgcaaatttaagcaaaaggggctgggtgcatcaaagaagtccccactctccctccaccgccaaaaaaacaaaacaaaaaacaaaaaaaaccatgatgtggagttagccagatgaatgagagaaaacacttaagaaatatgtagaggccaggtactggaaatgaagaaaggcaaataacaatgaataatctaggctctgccctcaaagggctttacagcttggtgaggaaatggacctttatactcataatacaaggcaatgaatgaaaggaggcaaagctagtcacggttcggcttggaaattgcagcatcagggcttttagaagaaaagttggtcttgagcagcatataacctttaaatactaacacagtggtggagctgatgttcaaattgtctggacagatcaaatctgtctggacaagggagaagagagtaggctgccttgcgtaaacagtagaacattctaaatggagaagccattttaaaattctcttccttgaaaccttgtctggtcagtggcaaaatgtcatagctgagtttggaagattacataccatttgcattgattaaattatttttgttaatcagggcagttaatattaacagtgtaatgctacatgctggatggatgtgttgttatgtactattgctacttataaaatagcaacacctgatcaatttggaagaataacttatattaaggtgttcatctgtattttagcatcattgctataaacaaatcagaaagaatggaagctcttatttctttgtggacaactcaatcctctcaccccacacgtcaacattttctttacctaacaagcagaaatttgaacccaagaccagggatggtgacagtggggtctttgctgtccctagagcagatttagaggagtgcactccctcaaatctttgaatcatggtgtggaggaaaaaggtaagggctttgaagaggctgatgggccaaacctggaggatagtttatctgcaatgagaaaaggggtaagttcatgacaccatttctttctctcgttttttgttgttagtttttatctcatgatcataaacttaaccctgcaatccagctagatgtggaagagaataaggaaaatatggaacccaaagaattatagcaagagcacaacgattataggatgctgagagcaaatagggtagaggggtgctctcctgagctacaaaaggaatggtctggtagctaaggtaaaacacaaagcaaatttattagatttgtccacagtcagcagtgatgatcttcttgctggtcttgccattcctagaacagaagcactccatggcttccacaatattcatgccatcttttaccctgccaaagaccacatccctgccatccagccactcagttttggcagtgcagatgaagaactgggaatcatttgtgttgtgtccagcatttgccatggacaagatgccaggacccataggcctcaggatgaggttctcatcatcagacttctccctgcagatggacttgccaccagtgcccttatggtgtgtgaattcaccaccctgacacataaaccctggaatcattctgtgaaagcaagaacccttataaccaaatcctttttctcaagttcttagaacaagactgttttctgaggtctttggaactttgtctgcaaacagctcagaggagatgctgcccaggggcttgctatggcgatgatgaagaacactgtgaggttgaacgtggctagtggcaaggggctctgggtagcatgggtggcatacgcaaatctcccctcatgactatttcatgtgtgtatgtatgtgcatgtgtgtttgtaatctgtgaatggtaaagatccatgccccatttacacattacttcttatttggttaatagaattctgtctgatgtgtgaatgcttggggtggggataggagatgaactctgagatccatgctcttgaggcttatcaagaaggattgctaggcctaagcttagaataatgaaatacaccacctatctgtgaatgaatgatgtgggctcagacagtaagcatctcagcagcagtctgcactaaagattcttatgccccaaacattactgagtttgagtttctcaacatgctggtgcatgagagctaaagatcacatttaatttgattcaggtgttattaccaataaaataatctataaaaaagttgcaagactgcttgcaagggtatgttaaaatgaagaagccaagtttttttttttttttttttttttttcgagatggagtcttgctttgtcacccaggctggagtgcagtggtgcaatctcggctcactgcaacctctgcctcctggattcaagtgattctcgtgcctcagcctccagagtagctgggattacaggcatgcgccaccatgcccagctaatttttgtgtttttaatagagacagggttttgccacattggccatgctggttttgaactcccgacctcaggtgatctgcccaccttggcctcccaaagtgctgggattgcaggcgtgagccaccgtgcctggccagaagccaagttctaattttgaattctgtaaatacttagagctttctgatgtggctatggaatagactggtgtccaatagaactttctgtgatgatggaaatgttttagatctgcactattcagcccagtagccactatatgtggctatttaaacttttaattaaaattaaatacaattttaattcccaagtcacactaaccacatttcatgtgcttggtagacacatatggtagtggcttccatattggataattctggaatcaaaagagtcttctgtatgggtgatctttatagctggtatttgggaaatagttttcaacttttctgctaactctgatagatttatcaaccagaagggtctgcttgaagcattgtgtgggaaggacttgcaatcatatttagatacactgagagagaatgttgtggtagatggtaatctgagtgtgagaatgaggtacagtgctatggtttaattatttaccttttctcattttcaacttttcctcacatcagagagaccgtgtgtgttgagcaaacctttcaaaacctcgcttcccgtgtgatcctgcttcccatccgtttggttcagctgtctcgagacatctgtttctactcttcgttaagggtggggacagtgacagtgagtgcgcccccgtccctatccccacaaatcatatacagttacacacagagtgtactatagttgatcagcaaacttgcctgtgctgttctctcttgcagacttatatgtcggatcctcagagaagactcaggcaaatggaaactgggcaggcaagccttgattacaaggaggagtaaatggtgaaggaaagaaccgctttttctgtcctcattcccctataaaatttacatttttcccccactaagaacaacagtaacatctctgctaatattatgctaccatgaactaacatcttcctttctttccctattttgaacccttgggtgatttgtctggccatcacacatcgtgatttttgaaagaattaagtacattgacctctcgctgttagcatttctgtagtttgctcaaggagtttatttggggaaggggagaggaaaggttcataggaataatttctttttattttactcccttattgtgtatgagtcaattttttccccaatagctatgaccttcttacaataagggaccatcctgcaagtaaggatgtaaagtatgagtctatttttgccccagtagctatgaccttcttacagtggtgtctagaagagaggttgacaaaagccaacatgcaatataggatttattgaactgaggtgcctgggatttaatggaaagccttgtattttaggactatgtcaaggatacactatctgattttctcaacttccatggctaaatgaagattatcagagacaggaacccaattcaggctggactgccaacagctacccgagtcgctgttaagccctggtaccctaataatgccactggtatcaatcccccattttttcagtactttatcattaggatactgttcatagggtttgcagatggtgggcccactgaactgagctgaaaatatagatgtctacctggccaacaagtagtggaaatagacacactacttgtatgtatgtggaatatacaaatcatagtttagtaaggtttgactgccacctggtgggggaaattctgcagtatgttcatttcaatgtcaaaggcataaataagactcaagtcattagtcacctaactgtaggcttggatgcctaagatattccaaaatagttcagttgccttaaaggaattaaagacttataattgtggttgtgttagggcatgtgcctgctatctgcaaatatgattgctcattaatcaagtaaaactcaggcaccagattcattgtcttcgagggttctttccagctctgaggttgtgtcagtcttcacctagactttgagaataaacttgaggccagaattattaagattcttattgccagctggagctaacatacatcctaccaattccaagccgggtgtgaaatctcctagaaaccacccactcttagatctcatggaacaaattagaacaggaaggaatcctcatctctctttatcagaaaatagccctgtaagcaaggagcatgtaaagaagtagaatggaaaagcaggcaagttaagttttaacaatgctaagcacctgatagattttccttaagttgattcttttttttttttttttttaccaatgtctgaaaaaaaaaaaaaaactacacaaaacaaggaaaatgatctactttctttgggttgtggaacaatctagggtataaggaagacatctttatcttgtagaatgaccagtataacaatatgttgtatcagatttatacccttcccagatttccttgctcccttttcctgggccactggctgctggctccatgaagagtcccatcacttctgtcccctcatggaacatcactgtccaccttgtcttcctccaatgatgaaggcccagtttaatgggcctagtcaggtcaggtgtgggcaccaacgccgctgcagcttccactgtgccaggttcagtgagagccatgctggagcctaccttcccctgggagaggccaagggagatgtcactgaagtgcctggactcagcttcctcactggctgcctggaagaaccagtgacaaccctagtgaaagtgcagtggtaggcgctgggtcataggcagagggatttgcttgtgcaaaggacttgggagagcaaagagagttcagagaactgcccattgtcggcgtggctggagtgtgatgagcagatgggagaggaaggcagacagatgacacaaggctttgcaggatgaccttgaaccttagcccatgtcattggtaagctatgtaagcaaaagagtattgcaagcaggtttgtggtttaagatctggctgcatggtagggacatgattagagggagacagagcttgagaaagggagataaggagatggttgggggaatggagactggagatgatgggggcactacgtggtggcaattgacttgtagtcaggtgaccaaaagtcctgttctggctctgtcactaactttggttgaattatttaagtcttctgctgttccatgttctcatctatgagtcagagttaaaactacctcagctgggttcagtggctcacatctgtatcccagcactttgggaggccgaggcatgcaaatcacctgggctcaggagtttgagaccagcctggccgacatggtgaaaccctgtctctactaaaatacaaaaattagccaggcgtggtggcacgcacctgtaatcccagctacttgggaggctgaggcaggagaatcacttgaaccctggaggcagaggttgcaatgagctgaaatcacaccattgtactccatcctgggccaaaagagcgaaactccatctcaaaaaagcaaaacaaaagaaaacaaaaactacctcattcctagtcttgaaaattaaataatttgaatgcacttactaataggtgcttcataaatacgatttgggtgtgaaaggtgtgaggatggagtggcctcccctgagttagcacagctgtcaggccagctgagcacagccaccaccaagacctcactaaagtaggccctaggttttctcaagataacaagtgatttacttggatgtaaggagcgttatctgtaaatactgtctccacaggattaagggggcagaacgattgccggtgatagaaatgtcaacagcaaaaggccagtaggacactagaaacagcagtgtcaggatgtgccagctggcatttgctgcacgctgtgctatgagtgtgtgagcacacagataaacattgtaattaaccatcctggggtgatagtatgttcatacagtcaaaacaggtgatagattcgaaatgcaatttgaacttaatcatttgggtggggtgatttcagagtcaagtaatttagcaaaccatttttaaagggtgctaattaaaaattgcctggggttatcaatttgctgccagaactgcagaaaaatgggcatggaaaaatttcagtccagctaattattggctaaagcataagacttgattaccatgtcaggggaattttttaaatggggatattttcattcaaagcttttaattttttaatttaggggaagaattattgagacaatagaattagatatattgagagactatactcccggggtgagaaagacacagtatcttatttgctttattttgttcatcattaattatatctagtgtcattaaggcaaataaatttttgtgtactggattgaggaaccttggagtcctagtttgcagacgcttaattgtctgagataccactgaaccctaaaacacaagtgcacagttatggtgtttatttcagtcagcagagtctcagagtttgatgagagcatttagtgtgctgtgagggtggctgatgcaattcttcttggtgcttttccactttcctatagatattttaaaagttaggtgtccaggaaatctcaataagaatcagactgtgaagtttaaaggggacagacagcatgatggtcttattctgtgctcaactcccagtgcctggcatatgggaaattctcagcaggcgtttgctgaatgaaggaatgcacctgccctgttgctctagagccttgggaaacatctgtgaaaacaacaaaagtcgctgccctcatggagattacattctagcaaggggaagagaggtaatataataagtaaattatgtgggatgctaggtgacgaattctttggaaaaaataaaattaacactaagtaaggggcattgaaagtgccagggatacggtggggtggagttgggttagtgggcctatttctttattcaatacgaagctccaaggaggccttgttgagaaagtgaggtttgaaaaatgatatgaaaatggcaagggctctggctagacagacatatggggaggtgcattctaggcagagggaacagctagtgccaaggctgcaagggttgtgtctgaggagtaaggaggcctgtgaagcttgagcagagtgagcagagggagagcaaaaaataagattagagaagtaatgaggggagtcagtcaggctatctaggacatttcagtccattgtaaagactttgcctttcttcctaatcctaagcaggattttaagtagagaaatggcatgaccggctgtggccactgtgctaacagtcaggaaggagctcagggtagaagcaggaaccattgggaggctactgcagtcattcacaagagagaccacatggcctgaaccagagtgatcatgacagagacagcaagaaggagtcaaaatccattttgaaagcagaactagcaagtgcaagagaaagaggaaatcagaatgactccatggctttgggcttgaaaacgagaaggatgggattaccagcaattgagatggggaggtaggagatgacacaggcttttaggagaagagtactggtttagtcttcgacatgctgagtgcgaaaagtccatcagatatcagagtggagatgacaagtagaagattcagtatgtgactttccatgcatacgttgttggagaccgtatgtactaggtgtgaccactaagagtgagacacaatgaaaaataaaagaacgaggccttacctaggagccgtcctacattaaaaagctggaggaaaagatgaggaaccagtgaagggtacagaagactgaccagtgagatagatgtaacaccaggagagtggagagtttagtgtcctgggagtcaagggtagaatgtgataattgtattaaatattgatgagctatgtcaagtccattgaggactgaggcttgaccactgactttagcaatatggatgtcaccagcgcccagttgttttggtggaatggggaggacaacgcatccttggagtgggtttaagagagaaacaggaggggaattggaactagagtgcacttagacaacatttaaaagtatactgcgaaggagaataaagaaatgagttggtggctgataaaggaagcagggccaataaaacaatttaagatagtactttttatgccaattggaatgatccaggggaaaggaggacaaaacccatgatgtaggaaagagaggggcagattgcaggatgaccctgaagggaccagaaaggagaactgtgcacaagtggatggccagctttgatgggaacggtggatggttcactatggtaacagaaggaaaggcggcaggggcagatgctggtgggtggagaatgggatggagtctgagttcttttttgattgctacaattttctcagagaagttggaagctaggtcaccaaatggaagtgaggagttggggaagacgtactgaaagtctgaggaagaggagcagccatgaaagagaaacaaagaaaatgggagaatgaatggattggggacatgcagtagaattgccaggcatcattgaagacccacttaaaaaaggtgtatctggatgtgtgcatgcaattttaagtgaggtcagtcgtcacagttgtcatgttttgtttttgtatttttttttttttttgagacagagtttcgctctttttgcccaggctggaatgcagtgccgtgatctcagctcactgcaaactctgcctcctgggttcaagtgattctcctgtctcagcctcccgagtagctcggattacagggatgtgccaccacgcccggctaattttgtatttttagttgagacgaggtttctccatgttggtcaggctggtctccaactcccgacctcagatgatccacccgcctcggcctcccaaagtgctgggattacaggtgtgagccaccgcgcccgggcccttgtttttttttccttattccccccagcaattttcaggtgcaggagagggagagggtgggattgtgattgggtttcgcctggtgagcctgagtccacgggataagcaatagcatgattctaactgaaatggagtttgcacagatgcttaatgattgtctgttgaatgaataaatgatttaaggaaaagctgaaactttataaaaaagaaaaaacatgtgcatgggaataataagtgccatctcaatgtctgagaaattgcagaatgagtcagacgatgagggtcttcgtgctggctgctgttctgtgtgccctgtcagcctctgcctattcctctgtcctccttccgtggcctgtctacacgtttctattcatgaggaccttggagaattagattgtgtctgcctctatgggccttgttgagcctctctgtttctgtgaatgtcttcataatgtttgaataataatttactgagaaggtttatttttttcttacatatattttaaatattttaaatcatatacaccagtttttaaaaattctgatttataaacatacatgtaacctatttttacaaaatatagaaaaatgtagatagatttataatgaaaaagtttacctacaatatcatcattcaaagtcaaccatgttaaaaattaaatatattctcttccagtattggctattatttacataaatgtaatcaaaattacatatgcactgtatcctttatgctcttagtattagtctattataaatttctcacaaacattctttttactggatacataaaatcccatcttccacttctatagtaacttcggtgttaataatttaaggtaggccaggcacggtggctcacgcctgtaatctcagcacttttggaggccaaggtgggtagatcacctgaggtcaggaattcaagaccagcctggccaacatggtgaaacctcatctctaataaaaatacaaaaagttagccaggcatggtggcaagtacctcaggaggctgaggcaggagaattgcttgaacttgggaggtagaggttgcagtaagctgagatcgcgccactgaactccagcctgggaaacaacagcaaaacttcctctcaaaacaaagcaaaacaataatttaaggtaattctgtcattccgagtggtttagagaagggaagcaaactttccactctcttcttctttccctatctcctgtgcccacagtgaatgctccactttagcactatctgcagtcttccccatctgtgttcccatgtacttctgcctctttttcttcctcttcccatgtctctttgactcctggctcctttctctcatttgtctcctattcatttaccataatgtaagttctgtgagggcatccttataccctaatgtctgtcttacagtaggtactaaaatttgcatgtaaggacaatgatatgtcaacctggaatatcccatttaactggactgtggtttattgaaagttaacttctaatgaaatggccagggttagtttcctgccggggactgtggaactccatctacccagggaaactcatttttatctacattcttgcatccatagtcttacagagagcaaactcttcagtcataaatcttctacttagaaacctgaccagtagatgcagtattggtaaattttcaatgaggccataagaatgcatttacaaaaagtacaaagttaaggttgcttgtgatgattttagctaatcagcacaattttagcaggaagcagatacatctgtcctttccctcaaacttcatatagctataaaatattcaatttcctgaaggagttactcaacacacaaacttggagattaatttagaggccagatccccacaagcatttgtctagccttagactgaacaacttctgttgccgggagcttgccatgtctagtgggaatgggtctgttctgtagttgttggatggaaaaattgttagcagagtcttttttatgttaagatgaaaagtgcctcccacagagtcaacaaaaaggttctggtgtgtggaattttttaaggatgctaaagtatgaataattggaaactttagtaatttgaggcttctgtgatttctctaattctttgtagtcaatccatttatccgatcccctttaatgctaacattatttacttgattttagttctgtgaagctttggctcttataaatgacacatctaaccaagggaatggttaagccttagagcaacttgtggaaagttttcattcctcaaaacaggaatgaataacaatggcctcgatatgactaacattattaatgtatttatatgggtacataattactagcaatatctagagcattatgaaaatgatttgcatagccacttcttaaaatttagggcagggaggccgaggcgggcggatcacaaggtcaggagatcaagaccatcctggctaacacggtgaaaccccatctctactaaaaatacaaaaagttagccaggcatggtggcacgtgcctgtagtcccagctacttgggaggctgaggcaggagaatcacttgaacccggggggcggaggttgcagtgagccaagatcatgccactgcactccagcctgggcaacagagcaagactccgtctcaaaaaaagaaaaaaaaaatctctatcctatatctctcaagccttgaaaataatatattggcttcttcatgatttaatccagggcttcctcatgaaacttattgctcaatgccactggaatgcaaatattccaactgaccatgctgctcagttccttgcaatagaattgaataaaaacttggattaaaaggtcaactttaaaatatgcctaataaattcactgactaaaagctatcccaacaactttctgcatcatttctcttcatctcattattcatgtaggcttccctgaattttaaggaatgcaaataaaagagcagaatgtgtggagcactggggcctaggacattcttttcatgaatatggaactaaaggtagagtgaaaggtatttcttaaataaattacgttgatatggtggagagagtattgatggatgcttatgtattttctatagcacaaaaaagtaaaactcatatattattctaagaatcccttattttatgtccttcatatatttggtcccatagctataatattgggagcctcattacttcaaaatgattatttttaaaatttcctaacctatgatactaaaattattggggttattcagcaagttgtcgtgggacaaagcatgggaatttctataagggagaggtgagcagaatgtcataatattacataaaaagctttctcatgcattctacaaatagttgctgagtaaccacgtgttaataaaaaaagtgatataaaggtaacacttttggaaggaatgagatcatgtccttttcagggacctggatggagctggaagccatcatcctcagcaaactaacataggaatagaaaaccaaacactgcatgttctctctcataagtgggagttaacagtgagaacacatggacacagggaggggaacatcacacaccagggcctgctgggggttggtgggcaatgggagggagaccattagggcaattacctaatgcatacagggcttaaagcctagatgacaggttgatgggtgcagcaaaccaccatggcacatgtatacctatgtaacaaacctgcacgttctgcacgtgtatcccaaaacttaaaaaaaaaagaataactataaaataagaattctaactcaaaaacaaacaaaaaagaattattatgaaataaagaagaattctaactcaaaaacaaaacaaaagataactttttcgggaggctgaggcaggcagatcgcttgaacttaggagttcaggaccagcctgggcaacatggagagaccccatctctacaaaaaaaaaaaaaaaaaaaattagccaggcatggaggctcatgcctgtagtcccagctacttgggagactgaggcatgagaatcatttgaacccaggagatggatgttgcagtgagctgagatcgcaccaccgcactccagcctgggtgacagtgagaccactgtataaaaaaaaaaaaaaagagcccataatcccagcactttgggaggctgaggcaggcggatcacctgaggtcagcagttcgagatcagcctggccaacatggtgaaaccctgtctctactaaggatacaaaaattagctgggtgtgctgccaggtgcctgtaatcccagctactcgggaggctgaggcaggagaatctcttgaaccctggaggtggaggctgcagtgagctgagatcgcaccactgcactgcagcctgggggacaagagcatctgagactttgtctcaaaaaaaaaaaaaaaaaaaagaaagaaaagaaaaagagaaagaaaaaaaacattagctgggcatggtgccaggtgcctgtaatcccagctactcggaaggctgaggcaggagaatcgcttgaatctgggaggcacaggttgcgttgagccgagatcccgccactgcactccagcctgggcaacaagagtgagactctgtctcaaaacaaaacaaaacaaaacaaaaaagcactgaatccaaatcacaaataatgagatttagcatagggaattcagttgcagacagcatagcgtttattttttatggttttagactcctcaggctaatttcatatgcatgttaaaggtttaatttgtagaataagtaaatttaaacacaagtaaaatattagaattgaatgccaaggtctcatagtatttgaaaatcacatgtactcttgtctggaatccacctcaactcttgacagccatggtcatgtcttgaacttccaaatcgagaaaccactccagctacaagatttctaactgaaaattttctcttaaccttttacttcttctatttttcctgttaaatgaggtcaattaaacatgctcttcacttgctgggcgtggtggcacatggctgtaatcctagttacttgggagactgaggcaagagcatcccttgagtccaggagtttgaatccaattggggcaacacaggaagaacccgtatattaaaaaaataaaaaaataaatgtcttcatatttactttgactttgactcttttagcttacactaatattctaagcctatgatgattacttgtctcatggctttcatgttcccatgaacatgctagccattttgagcaactgaaaattgcttggccttttgattttcctttgttactagctgaatgttttgccctggccttggccttggaacatcactttcttcttcagatatgtgaacaaggacggatacaaccagatctaaccagactaggtttaggatatgtatctttcagattgaggaacccactcaagggcaacattaacatacagaggcttcttgacttatgatgtggttacatcccaataaacccatcataagttgaaaatatcataaggcaaaaatgcgcttagtacagctaacctaccaaacatcatagcttagcctagcctaccttgaacatgctcagaacacttacattatcctacagttgggcaaaatcatctaaccccaaacctatcataataaagttattttaaagaattttacatcaaaagtcaaaattcgaagtaaggtttctactgaattctagcttttacactactgtaaagttggaaaatcctaagtcacaccattgtgagtcagggactgtctgtatctactttaaatcttggttagttagggaacaaggaaagaaaagaacaatagttgtcagggactagagaagcggtacagtatgttccctcagcacggatacaagcagggacttcggttactgcactagtggtgctgcacaaatattactgctcacttgctacagacaaggccctactctaggaataggacatacagcagatgacagtcaaggacctcaaggggttcatattctagtagaaggttcatactgtttaatggttaacaaaattatgccattcagataaaactgctcaattcttgcataattttattctcatcatttcccatgtttattgttcaaaaatacaatgggctattaaatattcactattctttaggttttaaaaatataagggttatggtatgatttgccatcctacatttatcagttcctttgactattagttaaaaacacttttctacctctggactctgtatacatctcagatttcttggttctcgggcaccagctatgggtccattgtgagaaatttcctacttttcaactgtgagcgctctcggggccttgcttacatttttcaagttatctgcagggatggaattagtttttatttgttgtgtacaaagtccttgctttcggtggtagaatgaaatacttagagaacagtccatggatctatttacttcccatgacctgtgaagaggagtgatgttgccaggacctctttcctgggttgtacccagagctgttttctgcacgctctgagcctccagggatgccatcccaatggaggctaattgatcaaggctgcctggagaattgttttgagatagattctgaggcttaggctggggatcatcagaaaagaaaattatgattgataagtgaaatctgctgtgggcaaggaagggtaaacttgtactttacatgccaggaattttcgaatctgtatgtgactcccaagaaaggcttgaccttgtagcttcgattttaatctccgcaggtataaggataattcattttatgttgaatagactgctctaaagacaatttaaataatctaatacccctgcccatttcctaagagagttgtgttgactgttttattcccaaataggatcaaattcaacctgctgtcattggtagatcattcttcttaacacacatgtaagaataaaaactattattagtttggtgataaaggcagtgaaacaaacaccgagaataggagtagaaaaatgttctgtgtgaccttggttaaattatgaggcaaataagttgaaatatctccagatacattctcgctcaaatatgccagttttcaataatttattgaaatcatataaattctgaaacagatttttaaaatactttaataatgggatatcttaattatttgatgggaagtattttttaaaattacactcctattgtcctaaatttatgaaaaaaaatgaatgttcaatgcagaacacttgcataaatacacacactttttaaaaaaggtacctttatgcattttgctctgcccttaggcactctttttccaatctagaatatatttctggatgtttttcaattgacaataaaattactggagtacacgcatgttttattgtgtttgtgtgtgtctatggactggatcacaaggtataccagatgtatttctagtgggccatggtaaatatagtctgaaagtcaccattctgaccatacccctctcaaaatcacagagccttggagaagagaagaacagtttcttgctgcgtactgacttggcacataccatcagtcgcaatcaggccagatctatgtgctgctttattttcacagttcaagtaaagctgtggaaaaagtctgagcagcagtagtaggcaaggtctgtgccacacacggaagcagaacgcaaaatgcattccacacacatagaagtgtgacacaaaagtttgagcatttacctgtatgaatgccccagtctgtgtccaccgcttctttgctctgagtgatgctcacccatgcccccctagtcccaattccttgaaccacacatataacttattacatgtcatggtcatgtgtgactccaaccaggttgcaatagctgcagtgattttcagattttccctgctttctaaagagaagtgagatcatagcatgttttcactaatcagtgatttaggtagacagatgacatttgggggtgacaataactagatttataaatgctacaaatccgacccatagaaataagaaagtgactggagtcagaaggtcaaggagcacctgtcactttcccagcagggcccaacctgcagtctcttttatggctacaagctggaggtcaggatctgaactgaacaggagtaagagaagagggacttcccaggggggctcagatagttcactgggtgtacctgagatctcactatctgcagacttgtattgttataaaaataagtgaatacttaactgccacggtgggatagcacataaagagaaaaacatacttaggtagttttaaggaatgggaaggggtgaaatatagtcatcccctgatatctgcaaggactggttccaggacaacttctccaacccccaacctgcagataccaaaatctgtggatggtatacttaagtccctgatataaaatgatgtggtatttgcatataacctatgtacatcctcccgtatatgttacatcatctttagattacttaaaatccccaatacaatataaatgctaagtaaacagttgttgtactgtatcgtttaggaaataatgacaagaaaaatgtctgtctgtgttcagtacagatgcaaccattcttttctttacaaatattttcaatccatgattgattgactgaatgtatggatgtggaacccactgatacagagggctgactgtaataaaaccagcacctagcgctgtatgaaaggttagcactccccttgacaagaatggaagaggccctcgggcctgacaacacacatatggttaaaactagcacctaactcctcagtagcctggcaggaactgggaatggtggcctatgttttaagagaaccccttctgtgggcccccaatggctacagcctgatactcaggtgatggtgtgagataagcctcagtgcttttttttatcccctgtcccccaatatttactaagcttcaggaaactatattcttttttgataagtatccatttattaacactggtaacattttcagggcacacagaacatgcattctttggtagcaaaattttaaaatcacagatatatttcttttatatattatgaatatatttctagtaaggaatatataactagtcttcagaaactgaagatggaaacatagctaagcctcaacttccggtcaagcagaaagtaatgaaaagtgccgaaaatgccacagtcacatgggccactgctccttaaatgccacaatcacgcgggccactgctcctttcattctctacagacaacctgagtctcacactgtcatagcaccaagaagaaaacagttactttcacttttcttatagcaacatagggatttgtgtacataaaacatgttggacaggttctccttcaatcatggtttgtatgtcaacagttggtttcataaaacagagaaaggtggaaagaagatagaagatggtctctttacaaaagaaaggtgaatacatttcgatgcaccaggttgtttaggctaagtcagtaactgtgtgtattatcagccctatgactgctaagtgtcaatatttagaatttcagtgtgggaaagaacctcagacaccatcagtccaaccgcttccattttacagctaaggaaaagggtccggaaacttaggtgaatatcagactgggatgagaacgcaggctttggagttaggctccttagtatatgaagttcatgtatccccatagacaaactcattttctggtaatatgaatacacttctggatgaaccaacagtttttcagtctaaggtatgtcagaaacgaattcaatttttatgcttaagtttcctctgcacagctttctccatttaggttgtgatgatgatgcagactgttaccccctctagacttttgcattcttacttttgaatttgggggttaatgtgtgagtagggctccacgaatcatcatttatctttcacatcatttctctttccacctattgctaactacctatttttaaatttaacaattaggtcaatgattcttgatttatttaagacaataccaaagacagtaataaggtcagagtgacctggtgcacttctaacaccccaatctgaaaggaattttttttcagtataagataatatatatcatatacagaaaactaatactaaaaggtactcagaggtagcccttgttgttagacatttaaggatgttctagactccaagaggaacctcaacagttttctctgattcaaattaaaaacaattttctaggataaatggaatgattaataatgtaagaagaataatcagtactgaattgtatagtggaatgattcccattaggttccaaccgaatataatagagcttatttgctttcttagcatgtatctttcccactactataaaattgagatctgtcatttataatgttacctgtattatctaaacactaacatctttaaacccagtgggcttcccctagagaggtttagattcttgcaaacccaggtgaatcgttcttgttgagcaatgaactgttgagaaatgagataaggcagaggcacacttatggatgccagtcaacaggttagcttttgatggccatggtccagaggagtgggtggtcagtttccacagtcacaacaccagacccgtcgtaggtattggaagtactgaccaatgttccaaaagcaagcacatcatttgctgtaagaaaataagggaaaaaaattagtaactattttttttcttcctccagtgtagattaactttgtcacttaccaaaaagcaagtacacactttgataaaaatatatataaatgtgggataggtgaaatatatgatgtatggctttaaaatgggtaagttctataacttgctgtaaacattcttcctggaattggttattgaccattttgggttatatatcattctcaatattaaattttattagaatcttttctttttctttactaattataaaaccaaaacctgtatttgtaatgtgctacttacttccttccctgggtacaattttagtttctcttgataattcagaattaaaatttaatatgttattacactctacagaatgtagttttagcttcaagtagaaatgatatgagacagatagaaaattacctaaaaaaatgcatgtgattttggttactgttttctcataaagtaagaaaagccaaagtgaatacagcttacattctgtaaaattaatagaaactcaaaggtcaaagccgactttcaaatgtgtaatcttgagcaagtcacttaagctcagccataaagtgaaggcaagagatgataagataatcctttaaactacttatcaaagtaaaaggcttatgaattaagattagaattcatatatttatacatttcataaatatatagctataaatatattttttattttctaacaagttaatgcctaagcacagattggtaacgtcaacctctctttgctgatacaggagcaattcacttcatcaacatgactctaaactcacagctgtcctataagcatcccttggtaaccaatattattttctttaccaaaattcagagagaaaaatgaacaaatgttatggagcccaaactatcagagtcagaagaggccccttttccttcaaacaacacctatgaagttatacacactgctttgggggaaatcaatcaattacaatgctcacttcccactagagggagcctcctatctttctgaggaaatcttgaaaaggcaatttaaaaattcaggaacagtactgcaagataatctattgtcagtattaccagttcacacagcttatttattaaaactcaaattatttttcatagttctttatgtttttactagtgcaaacacaaaagtaaaactacacagtaatacagagtgaatctcatgtgaatattgccctgatacgaacttcaatataggaagctcttaactcttgagtcatttgggacttgggacttctgtgagatgatgtttctgaacactggtgatatacacaaaaatatgtatcgatctagacactgttacatagttggtagatcagggtggtgatctttgagggattcacagcaaagtcaattgaaatctctacctctcctgaatagtggtcttgcctggaacctgggtgcttaccaagtagcttactgagacctatcccaggcctacggtttcaaggttttcccaatagccaagagggaggcaatcagggagcacttcacaccacttcattgcgaaggcaatttagagtgcttcagcaggcctgccaactttaaagtggaaactccctcgtgaagacccatgcatgcacaaccgacttggatttgacacacacattatatgattcgagaaaatggattaaaatcctagtttttacttaggcccaaagaacaggagtacaaaattgtgcttcaagtttatagctgcatataaattcctttctgatttttgaagccagactatggatttcagaatttcaggggtaaatacctggattatacatactgggtttggaagacactgttgtagcctaattaattttcaaatgggaaaataatcaaagtggtttatttgggcataagaagatgaaatttttttttggaaggaaatatttctttgagttaagcaaggccactgttagccatacttgtaaattatgtttttattttattttataatatttaaagttccaacaagaccagttatatagttacaattaattaaagataacaattggttttgattatctctaactttatggaaagtacaataaaaatgatagaaaactaagatgaataagttgagagacaaagtcatgaattttaatttactatgtcattacaattattttggaatatattttcttcaagtcacagaatcatatttttggacaaaaccttagaaaaataaaaaaattttaaggaaaatatttggaattatgatgaacttcctctaccccaaatatctgaaggccaatcatgacataagtacatgaaactagtaaagagacagctgtgtacagatagtagaaaaacaaattacctcttcgtttctaccctagaggatttgtccaacactttagctggctgaattatagaaaatctgacttggatttttccccccattgtttgcagagtagactacagccaaccgtagttgctcaaagacaaccagtcatcagatcaagacccgtttttaacaaaaggcaaaaataaaagttacagatctatgtgcaagcttataagcaacgatattttgtgtgataaacacattaacatagattttacaattttcatccattatctcaggctgttttatttcccaaaggtaaggacgagaattagcactccgtgttctattgttttcagtgatgtcctcccagcttttctctaaagctggaaaaacaggggactacaaagcaagagctggcaaatcggtggaaaccaattattcaactcttttcagttagtggggccatttgtccctggtttcttgcccatctttcctccacaagctacattagtgaactgtggctccttggttggagctggaagcatgaaggagtactctgcaaggccttggatgcttttggcactgaaaagcaacagtgggaggcattcattctctgtgtacctgcatgacttttctgatcaggtgcttttatagaaaaggcatctctctatcaaagagcatgactccatcatgatgaagttaataagttagatctaggttcaaaccctggctctaccattcaccagctttacaaactcagttatttaaactctttggccttgtgtcatcaacagtaaatatgtagaaagtatctacttcacagggaagttgtatggattatgtggccaatcttacatatgatacatattcaagtaatttccatcttctttgctttctcctgttatcctgctgataaaacagatcaggtttttcttttaaaattaacaaaaagagagatgtcatgagctgaacaattagcaaaggcctgaattcaagtgattagtttatagccagctgagaagtagaatgaggtacactcgtaacttttccaggctagcttttgtgaaatacttaacatcatttcaggtgattccttggcctgcatgtatgtatgcatttatttaatagatattaaagcctcattctgtgccaggcactagggtttaaggatgagtatctctgccctcactaaaatgaggactcacattttagtaaaagggaaagatatacaatcaaacccagcagacaggagagaagcatgaggtgggccaaggagggcagaggtgccttcctggcagccaagatgggttgtgtattcaagagggaggtgaagcctttgacagtggggggctactggcatccctagaggcctgcccgctggcctggcttcccaagaatctgtagatcgacgctggttcttttgtaaaaataaatacattatttaaaaaggcaatggaaacatttctaaaatcaataaatcctgagggcaaaatggaggtgctatttgagatgggcataatccttattcattcaagacgtgatctgagtccttacagtacaccagccactcaaggcatagccaggttttatcttccatttagagatgaggaaaatgaagctcagagaggctaaaatcacaggctatgatgataataaaagttgtcagacactaacaagttagtaagggaggttaaggcgatgctttgaagagctctaaagaagagaactgttgctggtctgttctcctgaagtacagagctgtcttttggcagcctgatggagacttaaggagatgcattagtgagagcctaaaaatcactctaagacttaatgaatactttacatctcatatagacaaatgcttaatgaacccattatgatgaatcttaaggctccctaccattctggaacattaggttaagttcggagagttaagttagacatattagacatcactaactatttaaaacataatgggaccactgtctacactcaccatttactctctgaggattcttagcctatgtggagaaatggcaacacattaagaaaatatgactcagatttcattaccaggaaaagaaaactatactgtctgtaacatcagttcactattataggtctttacaattttaatttttgacaaatatattttttaaaaaaaggtcttttatgtacacacatgaggcaaaagattatattttaaaaattgccaatttatactgtaaaatatgaattctgggaagggttattagtgaatttgtttcttataaaatggcatttatacttatggttgctcttgaaaattttcaaaaataaaatcaatatgttgtgttttcactttcttgaagtaaaaaactcaaagtagtcctaatgtaaagctgtggagtacatgtcttttgtgtacttatatttctattagaatcttagaaaatacaagtttgagaccatctataaaataaatatatttatttatctcagcactgccaaataaaaataagtgatcacaaatctaaattttctaatagccaccttaaaaaagtaaaaataggaaaaatgttaatatcttttttatttagcccaatatatccaaaatcattttaacataatcaatatataaaatttggggtcttttacattcctttttcatactaagtctctgaaatccatttacagcatgtcttaacttggacaaggctcattttaagtattcagtggccatacgtagctagtggttactatatagattgaacagtgcagttctaggttgttgaagcaggaactatatttatgattcaattatctgcttttttcagaagaacattattttttggtttgattatatagatagtaattttcatttcatatgtagctatgcggtcacagagtccgaggttataaagagaacattaaattcaaagtgtgcatatacaatcattttgagtgatttgaacttacgatgtgagtggatcaacaaacacttaaatacttaacatgtgttcagcagcaagacagactcagtcctctgcccttcaacttgaaggctgagaactatctagcaggaactgtagaaaggacaaccaaaaatccaaaatccaagcaaacctaatgtgaaattaccaagagaatatatactacattctataaggtatagaataaataaatgcctgcttggacatgtggcaaataatcttccttttttttgaaggggggagggagttatttatttttattttattttatttattcatttatttccataggtttttggggaacaggtggtgtttggttacatgagtaagttctttagtagtgatctgtgagattttggtgtacccaacacccaaacagtgtacactgtacccaatttgaagtcttttatccctcactcacctcccaccctttcccccaagaccctcaagtccccaaagtccactgtatcattcttatgcatttgtatcctcatagtgtggctcccacttataagtgagaacatatgatgttcggttttccatttctgagttacttcacttagaataatgatctccaattccactattgggtatctactcagaggaaaagaagtcattatacaaaaaagatacttacaatcttctaattgtacctgcaaataatcttctaatttttcttctaataattgcaaataatcttctaattgtactcttttctcccaattattaccttctcttcccactcctctaacacttgtgaaagaataactggaggaccctaattgcctataatgaaatgttcaaaacaaacacattccctcttcccggcccaaacatcctggcatggcacttaaggccctttgttatctggctacttcctacctgcttgccagccactctctgctacttgctgttccttgaatagatcaggaatttcctgcttctacgaaaatttttgacgtgttccctccgagaacaaattgacttttctctgcatattttatccttcaagtctaaactcaatgtcacttgctaccctgtaccgctctttgattctccaactgctacaggacaaattaaaaattctcttttctatttacaaaggacttgattgcttccctggaacacactttgtatttaaagctgactgtttagatgcctcgtctcaagcaggcaaagtacagagtgagcttgaaacatcttgctccagaaagcaagagggtgctcaaaaacagatgtagacctgtgaaaaggacacaacgactggaactaatttggggcattagaaaagaatcctgagagagagaggcattataatatattgaataatgaattgccaaaagcaggtggagagaagaaaacctattatttacagaagaatgccaactactaaaggaaggaatggcagaattagagaattagaaaggcaccatttgcagccaccagtgtaataactagtttaggcaagaaccatcaatggatggatgcttaaactactggataaaatgtggagaagaaggatagcacccagttccaaagcagtactccacgtattgcttttaacttcaaaggaaaaaaaggtagcagagtgatctcatgagtccgatcttagctaaatgatcaaccttagcatcaccaataaaaggccatactgatatcatgtgcctcctgctatgatgctagggatgaatacaatatcacccattaatacttttggccaaaaatgcctgacctgaattgaatcatggggaaaccgtagacaaatgcagaatgggggcagatgacaggttagtgggcctgaactcttaaaagctgtcagtgtcatgaaagaccaaaaaagtgaagggacttttctagattaaaacagactaggctgggcgcggtggctcacgcctgtaatcccagcactttgggaggccgaggcgggcggatcacgaggtcaggagatcgagaccatcctggctaacacggtgaaaccccgtctctactaaaaatacaaaaaattagccgggcgtggtagcgggcgcctgtagtcccagctactcgggaggctgaggcaggagaatggcgtgaacccgggaggcggagcttgcagtgagccgagatcgcgccactgcactccagcctgggcgacagagcgagactccgtctcaaaaaaaaaaaaaaaaaaaaaaacagactaaacagatatgacaactaaatacaatgcatgtttttttagtagactccagattttagaaagttataaagagcactactgggacacttggggagtaagcatatggactgtacactattattccatcaatgttacattttgggggtagatattagcactgtagttatgcaagagaatgacctcgttcctaggagatacaagctgaggaatttcaggtgtttattattatcatgccttcaacttattttcaaatagttcagaatgtaatgcacatacactcatactcacatattatattgtttggagatttgtccctgcccaaatctcatgttgaattgtaatctctgatgctggaggaagggcctggtgggaggtgtttgggttatgagggtggatccctcgtggcttggtgctgtctttgagatagtgagttctctcaagatctggtcatttaaaagtgcatggcaccttccccacaatctctctcttgctcctgatttccctgtggtgagtgcctgcttctgccttgccttctgccatgggtaaaagcttcccgaggccttcccagaagcagatgctgacatgatgcttcctgtaccgcctgcagaaccataagcccaattcaacctcttttctttgtaaattacccagcctcagcaatgcaagaatggcctagtacacatacaaagaaataaatgcaaatgtagaaaaaaaatgttagcacttggtgaatctcagtgaaaggtatacagattttgctgtactgtcccttcagtttttttgtaggtttgaagttattcaacattaaaattccacaatacaatttggggaaaaaatttgggaagaaaggctagcaacttaggaagggaagtgtttccctcttggttcacctttggtttccctgaaagctgaagtaatgccattgcaaagcattaagaaatgtttattgatttaacgtgcatcaaaataaatccaagttgaaaaaaagtgtgccaaatttaggaagaaattatctagtctatgatatatctgcattgcagcttcttggaaaagtatagagagagatgctgagcacacagactgtgtgtggtgaggccccttcctttgtcaactcattgaagctcaccaaggacagcctttacttccactcattgatgcaggaggccctggaaattaacttgcagtgtctaccagaacttcttagtgcttgtgaaaatggtaagagcaagacttattgttatgcatgtctctgataacaagccatcagctgtgctttctttttgagccttatctctcaaaaccctgatctactaagactcttcccaaggtgaacactcatcacctccctctcctgacaactaatccttccttgaactcaaatgtccaaggaagggctattataattctatttgaaactggctgcatttatcttcttctctctcagaagtcacatttcccttgcccttggatgaggactggaatgcattagaaggcttctgatgttcaattattcttccttctccacattttctgtgttatgactcggcctgttgatcgaaaaacaattaggccaggaaaatgctgctgcttggaggaatcaaaactaattatgccagttagaaaatgtttacaaagatcatcagtttcaaacatttagccctttctaaaataaacaaaatcgttatttttatttgttaaagagaattccctaatgtattatgtcatcagcatgttctactcataaaaggccccatgttccagttaaagagccaatcagagctgctttaagaaaaaagaaaagcttactgggcttataaaataagaaccacagtccaaatccacaaaatgtgacctttttgcattaattattagtggtaaagtgaatgaactgtgtagaactctgtgaaaattttcagtgtggaaaatcagtatcagatttaaacgtttgttcaaagagaaaggctgtccacaggctgttctgaactgatttattttgctctgttgccttcaaatcctgtgtcttggtgttgcctcctgtggacactggcctgccccaaaaccatcccacaggggtgagaattatgacctgcagatgccaaagatgactgagtcgcagccatcctaatctcttgctgcccggctgtagagcaaggcaagtcattttgtactgctgggcctcagtgccatccctgaaaacagagagttgatcttttcactgtaatattttatgacttttgttaaaagtccctcaggtgacctcagcatccatttgtaaaatgccaataatacttgtccccagttacctctaatactgctatcgtgaagatgaatgagttaatgtctgtgaagagctttgacttctccagaaaagtgttgaaaatgtgttgtattattatcatcatttcatctgcactgaggaagctttaaagtggcatttgcttctatccttcaaatgtcaacagagattattacaggtacatcaaacaaacagaaatgtcatagaaaagtgaaaaaagagaggaacatgtgcagtagcatggtatgattacttaacatcaatctcaaacctgcaggtggtatttatacaaataagctaaagagacataatccaggcccttttagaatttaccagtcaagagggtctctgtgaatctgctgtgattctgggggctgccggatttgcaaatcgttcactgctcaattgaactcttttaaatttaattcggctgaagtttttcttttatcagatggtgtcagaagtgggatccaaaatggagcttctagcatcccccagcagtgctgagtgaatatgcaaggtacctgcaggacccacttgtgtccactcatctcttagagctgctggggatcatgggtaagctccttcttggatttcggagctccgctgatctctcacagccactggggatcatgggtaagctccctcttggatttccgagctccactgatctctcacagccactggggatcatggttaagctccctcttggatttcccagctccacagatttgtgttttgagctctctgagtttctttgagcaaatttctgatccaaactgggtttggagttgtgacagaaactggactgggtacaggaatggatttgatctgggaattaactggcttggatccagttagaagcctcttacatctgactgggtcagaaaggaactggtagtaagcagtaatattgcaggagttataaaatttggcttttgaaaaatcagatttttgtgttatacccctttgtttcatttttcttacacttgggtaggaaaaaaaaatcactggctaagttaatcaagagaagctgagcgtaaggccaatattttaggtaaaaatgggatccttagtttctggaaaactgagttctttctggcttacacttcaggcctgggaggcagcgaagtcttacagaaacagcaaaatgttactaaagataacacagtggaatgttccgaatgaacaacaatgcatttgaagtacatttttaaaatgagggctctaagtaaagtcccttttgtctaagaatgggtttggcactacagcatgtcaactgctattctctttggaataatctgccttgcactctttgctgacaactgtgggtgacaggattaggcatgtacaggatcgtgggacatggggagctttttcctccctaaaaggggaaacttgagagatgatgggcctgctggaaaagatcccttcgctacctagaagcagccgcctgaacttttttttcagtgtcgctgcaatgggtgggtctttctctggcctcccagatcatttcaccttccccaccctgcctcaggcaatgcttttctctttctcctttctctttcttatcttttctattactcagggcaaccatcttgcccagagaccacaggttgaaactcctggttggaggttggattaatgatgatggagcccaaccaggtgcaaatttgagccttgccagtttgatactgggtgctaatcagagcagctaatgtctatgtttttgtcacatgtattttactctggccagaacagaaaaagataattttcttttctgatgtggctttgccccagcgcgatggtgtggcaagctcagtcatggaggccgctcaggcaaagagaacccagaagcctggcatgccggcaaaagggtaagaatttcttaccagtcagacttctggcttctctctttctgtgcaaatggttgactgaatggtaaaaatcactgtttatctccatcttgttttatgtccttgggagcttgaccttgttaccacgtggcagtactttctcttggtctcctccttccagggaacaggaattttagggtttatgtcataattagctctaaaaattatcttgagtagttaaaagcctgtgtaagctcacaattaactattctagatgctttctgggaagaacagtgaagactgccctatgctgtagctcagttgctaaggctttgccctttcttactggtggtctggtttcgattccctgcttgtgaaataaaagccttttcatttaatttctgcatgaccttgtctagtctcttctccttcatgtactatcttaaattttcctttcgctgagcacctgggaggttacctttggtaaagttcaaaagccggaaatatcggagtgaaggttaggtactattagaagtcaattttccatttatttgtgcttgggaagatctagtcaaattaaccagatgactgaatccttgaatttacagaaagcccttgaagttctgaaagatttgccatgtaaatccctctaagattctggctcaatcttgatcaattcagccagaccaactggtccactcaggccacctcttgctggtgaaattcccgctcctctcacaaaggcatcttccctgctgcctgtgtccctacgcggtgccctgctttcctctttggctccactgcccactcgagattccctgttacagtgagtacctgccactctagctcctccagatctcctgccaccctcctgcaccagcccctccccgacccctgctttaccctacgagggccaccggcatgacttgacctctgctcctttaataatagatggttctttcttatatctcagcctgaaactgtgacagtcccgaaaatgaaatctcagtggtcatggtggcttttcattgtcttgtggaaaaatatttacaacacagaaataggggatgagtgtttaccatcaagcagaatccattcaatcatatggctgtttttagaatagaatttcatttagtgagagtctgaccgctgccttttggggaaaacatcatttgatttaagttcagatggtctaatattaacagatatgatttgttatagcaaaggtaatgaagcaatgtcttagactttgtccataaacctataaatatacaagcttgctcctaatatatttcatcatgacctattttcatttttaatttccccttgctgatatacaataacattatttcaatttaggaatagctgtcatcttcttatatgaatattctaacaagtctgaaaatattagccattcttagaaacaagctactttaattcacaattaatatattctctttctcgttctcgttataataatcaattttttaatactcataccatggactttttcctgatgacaggctgaacttctctttttttgatgaaccttctttgcattaactatctgcatgcaaagttgcatattatcccagcctcaaatttataaccttctacttagcattttactatatcattgtggagtgctgacatgtgtaacactatcttacacattaaatgttcaagtatttttttctaccaattagattataagctccttgtgggcagaaatatgacttggtctaacttcctttattatagaatgtctaatctgcaagaaaccttatctattatttagttcagtggtttaatacagataaaagtgaggctgctcctactttaaccaatttaaagtgctaggctcaaagttctcttcacttgactttacctcataaccaaaccaagttggccttagggaactggctaggtcttcagtgcttcagagaatgtatttaaagagccactgatataatatccaaacactttatttcaagacagggaaacgaattaaagataccttattgacctaggatgcccagcactgaaattcaagtctgttgacttgtagctcagtgtattctctcttataacaaaatcaaactatgggccagccacagtgcctcctgtctataatcctagcactttggaggctgaggtgggaggatcacttgaggccgggagtttgaggccagcctggcaacatagtgagaccccatctctatatatataaaaaaataataaattttaaaaacccaaagtcaaattacgggctttaacaaattggttggctcctcagaagtatttttggattagctaagcaaagttaaatgattaaaactacatactgaatatctgaattgcttgaacatgtggctatgttacctattttttcctaaagcttagtgattcatgtagattgactaaagtcacaggcttcaagccggtggcaaaatggattcagaagtttctcatccttgatttttgtgtaagctacagaccacaggacacaatgtacttaactgaaacactctgtactgcattttcttatttagaaaatgcaccaattccatttataaaccactatctatagaagtgtttcttttgttgtgtcagccattatttaattaagtagtattaacagtctagacaaggaggaatgaggaaatggtcacacaggcttagctgctaagacatggttcaatatttggcttttagtaaaaacattttgctgtatctgtagtaaacacattagataaaaattaaaggtgaaatttcagttaatccactttcactgctgatatggcaagattattagaagaaaggctaactacagagcctttatttatgatttaggaaaatagacctatattgttagagaagaaaaaaattcacttgttataaatggctgtatttgcaactgaaagaatatcaatatatcagacatcaattacaccaaagataagatgattacaaaccttctatgtagaaaaaacattcattttgaagtatttggagacagggatggagagtggcaattttgtttttgtactaaaaaaatcattcctcaaaagctgagttatgaagtttgtacaaactaagattatattatatcaaagctgcaggttaggaagtcatatttacttggtatgtatagacaaatttacaactctaatcaatttggtagaaagtctactaaaattgaactaattttttaaaaagcctgtcaaatcacaactagtatgtatgtgtagaaatggcctgagatagcttttctgtattcttaattaagaaataaacaatcccatatattccttgcaagtatctagcctggaaggcatgaaagaaccctggctcctccctgttcctttgatgccatcagtggtatctagttgttgggggtttcggggcaacctctgattcagacccttgtggcaccttgttgatgaccaggatcttacctactcattgtggtccaatcaatattgggtggaaccctcttgatggctaccattttgacctctcacctttcttcttaatccatgacactctttgcaaaaagcaatctaggaaagcagatatcctcccccttattcttcctaaaacatcagcgccatcggagaaatgtgatgaataattaccaatatgcctttttagtgttgtgcctgctgagtgttggtgaacctcttcctccagagatgatggacatagttgtgatgtctcactgttctatactttgcttggaggtaactacagactggcctctacttgggcacttgaggccatctgatgtgtctggagtaacagctgcctctgatcttaggcttggggcagcttcacttatgagtactggctgtgagcctctgaggcttcattctgttagtgctggggtatctcattttccactcattgatggagtggcagtgatgtgtgtctcctcttctctgagtcaaagaggcatctcctacaggacatgctgcaggcctgtggattggtgctgaggtgttgtaggtatttttgttctaagcattaacaggactgacactatctattttggcccttattccatagaggtcttttccttccaaagaaatccaaaggcatacacaacctatcccatatttcatttccctgttgagggatgaagaaatcatctcagcagattgtttctttccttctcatctaagagatatgtttatatgtgtacatggcaacagggatgaggaacctccagattcttggcatgatttcaggcatctggacacagccctgcctctggtatagggcctgctgtactttcttccttgtatcctcccaggcacttcactggagagtgactgatctcttcttgagtcaagatttaaatatacttcaacatactaatgacttttatttactagatttgccatttaagcagtctttatcttctgctgttgccctagtatttataatatctgaatcaaagaggaatagattcttgaaaaactgtgccacacactctagcctgggtgacagaatgagactccatctcaaacaaaacaaaacaaacaaaaaactgtgctacaaattcagactgcttttttaaacagtagtcttatatgggtcttttaatgtgcaatgcaagaatagtgctgtgttttagcatgagatgacgttgcttatataaatgattttatatctcacgaaaaaaatctataaaatcaaagtaaaaagttatctttactcttttaaaaaagaggctcatatattaaacatattgaaccttattagacagatatctaccaggcttagtgatgtaagctcatgactctcaaatgcaaaactttaaggcaccactgaattaatatactggcacattctgcaggcaaaagcattaaatttttaacagtacaattgactgtatgtggttcaaccttcaaacatgttgcttgtgaataattgcaaaagatacactctggtatgtgatatgtgttactcatttctaaaatgcaaagatagaaggatctactttctgttttgatttagccacaaatccagtgtacaaagaatttactcagcctggaaaatagttaagaggataataagaaaatagaaaagtaacagactaacttcaggcctaggttcctccagtatagctaatttatgacatttgaggcttaagagatgataataattaccatgagaaagaaaaatattacattttaaaatcctgtctcattttcaaagactacagaaaatttctacttggtgctttaattgccattttaggatgcttgaaatctctgtccctttctactccctggaaatgttttaacactttgtaaatacgatgaaaaaggccaagtttctataatctacaaagacattcaaatgctttattatgtacaagagtaattcttaagagtagggagttgtatatatagtttgaaaaaaaatcctaaaattataattgtgttactttctaagtacgaaatttattgtgaacattctgatattacgtgtgatcttacgtttagtaaaaaagaaaaaaaagattcatgggtttaataaaggtaagaaacattggaataagcaagcattcaataagaatgctaaaatgtgctaccccaatcattttggtactaattcattatggtaacagatttgccaagttccatagttcaagactttggcattataacaactaccagcagggctcctaggcagaattaagggttcagtgtgtgtgtgcaaaattagggccttggtgttattagtaaagaactgtattaaaaagaatgagggcaactgcaattctgttctaccaaataaaacattttgtttagagattaaaaaaacaaaaaacaatgaaggctatgttacagttatgcaaggggtgttctcaattagtagaaaacagtatgccaatttgagaaattccattaaaaacagagaattccataaaggtagcaccctagttattacattaaacaaaagtattaatattgagtattattgctacagtttgttcattactcagaatcatgtgagcccaggagagaccaggtttgctctgttctctattattcctgtatatttagcatactcaaagaaaatatcctaattatagattacaattactacatagcagacttactgtaaatatttattgaatgaataagtgtgtatccaaataaagatgtctgctctgcaaaccttcatccaggccctgggtctacatctcagataattcacccagacagccaagacataaaaaaacccaaactcctttggtatttattctccctaagctccctggtcaagggtctctaaatgacttcaaaggaggcccctttcctagaactcagcatttccttaactggtgattgctgattgaagcacaccactcccaggctttccagaattatttaatattgcttctagggcaccttatatgggtgtgttcagaagcactggggggaaaaggaacactgggttcaatggctagatccttgtttcccacttgttcccttttcataggtctccctgccctttgagatcatgagcaacttcagattacctctcacccttagaatacaatgcatccatggatggagctttggaaaatgctactgtgtttctgataaactaagtgcttgttaagctttcactttagcacaactttaatgtggaagtaatgactctttccagctgatatcaaggtatttcccacactttgggaaagatgcaaaaaccactttctatatggctcagtggttttattactgatggaagcatcccattaaattttcttatcaggctgtaaggaaaaaagaaattcattatgtgaagagagacaaggtaagggtttactatataatcaatcaatggtaatacacccttgtttctcttatcaggtaaattgcccctcaaatattttatagtaacgggaatttctccaatctcaacatagaatcctaaaaatatgcacactctgacataccattaatcctaacatttatcatcccttatggttaaacatttataaggttacattctccttaaactttcttaagcctgtaaacagctacaatgaacaacaggtaagtttattatggttttagacagctctgtggagtaattaatgaagcgtttaggtcgatgttttgcattactcaaactttccaattccaaatttgataaagaaattttcaacatgattgatgtaatggttacttctcaggtcaatgaaaatgaatgagcactgggttcaagtccaagcccaagcaagtcacttatttcttaagtctctatcttctagtccattggtctgagagatctggcctgaagttccactttcaagtatattggtccattctcacattgctataaagaactacctgagactgggtagtttataaagaaaagaggtttaattgactcaaagttctgcaggatatataggaaacatggctgggaggcctcaggaaatgtacaatcatggcagaagggcaaacgggaagcaagcacctttgtcacatggcagtaacagagagaacaaagggggaagtgctacacactttcaaacaaccagatcttgtgagaactctatgtggagaacactaagggggaagttcgcccccatgattcaatcacctcccaccaggcccctcccctgatacgtggggttacaaatttacaggagatttggatggggacacagagccaaaccatatcacatagcttgggtttaccttgaccaaggctcaaaacaaggtgatgcagtttcttaaatttttcctttactgcgcaggttaaaattacatgttaatttcttgaatggtattcccacaaattcccttacttccattccattactgattatttcctgagtctcatctgtctctcagattctatattcttttaactaaaggaacaagggtttctaaacagaaggtcatttcaagtttcaataataataataaaagtggtaggaaactttatctggacaattttatatgatcttgccaaatggacaatggcaagatcatataaaaaatagaattctgaccccaaaactgtagaaacgtgcccaggaaaccaatcccttatctacaacaactagcctgggaaatcagcccacgataagtcagacttgcagggattcagaacacagaaaaccaaacaataatttctgcaacaatttgccccaaatggccatgacttaactgaaagctgacaacttccctaatttttggctccactgctaactttagcaccaaccagagaaagccaaatatgctcctctaacctatcgcgtaggatgcttgcttccagtcagcctgcctgcagcttctttgggccaacagactccaattagggtacatcagaagccatccctttctccactacacagcattcccatttctttccctgcctttgaatctccgctgaaatgagttactctgcaagaaactgaataaatagccttgatttattctcttttggtttgtctttatttatcaccactgtgcgtataaaaaaggatacagagagtgcactcagcttcatctagatccacagttgggtcaatctttctgctttcctagttaattattaagttcttgctagctactatttaaaaacctacacactaaaacctcctacctttccaaatgcctaatgcctatctactttgagcatatgactttaccccatcttctcagggaaaacaagcccaataagaacttgctccacatcttctcagcattcacgccagtatctacagcctcatccagtcaattcctcccttcttgtggttgtaatagaaatgtagacatctcctctgtccagggttctggatctcacttcccttactgtctcacagctttgatctacagattatcatcactctctcctgttccttcaaacagttctcatcatcttatttatttctatgaacacttagatgtgttcaaggctgttccattttactctctctcccactccaagtccctttcagttatcaatctctctctcttccccacttcagagcccaaacactggaattacttatctacccttcaatttccattcatttcataacctgctgcagtgtaggttccacctctattactgcactaaaactactaagatcatcagtgacttcattttccctcagtgcaatgtgtattctcagtgcctacaactgtgactgatatggagtagagcctcacttctctggatttcctaattttaaaaatagttctgcattggcttatagctttacctgaattacgtcatctattacaacaacctgataaagtaggtattattaatgtgattcatatttggaaactggagctcacagaggttaaatctccccctgaaggacagacatctgttctgccacctaagattcatccttgcttcttccctctgaaataataatagtattagataggaaagtatcctgaaaaatccttagcagatttcctggtataagaaaaagagttcaatatatgttgagtattatcatttttctaccacctaaaccagtgcctggcacatgaaatatactccataaatactgactgattaaatgtgcccagagaggtcataacagtgatgcccaaataattatttttgctggtaactgtggcctagctggggctttaaagcaggtaggggcatttttcctagatctgaaggcctctagagggctttacctcgtcatactaactgtagggaagaataagaaaaaaatatttttacttcctctttctcaaaaatgttcactcatccatttctgaaaaggtaaaattatagacaatgttacttggtaatccctatcacctttttcagaaaaggatttgcctttatcttattatagcaaatattagtttgtaggtgtgaattgagagggagagcagttaagtcctttttcctattacgtacatgtataaatattgaaattcatgagatttaaatttgaaaatctgctgctttacaaaaatgaagtataattatagagttgaacagaacaaaaggggaagtaaaagcatagatgcactgatttactatcttgccttctctcccactggaatcaatttatgctggaaagaggagctaaagacagctggaggaacaataggttgttaacacaaattataaggaaaggaactccctttaatttttgggaactgagccaagggagaaaattgaagtgagatactgtatttatactacactataacagtactcatgtaattttctgagctcctcaaaaatctctactaaaataaaagcattagtatctatttctcattatgcctaaatattggtaaatgcataggaaaaaatccccagaaggtagctgccagtttgccaacatatcctattaaaaacttttttaccaactaggagacatctttccttagtgtaagaacagagatacaacaggatgcatggacactgcgttactttaatgatgttgcctttaagaaaagataattatgctggaatgcaagatgcaaaaagagactacataggaaacaaagagttcactaagtgcagactcagttgggtttctggcttgaaatgcaatacaagtaaaatatttggcaagaaacctgtaaactacataaaagaggcttaaaaatcaaatttggaagttaaagaaaaaaatcacccagataaactataaaatgcaggtaacatagatggatgtgatatatttctggttgtcacaatgaggtcatgaggatattctggcattctcatgaaggctagctcagagcactcccaaccaatgaggtcctctattaccaacaaagagcatgttaaaattccaaacaacagggttctacattttataacagatgaaatattgctattacatagtcagaactctgaggacgggctcaccattggaaaatagaaatggaagggtttccttagttcaagtgaatatgttaaaagatgggaaaaacaggaaagctaaagatctggaaggtcaaagtatcaaaatgtgccaaattcaataacaaaaaggggcttcaaagctatgctggaagcaaaggcgttgatttctgcctgaagaagatgctgtgacatcaactccaggacacttacttggcactcacattctccatcacagaaaatgatctcacgtgttgtacactggaagttgaactcaagatacgtgatatgatattaaagttctgtttactcggccaggcacggtggctcacatctgtaatcccagcactttgggaggctgaggcgggtggatcatgaggtcaggagttcaagaccatcctggccaagattatgaaaccccatctctactaaaaacacacaaaaaattagccgggcatggtggcaggtgcctgtaatcccagctactcgggaggctgaggcagagaattgcttgaacctgggaggcagaggttgcagtgagccaaggaggttgcagtgggccgagattgcaccactgcactccagcctgggtgacagagcaagactccatctcaaaaataaataaagttctgtttcctcaactcagattactgaaaataatttccagctattactctcgagtgatgatatgcctttcagagactattttgtatattaccaagaataacacggtgaagtatgggctaaatgattatacagacatatgaattttgagatatcaaatacctttcctaaagagtactcgttagtggctctttggaatggccttgaatggggcaagagtctgtccttagactacctcattcaactacctatcactgtctcggaagaacaccagtaaagttaatctgatcttcaatagaaaaacactggggagggtcgggggtagggagagcatcaagaaaaacagctaacgcatgctgggcttcctacctaggtgatgagttgataggtgcagcaaaccaccatggcacacatttacctatgtaacaagcctgcacatcctgtacatgtaccctggaacttaaaaaaaaaaaagtactaggagagagaaactaaacaaagaatcaagattcaagtattgtacactttaaaagaaataattttatggtttctgaattatgtcttaataaagctgttatatatttttaaaaagtaacaggagaatgtttaactggaaaatgtaaagcctcatatatttgagttaaaaaatgtactgagcagagaaagcttccctgttgataggctgaggcctgcagtagactgtgggctcaggagcaggtgacagtctgctggagtcttggcttcctcagcagcagcctccccctagaccctcagtacctgacatcatgtctgccacaaaggaatgcatagtaaatacctgctgaataattatgctccttaaaaacaaaacaacaaagaaaagccaagaacacaaacttaaacgttatgaaattaaaaataggagtttcttctctaagaaatctaacatatatagagaaaaaagactggactaaacaccaaaatactagcagtagttgtctttgggtcagaagattttgggcaaattatgatcatttaatttcatatttctgtctattttcctgtgtgttccaattttgtaggatagagaaaagtatatcctctgttacccctcatccctaccccaagtctgtttgaatgacaatgagtatgctgaaacattgagctgcttgaaaactatttttatatatgttactttgaattatttatatttgtatgtcttttctttccacttgaactgtagatactcagattgcagcagtgatatgttattatccttgtatatagtctgatgctaaggatggcagcaaattcaaccaccttctcttgcaaacgttattacaactgaaccgggaaaaagactagaattttatccacatggctgctctaatgtcatcctaatatgatataatttctctaagaaaaggcacttgactcaaactaaaacaaaagttaacactgtgactcaaagtttaggctagatgacaattctgaagatctttttatttcttggtggtgaagaaaaaaaaacactcagatattaccttttttttcagcgcatgggatcggcagtaatttatctgacattatcccaatactcctgatggaggactgtcatttcaagttctacttcgcaggaggattttatcgccctctcaatcaatgttaggagtcattagagcaataacagagaagaaaaatcaaggccacctatttaggcagggtgcttgccacaaggtagtgaaacacaaaccctaagatctttatgtctgtacaaacgtacaagggagttggccatttagctcccatagttgtggggagcactaggccagactgcctggatggggcaattccctggggcctcagaaattagtattggtaacagcttatatttctaccacttctcatgaaagaaacccagaaattagcaactacccttgaataccctgtagaagtttgcaggcttgtctagaaaggcattaaaaataatcacaaaataacacaaatccacaaccaagcaatcaaccctattcactttccaagccccatttcatctctctaatttttccattatttaagaccgcagccagaaaaacttcagtgggagaaggagaggtgaatccaatgcaacatgaaccaaatctctatcatcttcgtgtcaccaacagaaatgttttagctaaacaaatttgatcgtttgtgatatgtgcacaaattgatttagattatcttgacaagtccagttagtccatccaaccaaatcaactcagaaaaaggaatctaaggagtcaaaatagataattcaaatcaggttgcatgcacaggcacagccacaatgcatcttagcccaaatgacctgaatctcattactaataattcttaattattcagtactgaaaatacaaaatgtttagtcagaacatggtttgggatttaaaaacagagaaaaataagtgaataccaatttttggtatgtggagctgagctacagaaagctataacaaattaatttgaataattatcaataaatttaagaaagtaaatgtgccctaaaattctttcagataatttgtttatccaaatagtttaaatgacctattgtttatcctgctatacaaatcctttttctttagataatataagatttaatgaataaacacacattacaagttagtgacatttacataaagaatcattaatcataccaccttcaaatatatttgcataaatattagcagttaccaagtcctttatcatgtacggcctccatgacttagtctagatgagaataccaccttttgcaattatgggtaatacattctttttcaatctacttttgaatttgaggattggaaccaaagtttatcgtaagcaacggtgacttactcaagtttgtctatacatctgactgtcacatatgtaatcttcccaattttttttcttgcctctggctattctagtctttccctaaaacctactaaaagttactcattttaaagcaattgctatttactgtgtactactaactgctttctgtgaaaaatgtgtattcttggatgttgaaatacagggagaagagatgctccaccaatagctttgtaaacttttcccattaaagtagtattccacaacatgcattcaaatgtcaccacgaatactgatgatcctgtaaagtggcactgtctttcaagagacaagattgatgaggatagaaagaaccagataaagaagtctttgaattctagactattaagcagtagagagtcactgcataacatttttataaggagtggttggattaaacaatattttgggaatattcaacaaatatgatacagcatactagtaggaattgaaataaaatgctttttgcatcgagcattcaataggctgttgccctactaagatgataactactaatcctttgctagtgaaaacccagactttaaattttttttttgaaagcatttaactatttatgttggttgatgaagtcaactgctcaagtgagactgataccttggaaatgtctagctggtgttaatggttcagtttgggagctcttggttgggaaagcactgagctcagctcttgtgactaagatagcttgattcactcatgtctccaacaaatattttcaaatatctacagctatatgtgaaagctgacaaatttaagaaaagaataaaagtaatgtggtttccacaagttgatcactttttgagtataaaaattagggaatggagtgtagagggtaaaagctagaatatccattccttcggttgagatttctgatgcattattattgaagtttattgaagacctagagtttcaagaatttcacttaaataagaatatcaatttaactatattatccttctttcgtggaggctttcttaggtacaacgttaggtccaatttctcaggagttctctttgtgagcagcgtgtactcctctgtctcttgatgtggggccggccatatgactgatttgggtatatgaccaaagaggatagattgccaggtcagaagccaggcctttggggactttgtatgtttctgcttgctgtcttaagtgtttgccactgccttgagaagaagttagctccaagtccaaacagagacttaaagagcatggccagtcagacacccaaacatctattttaagaggcagagcaatgacgcaccaggtgctgtgtacagaagttcagctttagatgaaccaaatcttacctgcactgccctgcagtcaagtaaatgactgttatggaccacagagctttgaggaagtatgaaacacagtatctttgtagcaacagctaatggatacagtggcaaaacagggattagaactgaggcttggaggctcttatttgaatgtagattttatctatcacttttttttcctgttgcactaggcatgacaccgtcatatgtagaacttaatctgttctatttttgtgccctttccattgcctttttcagtaaccttttaactaccttgcctttccattttttgttttgttttgtttttcttctttgtttttttgagacagagttttggcctgttgcccaggctacagtccagtggcacagtctcggctcactgctgggctcaagtgatcctcccacctcagcctccggggtagctgggactataggtgtgcaccaccacacccagctaatttttgtagagatggagttttgccatgttgtccaggctggtcttgaactcctgagctcaagtgatccaactgtcttggcctcccaaagtgctgggattacaggcgtgagccactgtgcctggcctgttttgttaatatgtatgtatttccctgtgctttggaaccaatttttccactttactgacattttgttttctttccttggaaacttaagtctttcaaataatggccagtttctctaacatttctttccaccttaagatccttacagactttgaaaagaaaaaaaaaatacactcataataatcattcttattatcttattatcatttttaccttagtttaatcttatccaaactaggtcgtgacaatttagggaatacttccgaagacttgctctggtattttattttttaaagagaagtccatatattggaatgcatgaacaagaaatgcaaagttagaaacatatcccatgaagcactgtgaacactctgacagctgcaatttatcaacataaattactgtgcttagctgcaaagcttttgtcacagggagacagggcacttcctaaatggcttgctgccctctttaataataatcttagtttttacaatccagacaacctagggcaagagacagcctgatgcacatagaaacagaaaaattcaggtttttatgtacatcaccgggagcactgacatgctactctattcatttttagattagagtcttttcccccttctgtctacatgtggcaatagatgacttagaaaagaaaatgtgggcaggagagccaggataggaagcttagcagtaaacaagtcagcctgtctgctgtctcactttccttttaatcaaggaaaaggcctaacagaattcactgtcatcgtcttagtggtggcttctaacagcactggatagggagaatccttttatttccagcatcacatgaacaaattgatttttaaattcatgcatctaacatgtgttcctaaagccattaccatttagtaaacagcataactaaatgtctttaaactactttagacattttaagcactaatttttctcattttaaaaaagtttcaatctgtgtgttagagatattcgagatatgctactacataaagttttgtacctattcatgaaaatctaattttggggggatgtggttgaattctgtatctcaatattggacttttctaatacggtggatgagctgaaacctgttccctggtccccttaactccaaagcctctgctcactctactgtacatgctgcctttacagaaagcccctgtccgtaagctccattttaagaaaaggagttttaagactgctatccataatgccaaatttctaagctgctttcttctagtattggaaaaacagaaacgtctagtttagccattataatcaggaatcaataacatgcatatctgctaatttccctgcctttatggtctgtgctcctatccaaaaagggttgtaaaggcaagaacaaagttacctatagtctctctctctttttgagtactttcaaattcatcatttgtcaacagatgtactgcagtccctagcttcagtacaacaggacaccagtaaagtcacctgtggtacacagaataagagctgcccaaagatgtctaccttctaatccctggaacccgtgaatatatatgttacatggcacatggggaattaaggttgcagatgaaattaagtttcctaatcagctgaccttaaaatagggagagtatcctggactatccaggtgggcccaatgtaatcagaagggtccttaaaagtcaaagagggaggcagaagaggaagtgagagtgatgtaatatgacaaatacttggcccaacattgctggcttccaagatagaggagaagaaccaaaagccaagaaatgtgggtggcctagaggctggaaaacgctgggaaacagattgtcccctagagcctccagaaaggatcaaaggtctgctgacatcttgttttagcccagcaagacccatttcagacttctgaactacagaactgtaggaggagaaatttgtgttgttttaagccactaagtttgtggtaatttgttgtagcagccacaggaaacgaatacatcatttatttttaagacaggttaccaggaaggctatctacattacagataactgggagacaatttgacaaatatttgacaaattatcagaaatgtttttgttgtttaatggcaaaagtaaaagaataatatgcttttgttttcttttaatttatttttccttgctgaattgtgtcctttaatttataactacaattgctttggctgttatttggcactccaaatggatcagaagtaaattgagactgataaataatttttgtaattaaatacaatattatagcaaagaagaatttaaaatataaacagcatcttacttcaataaaaatgtgttataaaagaatagaaaatcacaagtaactaaataaaaaaataaataaatttgactttatcacaagtaaaaacttctgtgcatcaaaggacaatatcaaatatgtgaaaagacagtccacattaaaaaattttgaaatcatatgtctgataaaggtctagtatctagaacatacaaagaactcttggaagccaacaatacaaaaggcaaataacctacttttaaaaagggcaaagaatatgggtaggtatttttccaaaaaacctcaaaacaattgaccaataagcacgtgaaaagacgctcaacatcattaatcattagggaagtgcaaatcaaaaccactatgagatactaattcacactcattatgatggctatttaaaaaaaaggaaaatggtgaggatgtagagaaaatggaactataatacataactagtgggaatgtaaaatgacacagcccctgtggagaacaatttggcaattccttgaaaagttaaatatagaatttccatatgaccccgcaattccactcctaggtatacacctaagagcactgaaaacatgctcatgcaaaaacctgtacacaaatgttcctagcagaattattcgtaatagccaaagagtgaaaacaccaccaatgtccataaattgatacatgaatagacaaagtgtagtatgtctatacaatggaatattatacagccagaaaaaggaatgcataggtgaaccttgaaaattttatgctaagtggcaacagccagacacaaaaggccacatattccatttgtatgatatgttcagaatagtcaaatccatagagacagaaaaattatttcattgacacataaatgagggatatgaaatctattcacaataggaactcatggtaggtatcatttatatagctgagaaagctctcaggcaatcacacacaggaaaatgtgtcaaaaatatctgcagaaaatgttatgtgaatgtcttcatacatccattatatccttattcctccctctgttccaaatttgagctttactgaatagagtgtgagcacctgcaggcaggggctaaatcttatttatctttgcattctcagtgctgaacataataggcacacaataaatttgttctataatgggatgaagagatcaaagcaaagagtaatggccctcagtaatggctcctgacaataagaaagcccttgtagttaggaaatattcttaaatccctcaaatgcttatttaagatacagagagtgaagtattaccttatgtaggaatgttcagtgaccaaaatgggaaaattacaaatatctgttgctttaaattctttaatttttggcaaattgaatattatgcactttttgtatttttattataaataatttgtttcagtactatgacttatttcagtataaatgaaataagttgaggagggttatttaaaatggtaaacatttaaccatctaatggttaattaaaatgaggaattcaagtttgaacataaccattaaagtctttttttttttttttttttttgacagagtctcgctctgtcaccaggctggagtgcagtggtgcgatcttggctcactgcaacctctgcctcccaggttcaagtgattctcctgcctcagcctcctgagtagcttggatgacaggcaggtaccaccatgcctggccaagttttgtatttttagtagagacgggatttcagcatgttggtcaggctggtctcgaactcctgacctcgtgatctacctgcctcggcctcccaaagtgctgggattacaggcatgagccactgcgcctggccccattaaagtcttttaattcaatgaagggttcactcagccttatttgaaaacatatttgcttacagataattctattgtaatattttaatcctccaatatgtgcttataaggaaattacaaaataacaatacatcattttaattttatctttactaaaagtaatgtagagattaaggccttctgcttctctgtcaaaaaataaaaaagatcaaacaataccggctgtgataagcatacaacttgtgattatattgtgctaataggtccaaggatctatggagataaaatctgattaatatatttatcatctttttatgtttgttttataaaagaggattcatgtttctatttcataaagagacatttaacttcttcatcgggtcattctaaagttacctttaaaacctaagaagcaccttctacctcttaaccaaagaaaagtcaaatatacgcagaatacagagggatacagaaccagctaagtgtcgcaaagtcacaagccttctttcccccaggaaaataaagatcagaatgctatgctagagtacatgttcaggtttttgaaagggatgtaaggatatgcaggtaatgagcaaggcctcatttcttttctgcatatatattagcatggattttagcctatttatataaaaaagtcagaaatataaagcagaggagtttttactggaactatgatgactccatgtttcgtatttgattttctctgctgttcacatatgttttcttgattccttgagaattgtctttttaaaaaatttgtgagtgtatcatttacatgaactaaatgaccaacactacttgccctgcctaataaggagtaatctctgattcactcaggatacgtggaggccttaaagtttgggagtccttaattgcgtttatggctatatcttgctatttggcacctgagtgtgtttatcacactgtcttacgtatggtaggtgcttaaccaatcatgactagttttagatatgtttacttggtgtcccaaatagattctaagtaccttgagtgcagacattatgtattacatgtttttagagtatttcacaacctttagcttggtgctgagcacatgggaggtgccagttagccaaggtagtgtagacccttcttttcattcttgttatgagaagagtatagatgatattgggactccttaactccttacccatttaccaagacacatacacatgcgcacgtgtgcgtgtgcacacacaatctgtatttgatgaagcagatgcagattaatggagacacatttgatcacagggagttttatttttactctctgtgtcatcagcagtttttgcatattacctctagaaaatgttcagaaaagttgtactggtaaatagaattccaattctttgtgatggaaaaagtacttgagcaatagcgagcctatggagacagctaaatcagcagctggcagggccctctctccattctcccctctacggatcagcagtccttggtattcagaaagtagattgtaagcaaatatttttttctagtgaggccggaagatttactgtgtagtattttacagaaaatataaagtctttgataaaatgtaaaagtcagttgttgagataaaatatgactacaatgaagaccactataaatttgagtagatttttcaaagtagcattataattaagacctaatttctctctcctagcagtgtagaaggtggagaggaaagagtattatgtgacaggtaaggaaacggaggcagataaagtctacatgatttactattgattgggagccagaagccagaactcaggattcctggctaaatcaatcaaaaaattattaatgacttctactacttataagatattatactaaaactttctttttgagataactgtagaagagttaaaaagacaatatataaagatgtggtaagttaaattacaacagaagcattatagatttccaaagtaaatgatacctataccaaagggggaaaaaagaacagaaaaaagacacctcaggagattgttttgggctgtggtgttttgtagatagtaatttcccactctaagttttttctccttccatattgaacactgggactggaagataaaaccatattgattttctgtccttcaccatcttgcccaaacttctgttttttaatctttcttttagatattggaggaaaacgtttgttgtttctcatctagagttaatcccttttcttacgttccatggctcctcattgcccatttattctatgcccttactcctcagagtgcaatctgtgagccagcagcagcagcatccctggggagcttgttagaaaggcaggatctcagtcctcaccacagctctagagaggagaatctgcattttaacaagacacattccagtgggagacctgctgatctcggccattctttcaaaaatcagcccctccatttctagcaccattagtctctctttttccctcactatctccttttcccttcttgaacaatccaggggtctttattaagaaacaaaccaagaaacatccctccctactccccatctccaatgactgatatccctttcagctttcagagcacctcacttctgtttctgtggttaccacgttcctggaatgaattttatgcccctgctctctttatttttaattcagtcagtttcttcttaaaacttggaaactttcactctgaagcagtttgaacacataggccacatgaactcacacacgtgcacgtagaggcacacacatgggtgcacccacatgcacacacacacgtgcacgtagaggcacacacatgggtgcacccacatgcacacacacacgtgcacgtggaggcacacacatgggtgcacccacatgcacacacacacgtgcacgtggaggcacacacatgggtgcacccacatgcacacacacacgtgcacgtggaggcacacacatgggtgcacccacatgcacacacacacgtgcacgtggaggcacacacatgggtgcacccacatgcacacacacacgtgcacgtggaggcacacacatgggtgcacccacatgcacacacacacgtgcacgtggaggcacacacatgggtgcacccacatgcacacacacagatgcagatgattaactctgatgaggttagatcaacttttaaaatgaccatagttcctatactgatgggaacattaattatctgagccacatttggttcctgatgattttggtgtgcccactcctatcatgaatctattcaggatcatctacttgtctgtgatcctgcttaggtggctggactgacctacaccaggccaaatttactgaatgcccctgcggtacaactgtcccaatcttgaaagggaaatcttgtatctctgcataaatatcccagcagtatacacagatgcaggttcacgaaagtgaaacaaaatgagaccttgtacttaaggcctatctaagttaggttttcttcctgaatccttctgctgggtaaatcctagacgacagaggtccatctgtagtcttgtgttagacgtgaagaaaaggaggaggttgccaatagattccccaccatcaagtgtcataggaaaaagcttataccaatgaggaaccaaaaaataaaaacaatcttcttcttaattccaatgactttctgaagtcatttcatacaacaaggttggaaggttgagatgttttaaaatttactgggtaccatcacccactcaccttctacgggttttgagcaatctgctcactagtgattggatgttgtgttattcatcaggcctggctcttatgaagaaaaatgaagagcataaaagaaaagaaccaccacagtgaaaatggggctgtgctgaaaggttaatgtgctcttcagcctaggacttcagacagaacacggagcggccacacaatctgtttatctgatgcatgcagacagtactgtcatgcttcacctttggaaatgggccattacttctggtgacagattatgaattgtggaatatggctggcacgtggccagacaatggagagttcataaatcagactcaaaatggaaatacctgagtaaaattcttgagttatttgaggggttggaaaaggatatgtaatgagagaattcgttaaacccatgtgcgtggatgtgtaggtgggcacgctgtgtatgtgtatgtgtgtatggggcaggtgttgatttttaaaagtcctttgttaaggttctacaaagaagtattttttgttttgttattttctggttggctgaagaattttgcttcagcatggaatagagtggtagttggggatcagggtaaaggatggttgggataaagattttggtttttaacaggaaattggtttgagccttccaaaaaaaagagagaatcaatcaactctgaacaaaaggagtaaatagttggtctacagggattaatgtttctttattttacaaataatctgaaaaacaggcccatagatctggaaaacagccacaactgcgtagataatactacacaaattggtaaacggatgagagtaaattaaaatacaggtttataagcatgtgaaaatagccagaaaaatatcaactaaaataaagtgttgatgcataaatgcccttgaggaaaaataacctaaactccttgtaagaagacgggctctaaagttttgttttgtgatgaaggaatgaaacctaaaagtgatttttaaaactactatctgaaaatatgctccaatgtgtccccaaagaccagcacaggtaggtaatcctctagaaaggtactagtaacacacaaaaggtaggattccaatattggcaactcatgctaggttgattaagtgcttatgaccaaggagttgagagtggttgtttagttttcctcgtactcaacctcagacaacagccatcaggctgagggtaattcttcatcaggataggaccacaagagcttgttctttcttgagaagaaaaacaaggataggtaaatatatagatcattactataatgtcaccagcaaatttttaagtagttctatttgaaaaaaaaatcactatttaggcatttaaaaaatgtaatatataataccatgtacaaaaagtagagaaaacttttataagaataaaagctataatcaagacttttagtaccatctctaattatatacttagtaccacctctaatattatactttgtaccatctctaataatatatactctgtttatctaaaggctacctcatggatttttagagttctgataaatgtatcaattattttcagctacgaagtactatcctttttttttttttttttctgtttattacgaatatcaacgacttaagttctctggccaaattagtttctccagtgtggaactaacttctatagaaaccctctagtctttttgtacagttgtgacattgactaacatttttacatcagtggccagactaatcctcaggcctggagtcccacattttaggccaccagcaaactccctgtcaggtgctgcctttgcttgttgctggcaggagagtccagtgcaaccggtaggaaaagatccttcattagcaggtgctaaaatgacgggaagccccttacagagataacacatcctacctttctactttctttttctgcttaaaatgtgccttcaatcttccttttaaatggatttcctcagtttagagatgtgtaatacgaaggcatgcatcttacctatgtggcttctgatccctctgggcacctgtgtctggatacagacctgtgcccacctgcatcccaacccctgacgaggcacatctctgctggtgggggcctgtgtcaaccctgaacagctccccaaggaagctgcttttctgggtgtctgtctagccagctaacctatcatgttcatttttctggcccttagttaaaaatgctctattaggcagggcacagtaagtcacacctgtaatcccagaactttaggagacaggcaggtggatcacttgaaaccaggagttcgagaccagcctggccaacatggcaaaaccctgtctctactaaaaatacaaaaaattaggcgtggtggcacctgcctgtaatcccagctacttggaagacagaggcaccagaattgcttgaactcaggaagtggaggtttcagtgagccaagatcacaccaccgtactccagcctgggtagcagagtgaaactctgtctcaaacaaaacaaaacaaaacaaaacaaaaaaaaacaaaaaaacaaaactgctttattatccaagtgttaaaaaaaggtataggctttctttgtcaagatactttctcgaagtcaaagtcttttatcagtcttctactgtttttcagtagggtcccggtttattcctctgtcaggagcaatatacattccagtatcacacacaccaaaactttaaatacgttggtcaattttaggttatatacattatctatgtgaagtgaataatgtgcattttttctatgtttcattgcacctggtacaagtttaaagcataataatacatttccaggccgggcgtggtggctcatgcctgtaatcccagcactttgggaggccgaggtgggccgatcacgaggtcaggagattgagaccatcctggctaacacggtgaaacccagtctctacttaaaaaaaaaaaaaaaaaaaaaaaaattagccgggcgcgatgatgggcgcctgtagtcccagctacctgggaggctgaggctggagaatggcgtgaacccgggagacggagcttgcagtgagccgggattgcgccactgcactccagcctgggcgacagagcgagactacgtctcgaaaataataataataatacatttcgggctactttgtatttattctgttgaaagagaatgttaacagtctgtcttgccctgatttttcattctgatattatttcactatttccttctaacatgtctccaaaagaaattactgccagacatgtgtcttagagaaatagtgattcaataattatcagtaaattgccagataatctttaaactagccaggagtattacaagcaatatttatgctaaaaatcaatttccctacctcagaagaataattgtattttaaggtttctgatggaaaccagtctttgaacatccaagcattagacccagttccttaccctctgcataaggcatcctgttaggggctctaaagaaaatcctcaagaggtatgaaatttatatagaaggtgacacaagcttaacttcatagtaagtttaactgcattcaataagtaattcaatataaatatataaagaatggtaggagttagcatgctttccaaatgaattatagaaagaataattgctacaaaatttactacactggcactgtatagaaaagttggatgtagaaagagagataaaagttgcctttcaaataaatgggtagcctttgattaagaagtaaggaggaaagcattttgagtacaaaagctccatttgttaattcctctaaatcttcaacaaacagagtacaaagacagagaaaatgctcttcaattactttttttgatgtgagctaatacagcattaataacaaagcctgtaaaacctggttatttaagataactttaataaatacgaagtaactggtgataaatttgacaaaagatgtgcaggagctataaactaagaattataaaacatcgctgaaagaaattaagtcccagggaaatggaacaatattgtgttcatgggccagaagattcaatattgtgaaaaagatcaaaactagaggatttacactatctgatgtcaagacttattataaagctacagtaaccaagacgccgtggtattaggatatgaatagtcatacaacaatggcacagaaagtctagaaatacacatacacatatatgaacaattttaacaaaaatttcaaggcaattcggtaggcaagggaaaaaatttcaacaaatgctgttgcaactataatatatccacatgcaaaaacatggacttcaaaccttaactcatcatttataaaaataaattcaagatgtatcatggatctacatgtaagagcaaaaactataacatttccagaagaaacataagaaaaaaagggctggccacagtggctcaagcctgtaatctcagcactttgagaggctgaggcaagaggattgcttgagtccagaagtttgagaccagcttgggcaacacagtgagaacccatctcttaaaaaaaaaaaaaaaaaaaagtaaaaatacataaaaaaggaatatacaagatgatgttttagagaccttgtgttagacaaagatttctgaaataacacacaaaaagcatgaattatgaaagaagaaagtcagcaaattaaatttgatcaaaattgaaaccttttgctctttaaaggaaactattaagaaaatgaaaaggtagcctgggaaaaatatttgcaaaacatattttaaaaggcacttgtatccagagtatataaagaactcttacaactcatcaacaatccaataaaaatgggcaaaatatttgaaccatggtttttcaactatgctatcagagacactggggatggataattttttcattgtggggaggctgtcctgtgaactgcaggttgtttagcagcctcccaacatccacccagagatgccagtaggatctgaagtagtgacatcaaaaaatgccttgagatatttgccaaaggtcccatgggaagcaaaattgcctcagatgagaactactgatttggataacatgttaatcagagaggaggtacagatgacaaacctacagaacctatgataatcaactagaaactatggaaaacaacacagtttgataaagttatttaatatgcaaatattagcaagatgaaaatgcaatactgtttttatgcctgtactgtgccgtttaaattactagagctttgtagtaaatgttttcaaatcagtaattgtgatgcctctagctttgttctttttgctcaacattattttggttattcagggtcttttgtggttccatatgaattttaggaatgttttttctatttctgtgggaaaaaaaagtcattgcatttcgatagggactgcattgtttctgtagattgctttgggtgggatggaccttttagcaatattaattcttccaatacgttaacatgaatatctttccatttatttgtgttgtatccaatttctttaatcagtgtcttatatttttcagtgtatagatctttcctccttggttaaatttgttcctaaatattttattatttttttgtagctattgtaaatgggattgtttccttgatttctttttcaaacactttgttattagggtgcagaaatgctactgattttcatatgttgattttgtatcctgcaactttactgaattcatttattttaacagttttttggaggagtttttatgttttctatttataaaaaacataaaacattaaattgtctatacagatgacatggtcttataatgagatcaatttaatttcagagacaatttaatttcttctcttctgatttggatgtcatttatttcattctcttgcctaactacactggctaggacttccagtactatgctgaacagaagtgttaagagtgggcaaccttgtattgttcctgatcttagaggaagcttttagcttttcaccactgagtatgatgttagttgtgggtttttcatatatggcctttattgtgttgaggtacatactttctatacctaatttgttgagagtttttataatgaaaggatgtcaaattttgtgaaataccttttctgcatctattgacaggattacatggtttttgtccttcattctgttaatgtggcatatcataattactgatttacttagcttgaattatctttgcatcccagggatagatcccacttgatcatggtgaataatccttttaatgtgctggtgaaatcagtttgctatgttttttcatggaggatttttgtatctatgctcattggtgatattggcctgtagttttcttttcttgaagtgtccttatctggctttggtatcaatgtattacatgtttcatttatttaagttaaataaaaggactagaaacaaaaacaagaaattgctaactctgaatgatagaaatataaatgagaactatattatttttctaaacttggcatttcaagaaattatcaaaagaattcaaagtttctagaaggtaaaataaataagcacgtgtttaccatgtcagaagacaaagtacaaattcatttacaatacatacagttcaataaatgatagaaaagaatttgttcaataaatgggaagatgaatgagcctactgaaaaatgagcaaagacaaagagtggtcaattgaaaaacacaaatttacaaagcctataacaattaagtaattatattaacaattaaattgcaaggaaattttctacactagattgaccaaaaaaactaagtttgaggatatatatatatcttcacctccaccccatgatccagctgtcctacatctggacattgggtcctcttgactatttatattaaatacaagtacaagtgcaaggattttgattgcaacactgtaataaaaaacctagataatccatatagaaatcatattggaactagttaaataagtcaccgtagctctatacaacataattctatgcacatattaaatgaattagttagatctcatttgtaagataagactgtatatttaaaagacagaaaatatgttcttaagtggaaaaagcaagtgtggaagattatgttcattattactttttggttaaaaatatacatatatagacataggaaaagttctaggaagaaaaatgtcaaatgttagaagtggtaacctatgtggttagattgtgataggacctccattttgtatgttttatgtgtctgtactgtttcattacctcaacaatgtaatttttatacaaattgataaatttttattttaaaatgtatttagttttcaagcagctctttatcaaagacatggttctataagtggcttgggatcctcagtagaatttctgaagattttatttaaagggagtgagaaagtaatagaatagtatgtgtttctttaggcaatgtgctgtataatattttattgtaatctagagactttgtggtaattactaaagttaaagcagtattaccttaagctgttgactcccctcctaagtaaaaataattttaaagaaacaaaataatctatgcttttccacatgaatacagtgtttgaaatatttatatatacataaagtaggtcatatttcaccctagttgtcatcaattcatctaattcttgacatgatatataatttttaatgacttgcaaaaaattctggaagaactctctccaaaatcatctaagcattaagatcaaaagttttagtgacactaaacagaggcaaaacttaagacaatacttcctccttttctatcataaaatagataagtttagctcacaaaaacacagtacaggcagcaatggagattttccatagcatcttttgatacatagtaccgctgcaaacttcaacaaattcctaagacattttaaaattagcaattcagttactagctccaaaataaatcattgtatttatgcaatggctgagacagtcttaggaacatggtaggaagtctctctgtgtctgagtgactcaacagtctgacagccaccccaagtaatccccttgaaggtccaaagtcagaatcatttctaagatttgtcatctctagtagagtagctaatgtgctctcttggtcccttttacttaagtgaattcaataaatgatgctggaagtacttcactaggtagagtctgttaatttactaagaaaggtgtttgacttcccatagaatgtacaaactgagtttgtactgaagatttctctaagaactgtcgtaatgcttggtatttaaagaataacaaccaaaaagaatacattcagctgagagaatggttcattttaggtggcttaatgaagaaataattggatacaatttgacatttacaatttgataatgataggtagactgtacttgtccctttaccaggagaacaactatagaacagcttaggttcatatgcagaagacaccttattttttttctgcctttttttatttttttgagatgcagtgtcactctgtcattgcccaggctggagtgcagtggtgccatctcggctcactgcaacctccacctcccgggttcaagtgattctcctgcctcagcctcctgagtagctgggattacaggtatgcaccaccatggccggctaatttttgtatttgtagtagagacgggatttcaccacgttggtcaggctggtctcgatctgacctcaggtgatccacccgcctcagcctcccaaagtgcagggattacaggcacgatccatcgtgcctggcctgttctgcatttttattattacataaacagtattctggaaaggctggaaaatttaaaaatcgcctctcatcttattatgttttcccactttctgcctttatgcacataagtgattattttacacagtttaatcacaacatatgcaattttatatgatttttgaattcattttcctaatgaaaaagtgtttctcaataagcaactttcttcttaaaaatgacacagccatttcaagagggaagggtagaaaaatattttaattgaatcagctacttatgaatatagtattttatattcctttttgtaatattttggaatctcagcaaagtcgtagatcttttcctaattctgctctcattaagttactctgaatcaaacccataagtctgagtctactccgtagtgcagtattcctgctgaaatacttagagattgaagtgcatttgttagacacttgcaaattatcattcgcttaatctgtaatgtaaatgttcgctctttttcatttctaattttacttgcttgtgatttctccttttttttgtttcttgatggctcactgtccagtagtgtctctttttaacaaatgttttttgactgcttaacaattttgtgatttacaatttctcctttgatcatctttgtgtctttcatttgacttccttatattcactgtattattccatttatgccttcttgacttaaaaactgatcctttttcttttaaaaatataagtattaaaagctacatatactgtatccggaggtgtgcggggattatttttcaattcttaaaatgtgcaaatatgccttttgatttaaaagttgcttaaaggtacattttttaattttgaggatatgttagttatgaatttgttaatgattatattttgtattttattgcattgggtcagactgtagaatgtatttatatttcagggctaaaacaatgtttttgtcacttagtagtccattttgtaaatttctaagcaagtttaaaaatggtttctgttatacaggttttaatcatatgcatatatatgttgtatttatgtatatttcacatatacatatatgtataaacatatatatgtatatatatatttatccatattatgtaatccttactaataattcacatctttcatatctttttgtttacttacttttcttcctttcacatcttttggttacttactttttttttttttttttttttgagacggagtcttgctctgtcacccaggctggagtgcagtggcactatcacggctcactgcaacctctgcctcccggattaatgccattctcctgcctcagcctcccgaacacgcctggctaatttttttgtatttttagtagagatggggtttcaccatgttagccaggatggtctcgatctcctgacctcgtaatctgcctgcttcggcctcccaaagtgctgggattacaggtgtgagctaccatgctcagccaaggttacttactttcttaatctgtcttgggcggggggttgacagaggttaattaaagcctataatcaccattgtgtttgtcagtttctttttttaaccttcctttaatttatgctatatgggtttttgtgcaatagaatttgggtatacatacttataccctcattatgacctttaatatttactacaaatttcttatttatagctctgttgacatagtttatcttgaatctagctttgtacaataaaaatcaacagcagctttgttcttgttagtacttctagtatatttaacctttctaaatctaagttagaacgtttctaattcttattctaattcttctaaattagaatcttctaattctaataagaacctgttcttatgtttggtttgaagaaatcacacaacatacattcttatacacgaaagtgtctgtccatcatctagattcaaacttcctggagagctccatatttattaatttttgaatcctttaaaattcccagggccacgcataaagattggatttaaaatatatttgttagctgacttgaaatgtcaaaaagagtgaatcatcagcaatagagctgaaaaataatcgacaatccagtggtgataaatttggggcaggaattttcctggcctccctggaagcacaaaacctcagttgctacatccttcaacaatgtgcacctgctatttctgtacttggcacagactaatcggacagacacacttctagtcaataagaaagaaagcacagtcccttttcagtcaccttgcctttactaccaatcaatccacaggcagttctactttggaacgagagtttaactgccctgcttgcttctccgagatc

SEQ ID NO: 721 - DNA, 2168 bp, Homo sapiens
ggcgcgcgtgaacgcggtccccgggaccatgctgcggccacagcggcccggagacttgcagctcggggcctccctctacgagctggtgggctacaggcagccgccctcctcctcctcctcctccacctcctccacctcctccacttcctcctcctccacgacggcccccctcctccccaaggctgcgcgcgagaagccggaggcgccggccgagcctccaggccccgggcccgggtcaggcgcgcacccgggcggcagcgcccggccggacgccaaggaggagcagcagcagcagctgcggcgcaagatcaacagccgcgagcggaagcgcatgcaggacctgaacctggccatggacgccctgcgcgaggtcatcctgccctactcagcggcgcactgccagggcgcgcccggccgcaagctctccaagatagccacgctgctgctcgcccgcaactacatcctactgctgggcagctcgctgcaggagctgcgccgcgcgctgggcgagggcgccgggcccgccgcgccgcgcctgctgctggccgggctgcccctgctcgccgccgcgcccggctccgtgttgctggcgcccggcgccgtaggaccccccgacgcgctgcgccccgccaagtacctgtcgctggcgctggacgagccgccgtgcggccagttcgctctccccggcggcggcgcaggcggccccggcctctgcacctgcgccgtgtgcaagttcccgcacctggtcccggccagcctgggcctggccgccgtgcaggcgcaattctccaagtgagggcgggcctgggcctggggcgcgacctcggcccggcctcccttcgctcagcttctccgcgcccctgctccctgcgtctgggagagcgaggccgagcaaggaaagcatttcgaaccttccagtccagaggaagggactgtcgggcacccccttccccgcccccacccctgggacgttaaagtgaccagagcggatgttcgatggcgcctcggggcagtttggggttctgggtcggttccagcggctttaggcagaaagtgctcgctctcacccagcacatctctctccttgtccctggagttgcgcgcttcgcggggccgatgtagaacttagggcgccttgccgtggttggcgcgccccgggtgcagcgagaggccatccccgagcgctatctccccggagcggagcacgccggctcccagtactaggggctgcgctcgagcagtggcgggggcggaggggtggttcttttccttctcctccgccagaggccacgggcgcccttgttcccgccggccaggtcctatcaaaggaggctgccggaactcaagaggcagaaaaagaccagttaggcggtgcagacggtctgggacgtggcagacggacggaccctcggcggacaggtggtcggcgtcggggtgcggtgggtaggggcgaggacaacgcagggtgcgctgggttgggacgtgggtccacttttgtagaccagctgtttggagagctgtatttaagactcgcgtatccagtgttttgtcgcagagagttttcgctcttaaatcctgggggtttcttagaaagcaacttagaactcgagattcacctttcgtttccctttccccaaaagtagcgtaaccaacatttaagcttgcttaaaaacgaaaaccaaccgccttgcatccagtgttcccgatttactaaaataggtaaccaggcgtctcacagtcgccgtcctgtcaagagcgctaatgaacgttctcattaacacgcaggagtaccgggagccctgaaccgcccgctgctcggcggatcccagctgcggtggcgacggcgggaaggcgctttccgctgttcctcagcgggccgggcccttgaccagcgcggcccgcaggtcttccttctcgccgtcttgcagttgaagagctacatacgtagtcagtttcgatttgttacagacgttaacaaattcctttacccaaggttatgctatgacctttccgcagtttactttgattttctatgtttaaggttttggttgttggtagtagccgaatttaactggcactttattttacttctaaccttgtttcctgacggtgtacagaatcaacaaaataaaacatttaaagtctgattttttaaaaaaaaaaaaaaa

SEQ ID NO: 722 - DNA, 2505 bp, Homo sapiens
gtgcggatgcttattatagatcgacgcgacaccagcgcccggtgccaggttctcccctgaggcttttcggagcgagctcctcaaatcgcatccagattttcgggtccgagggaaggaggaccctgcgaaagctgcgacgactatcttcccctggggccatggactcggacgccagcctggtgtccagccgcccgtcgtcgccagagcccgatgacctttttctgccggcccggagtaagggcagcagcggcagcgccttcactgggggcaccgtgtcctcgtccaccccgagtgactgcccgccggagctgagcgccgagctgcgcggcgctatgggctctgcgggcgcgcatcctggggacaagctaggaggcagtggcttcaagtcatcctcgtccagcacctcgtcgtctacgtcgtcggcggctgcgtcgtccaccaagaaggacaagaagcaaatgacagagccggagctgcagcagctgcgtctcaagatcaacagccgcgagcgcaagcgcatgcacgacctcaacatcgccatggatggcctccgcgaggtcatgccgtacgcacacggcccttcggtgcgcaagctttccaagatcgccacgctgctgctggcgcgcaactacatcctcatgctcaccaactcgctggaggagatgaagcgactggtgagcgagatctacgggggccaccacgctggcttccacccgtcggcctgcggcggcctggcgcactccgcgcccctgcccgccgccaccgcgcacccggcagcagcagcgcacgccgcacatcaccccgcggtgcaccaccccatcctgccgcccgccgccgcagcggctgctgccgccgctgcagccgcggctgtgtccagcgcctctctgcccggatccgggctgccgtcggtcggctccatccgtccaccgcacggcctactcaagtctccgtctgctgccgcggccgccccgctggggggcgggggcggcggcagtggggcgagcgggggcttccagcactggggcggcatgccctgcccctgcagcatgtgccaggtgccgccgccgcaccaccacgtgtcggctatgggcgccggcagcctgccgcgcctcacctccgacgccaagtgagccgactggcgccggcgcgttctggcgacaggggagccaggggccgcggggaagcgaggactggcctgcgctgggctcgggagctctgtcgcgaggaggggcgcaggaccatggactgggggtggggcatggtggggattccagcatctgcgaacccaagcaatgggggcgcccacagagcagtggggagtgaggggatgttctctccgggacctgatcgagcgctgtctggctttaacctgagctggtccagtagacatcgttttatgaaaaggtaccgctgtgtgcattcctcactagaactcatccgacccccgacccccacctccgggaaaagattctaaaaacttctttccctgagagcgtggcctgacttgcagactcggcttgggcagcacttcggggggggagggggtgttatgggagggggacacattggggccttgctcctcttcctcctttcttggcgggtgggagactccgggtagccgcactgcagaagcaacagcccgaccgcgccctccagggtcgtccctggcccaaggccaggggccacaagttagttggaagccggcgttcggtatcagaagcgctgatggtcatatccaatctcaatatctgggtcaatccacaccctcttagaactgtggccgttcctccctgtctctcgttgatttgggagaatatggttttctaataaatctgtggatgttccttcttcaacagtatgagcaagtttatagacattcagagtagaaccacttgtggattggaataacccaaaactgccgatttcaggggcgggtgcattgtagttattattttaaaatagaaactaccccaccgactcatctttccttctctaagcacaaagtgatttggttattttggtacctgagaacgtaacagaattaaaaggcagttgctgtggaaacagtttgggttatttgggggttctgttggctttttaaaattttcttttttggatgtgtaaatttatcaatgatgaggtaagtgcgcaatgctaagctgtttgctcacgtgactgccagccccatcggagtctaagccggctttcctctattttggtttatttttgccacgtttaacacaaatggtaaactcctccacgtgcttcctgcgttccgtgcaagccgcctcggcgctgcctgcgttgcaaactgggctttgtagcgtctgccgtgtaacacccttcctctgatcgcaccgcccctcgcagagagtgtatcatctgttttatttttgtaaaaacaaagtgctaaataatatttattacttgtttggttgcaaaaacggaataaatgactgagtgttgagattttaaataaaatttaaagcaaaaaaaaaaaaaaaa

SEQ ID NO: 723 - DNA, 2196 bp, Homo sapiens
agttcaagcacacaccaactagctgtccaggaagcagcctaaccagagagaggggcgtgggagggagagaggcggggaaaagcagcgtctccgcttttcttctcacgtcttgccgcggagaagtgggttcctgggcagtgcagattttttttttttaattcaagattttctttaatttcccgcctaaagcctccccacggtagggccgcatcccctgtaataaaatgaattctgattcgagctctgtctccagcagagcttcatctccggacatggatgagatgtacctgagggaccaccaccaccgccaccaccaccaccaggagagccgtctcaactcggtctcgtccacgcagggcgatatgatgcagaagatgcccggggaaagcctctcgcgggctggcgccaaggccgcgggagagagcagcaagtacaaaatcaagaagcagctgtcggagcaggacctacagcagttgaggctgaagatcaacggacgcgaacgcaagcggatgcacgacctgaacctagccatggacgggctgcgcgaagtcatgccctacgcgcatgggccgtcggtgcgcaagctctccaagatcgccacactcctgctcgccagaaactacatcctcatgctcaccagctccctggaggagatgaagaggctggttggcgagatctatgggggccaccactcggcctttcactgcgggaccgtgggccactcggccggccaccccgcgcacgcggccaactccgtgcacccggtgcaccccatcttgggcggcgcgctctcatctggcaacgcctcgtcaccgctgtccgccgcctcacttcccgccatcggcaccatccggcctccccactcgctactcaaggcgccctccacgccgcccgcgctgcagctgggcagcggcttccagcactgggctggtctgccctgcccctgcaccatctgccagatgccgccgccgccgcacctgtccgctctctccacagccaacatggcccggctgtcggccgagtccaaggacttgctcaagtgagcagcgggcgggcccggctgccaaggaggagggagagcggcgggaggggccgcggtgccgggccgggagggaagagggaggctgcacgctcggcccacgggagggcaggctccggggcccgcagcctcccacgctgtctgagagatctcagactccacttgacccccggagggaaaggaccaaaatcaaaccgcaatttctaggtggtagcaaagggggactcgaaccagatgtcgtgtgttttgcatgcatgcttcttttccccatgccgcgccagtatttttcactgccatatgctcttgtcaaaactgcatttgttgtataaagatgggatcggtgtagttaaaaacttgcgaagggacttttgagttggctttctctgactctgtgttctcgctttggaaaaagacggccatcccttttgtgcaaaacaaatgtaaatattttcttgagatggatgcgattatgattgtctctgtccttgccacagtttttctagagacaatggagagagaaagagagagagagcgcgagagagatcaagacccaagttttgaatctcaaccgaggtccagggcatgacacctcctatgtgggttttcctttcgacgcagtgtaggtcaaaagaatgcatgcacgcttctaaatgaatcttgtctgaatatgtcgtgcaggctgtggtgccgttttccttgtaacaaggatttattagtgaattatcccaagtactccatatatctgtctgtggttgtatgaaatgaaaaaaggggcagagtgcaaagacccacactcacgcacacgcgcttcttctcccacccccacccccttcaaactttattcggaaccttcctttgctgttctggggccgctattgtaaaagcctgggctccctctagtagcttgcgccaccccccctcgctcagttattctgcatgcggggttggctctctctattatcagctttgaaaacttatcctggttttgggaggggtgccgtttttattttcctgaacatttgcttgaaatattttgttagggcctcaaagacgatacctgtctttattttttatatattcttgataactatgatatatttattaataaccagtgtttctggatgagatttcaaataaaaaagaacctttaaatcgtg

SEQ ID NO: 724 - DNA, 1925 bp, Homo sapiens
ccccacagtgagaggaaggaaggcaacagtcgccagcagccgatgtgaagaccggactccgtgcgcccctcgccgcctctgcctggccacatcgatgttgtgtccgccgcctgctcgcccggatcacgatgaacgcgcagctgaccatggaagcgatcggcgagctgcacggggtgagccatgagccggtgcccgcccctgccgacctgctgggcggcagcccccacgcgcgcagctccgtggcgcaccgcggcagccacctgccccccgcgcacccgcgctccatgggcatggcgtccctgctggacggcggcagcggcggcggagattaccaccaccaccaccgggcccctgagcacagcctggccggccccctgcatcccaccatgaccatggcctgcgagactcccccaggtatgagcatgcccaccacctacaccaccttgacccctctgcagccgctgcctcccatctccacagtctcggacaagttcccccaccatcaccaccaccaccatcaccaccaccacccgcaccaccaccagcgcctggcgggcaacgtgagcggtagcttcacgctcatgcgggatgagcgcgggctggcctccatgaataacctctataccccctaccacaaggacgtggccggcatgggccagagcctctcgcccctctccagctccggtctgggcagcatccacaactcccagcaagggctcccccactatgcccacccgggggccgccatgcccaccgacaagatgctcacccccaacggcttcgaagcccaccacccggccatgctcggccgccacggggagcagcacctcacgcccacctcggccggcatggtgcccatcaacggccttcctccgcaccatccccacgcccacctgaacgcccagggccacgggcaactcctgggcacagcccgggagcccaacccttcggtgaccggcgcgcaggtcagcaatggaagtaattcagggcagatggaagagatcaataccaaagaggtggcgcagcgtatcaccaccgagctcaagcgctacagcatcccacaggccatcttcgcgcagagggtgctctgccgctcccaggggaccctctcggacctgctgcgcaaccccaaaccctggagcaaactcaaatccggccgggagaccttccggaggatgtggaagtggctgcaggagccggagttccagcgcatgtccgcgctccgcttagcagcatgcaaaaggaaagaacaagaacatgggaaggatagaggcaacacacccaaaaagcccaggttggtcttcacagatgtccagcgtcgaactctacatgcaatattcaaggaaaataagcgtccatccaaagaattgcaaatcaccatttcccagcagctggggttggagctgagcactgtcagcaacttcttcatgaacgcaagaaggaggagtctggacaagtggcaggacgagggcagctccaattcaggcaactcatcttcttcatcaagcacttgtaccaaagcatgaaggaagaaccacaaactaaaacctcggtggaaaagctttaaattaaaaaaaatttttaaaagaccaggacctcaagatagcaggtttatacttagaaatatttgaagaaaaaaaagcgttatttatagtccaaagaaaccaaagacttagctcacctgcattctgactttgtttggagacacacacttcagcagggcggcgacttggcaagacaaatgatgagcaggaaaacaccactggatctcacaccttcaatccatgaccatcctcgctgtgcttggctgtttagtggtttggagcatagtgattttgagccattgagcggacatcttttaagatcgaactttctcatctgttctaccatgccacgaaggtgtatggtgtctcagtactaccacc

SEQ ID NO: 725 - DNA, 16142 bp, Homo sapiens
gcccccgccgcccccgggccctgatggactgaatgaaggctgcctacaccgcctatcgatgcctcaccaaagacctagaaggctgcgccatgaacccggagctgacaatggaaagtctgggcactttgcacgggccggccggcggcggcagtggcgggggcggcggcgggggcggcgggggcggcggcgggggcccgggccatgagcaggagctgctggccagccccagcccccaccacgcgggccgcggcgccgctggctcgctgcggggccctccgccgcctccaaccgcgcaccaggagctgggcacggcggcagcggcggcagcggcggcgtcgcgctcggccatggtcaccagcatggcctcgatcctggacggcggcgactaccggcccgagctctccatcccgctgcaccacgccatgagcatgtcctgcgactcgtctccgcctggcatgggcatgagcaacacctacaccacgctgacaccgctccagccgctgccacccatctccaccgtgtctgacaagttccaccaccctcacccgcaccaccatccgcaccaccaccaccaccaccaccaccagcgcctgtccggcaacgtcagcggcagcttcaccctcatgcgcgacgagcgcgggctcccggccatgaacaacctctacagtccctacaaggagatgcccggcatgagccagagcctgtccccgctggccgccacgccgctgggcaacgggctaggcggcctccacaacgcgcagcagagtctgcccaactacggtccgccgggccacgacaaaatgctcagccccaacttcgacgcgcaccacactgccatgctgacccgcggtgagcaacacctgtcccgcggcctgggcaccccacctgcggccatgatgtcgcacctgaacggcctgcaccacccgggccacactcagtctcacgggccggtgctggcacccagtcgcgagcggccaccctcgtcctcatcgggctcgcaggtggccacgtcgggccagctggaagaaatcaacaccaaagaggtggcccagcgcatcacagcggagctgaagcgctacagtatcccccaggcgatctttgcgcagagggtgctgtgccggtctcaggggactctctccgacctgctccggaatccaaaaccgtggagtaaactcaaatctggcagggagaccttccgcaggatgtggaagtggcttcaggagcccgagttccagcgcatgtccgccttacgcctggcagcgtgcaaacgcaaagagcaagaaccaaacaaagacaggaacaattcccagaagaagtcccgcctggtgttcactgacctccaacgccgaacactcttcgccatcttcaaggagaacaaacgcccgtcaaaggagatgcagatcaccatttcccagcagctgggcctggagctcacaaccgtcagcaacttcttcatgaacgcccggcgccgcagcctggagaagtggcaagacgatctgagcacagggggctcctcgtccacctccagcacgtgtaccaaagcatgatggaaggactctcacttgggcacaagtcacctccaaatgaggacaacagataccaaaagaaaacaaaggaaaaagacaccggattcctagctggggcccttcactggtgatttgaaagcacaattctcttgcaaagaaacttatattctagctgtaatcataggccaggtgttcttcttttgtttttaatggctatggagtccaagtgcaagctgaaaaattaatctcttagaaccagacactgttctctgagcatgctaagcatcccagaaacccaaatggggccttcctggagcgagttaattccagtatggtgtcaaccaagctcgggattgcttaaaatatcatccatcccacttcaggtcctgtcagcttcttgcagtcagagttcctatgagtaacaataggagtttggcctatgtaaggactctgagtttaggcttccaagatacaacaataagagaagaatctagcaacgagaatgacctcatttgctttccacatgcttagcctcattataccatgttatgtccaagttcacagccacaacatcagaatggtaattactgagcacaagttttaaatatggacgttaaaaaaaaaaatccaaggacctgtttttccaacccagacatcttttcattgaatgatttagaaagctttaagttgatccagcttacaattttttttttctttacctcctggaaatctcatatggtcttggatccgtcaaaaaaaccagtcagttcacttgcgctcaaagtatcaagcacaacaaagataaacagaagtgaggaaggttctgggttcactacatctggattttcaagacacctattgtgaagtcattagggaattgatgagaatatggcttcaagcacattttgcagtttgctacaaattctgttgtacataatgcagacgcacactcaggaggccaatttaactgttaacagtgcatggagcgaatgcagcattttaaaagatctaggtttttttaggtcattaatgtgtccttggttgatcagtcatctggtccctcctactgtgtgttatgaccaccacgtaatccattctcgctctttctgatttggggtttttcctcatccatcccattagtagggatgttttctgtgttttctagcaagaaaaaaaaatcaatcaatcaaacctgcatacatgttactcatgactgtcatctagtcctaaatctcttctgttgttgaatcatccttgcaaaacagctgaatacatctggagaaaacacagcacaccaaagaagcagaatactgcaaaccaaagacatttatgacttgtcattttctagcctaaaaatactgtgattacttttagaaatcagaaaacctctgcaactccgaatggcattcagctcttgcatttggcgcatcatcgggctgagcggaccagctacaccaaggacattagccaagccacccagaggggtggctttgccacaccagttgtcaccttcccatagcaagtggaagagcgcccacagaactctgggagattgcaaaggtcacaatgtgcatatttaccagtgaatggccccgggtggggccacgtgggggtgttcaaagcaagccaaacgctgcaatcattctttacagacacttgagactgacttttttatgaattacttagtcgaaaccaaagaaactttttctgcacctacttctgcaacaaacaaaactgtcccattaaaatgaataaataaatccgtaaatcaatggaaatcaccaccaataagaaggaagcacgccagaaaataaacgaaaacaaaaacagggagacacactgtgttcaaacagacctcttgggacattttttggaagcagattttaaagaaagggttgagacaaagatagaaataaggaagagcctcagtggctgctgcttcatttgacaactcacacggtaatcttaaagctgaagattgtctttaatttgtgcctatgcagtttttcaaaagaacacggaacagagcaacagaaacctcaacagctacaataccaaagatgaggatttctcacaccttttgtttcagttcattatctcctcttgcctggctaaaatactaatagcgccattgaactgtataaaggtaatcaattatgtttctctgagcaacaaaaggaaagggccatttatttgattttattgtttcatttcaattttgtcttatggttttttgccccaacatggaatctctcaaaagtttccatggactccaagtttaagatgttgggatattgaacagttctctctgctcagcagagggtagggaataacattatcacttgaatgttctttgcttaacccttagacttggttccttctatgttcagagtctcatcatcaggggaaggaaagggagtgagggtcagggataggggtcttggtgatgcatcctctcccgagccacagaaccaaagagtttatagaggaatttacagcctcgttttcatgtgattgctacatcctaacagggcttcatttgggggtggggggaaacatgtaaaaataattgccagtttctacttttctattagctttttaaaaatcagctgtaaagttgcatttctaaagaaagatatatataatatataaaatacatatatagatcaacttgacattggtgataaccaaaattattgctgtccaaattcatgtcttgttttggtccagtgcttcatttgctaagtattcggttcagaatttttctcatttctcatgccattccagagttaatttgccactgtggatgatttgaagtattcagatctctatggaagtttctgggacaggtttaaagtcaagatcaagcattttagcatttaacctgttgataaatggatccatggtgtacatgagttttatttgtattcggagtcatctctattctatccctcagcctcgattaaggtggtgagtgaagtgcatccaacagactcggcccagaactgggtcctgacagtggggtgctcatcttctgtaactgttgggaaggctcggtggtccattttcaccagttaaagaatatgaggccagcccagaaatctgttctccaggagctgccctgtcccatctgggtgtgccagaccccctcagtgagcaggtccaccaaagggacttctcacaggggaagcccaactcctgttgcaatgggttgatagatttcctcagggtggtaattaccaattcgtattttgacaagcctatgtgcaaccacagctggcactggggtgggcagtggtgttgggtgggatgggggagagtgtctcaatcctgaagagaaaatataaagcaggttttggggagacttctggagtcctgcccctagagagccccattgttgttctttgtgccccctcctcattccccctatgtgggtctccctatgcaggagctgtgagagaatgtgactctccacaatttttataattcatccttcctaggagattgttcattggctcttcccttgtgtccctttgtcccttgctcatactccatgtttcctttgtcaaaggactaagaaaagagcatatttcagcagaggagtgttcccatgtgggttgatttcaacttgggtatttctaaaagagtccttgtgacatgtgtccagtggaaatggttgctcttttccagactggattgaggaatggagcctgtttgatttggttagtgattctttgacatactaatctcagcgtttgggtctccagcatcctctgaagatgtctagactagtagaggctgcctttgtgacctgacattacaacattggtcaaaccagtcctctgataatcagaagaacatgtcataattgtttaaaaaaaaaaaaaaggcaagaatttctctccaaggagctttaataaatgtctcattccagataatgtcataccagagaaaagtgcttgcttttagaaaattatttacatacatatataaatatatatgtgtatctatacagttatgtatcaaaattttaagccctgcagaatttcaatttgttagaaatctaacagaaaaaaatttctatattgaaaggtaatagaatttaacccagtgagtttactcaaggatttttaaatttaagttaataatttcagagaaaataaccatttgggtgtggttatagtttagtatccattacctcaatccaaggaaaattccaggcattcctcaaccatcaggaaaaggtacagtgtgaaggaacagttctcagccaaatttcacattcttgaggcaacagaaatcaaaacactcagagccattgagtggaaaaacaatttactttattcctttacacaaataggcttgcattgtttttgttttaatgtgattttggtactagggatataattatttcattccaggaaataataaaaaaaaacagacagagccaatacatttctttttttaaaggaaacagcaacaacaataaaaactcagcaccaatatttaaaagcttttccaaaatgtaaaagaagtgtttagcttgcaccatgcataaaggtgcaggctagttgaaccaggaagcatggcacttcctctggagaaatccagaaagagttgcttctaagctcccttttccccctgcaggctcttggcaattgtaggctttagcaaatccagaataattttcaattcaagctaaaataaaatcaacatttggaatgtaaatctgatacacacacacttttctaagtcaaacaacatatttcaaaaccaaaaataaataccttttagataatcagttattttctttgtctatactgggcacccacctactagtgccagtaaattcaagttgaacagatttttaaaatcactattatctgggtatgggggaaacttccccacttttgaaaatgttggtagaattataggaatgtctgtttgattatcattaccaaagtgtcatgacagtatgcctttgtagtgaactcggattttcaggagtttgaatagttggatattttaaaatctaagaagaaaaggcctgtttccaatgttgttgaagaataatgaactctattaaaaagtggagaaaaagataatacatgtggtcaaggttgaccacaaggcccaggcacaactaccttggcgataatcttctagattcgtaacaggttagagctgactttttgtttttgttgttgctgatgctgtgtgattcagacttctcagcctaaccaggaagagtaagtggaaatggtagatgaagaaggggtagagctggtgtatctataactttctgatatttgtctgccaaacttgatatattagtaatttttttatctttagctaagatcaagtcacccctgaaacaacaggagattctagttttaaaataaggccacaaaaatccttacggaatgaagaatggcaccccagttggttgtataagtctcataagataatgatgttgattttaaatatggatgtctcaatgcctgttttctatcaatgatttgtttgtttccaaggtcggggagggaaagaggggagggtttatctgttttagaaagtctcagaatacttataaaatacagaagtagttattaaaatatataggacctcacataggtagatacagaacttaccattgaggctgatgggctgttgtgtgaatcacacaggaccttaaatgaggctcattattctcacacaccaaaatgactctgacagcctgaagcagttattgctagagcccaagctttccttggaggttttggagttaggttgattggaagtaaccagctaataccttttctagtggagaaaaagacattgctaccagcttgttcatcccatagaagtcttccactctgctccatttttagcagcaagcatttcatgtagcataaaccttggcagataagtgtgcctaaggtttatacagtctgtccgcttggatgtatacaaatttagatacatattttaacatgtgttctcatagatgactttataacaacacacattacctataggtgtctagactgtgtacatacaagtgtgtacagacaagcttcatacgtatatactgtaatccgttacaacaaataaattttaaatcatcgtttaacatgtatgtggtacttctacagtgtacattgttttcattatttattgtaacattgaaaaccacagtgcagggaaaacaaaagtatcccagcatcttcatcctgtacacttggaattaatttcatttgggcatatccaagataaactcaactttcaagaaatcttgtatattatttaatcatctgtgttaggatgacacctatgattgatgacttcggttgaatagctttattctggatttttcataactaaagctaaatccaaagacctgaaaaaggacaaaaagaaaaaaaaaaaaagaaaaaacaaagaaaaagaagaaaaaataataaagtcaagcgcaaactgatggggagacagtgggctctggtttccaggattgagacaatggtactgcggtcttggggagactgcgttagctagtggggagtggtgatttttttcatgcttgtcacatctaaatggtctttaacatgagaaagttttagaggttataatttcctgctttgtttttatttagactatcaaatgaagttatacatgttgtcagtcaaaaaatgaagacaccctctgccccaccccacagaatgctttttatcttgtctctttgggttatgacccaacaagctaagtaccattaatgtaattaacttatttaaattagttcctagtacataaatgtataggatttgggtaattatttaatcatccttccttagtttgattctactccttgtacttatttatcaaaacctagaccaatggtgcatcagagatgcaaaattctacttggaatactcttgaagtttagtttgctttataaagcagtgaaattctgttacagacagggaagaaatacaggttacaaaaagagaatttgggatattcttccctcttaaattaacttttaaaatagtctaagtaacaatttttaaattatttaacttaagttcgcagccccacctggtaccaggcgaacttcacctcttaattattgtggccctcggagccttcatattgtaacttatttatttaacttattcagcatctgtgaaaggtgcactgtatagtttatatttttaatttaaaacaacagagagcactgcagtttgtttgctgtcagaacaacagagcaaattttgtggacaagcaatgactattcagcctgaacctgtgcattcagaaaacataagctgagaccctgcttcaccagcctggatttcggggcttctatacagaaactggaaaaataaattttaaaaaaatcgtaaacaaaaagagagaaacccttacactagctgcttccaagaatgaactctgtgtgtatgtaaagcaacaaaacaaaaaaggaaaaaaacaaaaagcagaaaaaagaaaaaaaaaatgaaaaactttctatttctagtgagaaccaaagaaggctacctcactgactttttccatttgtaattttaatcgtgttgatgacaccaaagataccaaagatttctttctctgtgcggtctgcattttgcttgtgctcttttataatttgaacgattttctctgacatatggtatgtacagccacagctcagataccccaaagaaataattatctatgcgacggcggctgctaatttggaaagggatattttctgtgtttctcttatatgtttgctgtctgctcgacatgttcaagatgcgagttcagatgctgctgtaattggattccttaaattctgattacaaattgaggaaggaaactggttggaaatggccttcagtcctagccatggcctctatccccgctgggacctgtcacagtaaagactgccaattactgaaccacagaagctctgaccattgagtagttgagctggaagagaccttaggaatcatttagtccaagccccggtggcccagaggaatgaaatagttatccaaatcaaataactcttgagagtgaaagcccacacatgcctcctggttcctgccccagtgctccgcttattgtacagtgctacctctgcatgagagcggtcccacattgacaaataggatggtggcaatcctttagcaatgagcagggactggggtttatctcttaacattttcagctgtaaaattagtcacaagcattttcagtgtcccattagtacatagtcacatatggtcggttgcttcgtgaaggtggcctgtcttgaaatactagggctcatacgggatttttgccctaggaaaaacatgttgatcccaatgatgtgatcacttttgaacctttccattacaaagcattgtatagataactttttaattcagtaggaggagaaagttcattcttggcctgttggctttgattattatgggtactttaaagtcagtatttatcaagaaagggaacttgaccaccattggcacatgtgacatttaagctcttcagccttttcctttttagttgtaggtgtttacatttcatttctaagccaactctgtatttatgagagaagtttaagccttacatcatttgatactaaagggttatttgtggtaaatgaaaaatgaccccaaaattacagaggaatatgccagtttaagaaatggctacttaaagttgcttctctctttccttcttactcatgaaattaattggtcttcttcaagtttctttagattccattaaatgattaaatcactattaagagccattcatcaacgtgatttgtgtgttagccaatgaatctgtctcagcttttgaccaaatgggttttagacaaatgcaaagatctgcctctagtccatatggctctttttgagtgctagtattttgcatttcacataatgtagttattttgagcttttaaagagagcatttagacaaagaagcaaagagaggaagggaccaatcaactcatcagttccatgcatcaacaaagcatagctagtagaggaatataaatgacagattgacaaactgtaggaaacactgttactctctttctgaagttttcaagcaccatcctatgtgaaagttccctcctgtccaaacaagctcaaggcccatcttctccctatacaaggcaaacctgtaaggccttccttccaaagagtacattgctttggttttcttcctaaattcctattggaattagaactctcagaatccctgggagacagagcaaagatgacttaattcattgagcagcagagctccctataagtgaacatcaccttccccatctttcctactgccacacccatacgagagaggatctagaaagagcgatggcagcctgaacacagaaaacatccccacttggcagacctctcctcagcaatccccccagcctcatgcttcacttgcaaagtgtgacataaccacgggacgagtgccttgcttgaaccaaagcaacgatttagccagtctggacctctctgtgctttttttaattcttcctgtgaatacctcagcttcaactgggcctccatacagtcagttggtgggcttattgtactgtggtgctttgcaatgcaaccctgcaaagaacaagatttgtactaataccaaaggttctttctctatgtctcctcctctgcctccctcgttcttcccttttttctagttcttcacggttccaaagctttactatgaacctgggcatgttggcaatgcagaccgcgcaattccttaccgaattttctcagatatacctcatagacaatagtgtttagagtaatgttattatagcgtatgtaataaattattcactgtttcttttggtaactgtgatttaaaaaaagaaaaaagaaaaaaaagctttatacgttttaggttgtgcttttgtaatagatgaaaaaaggtgcgcttaaaaagaaaatgtatgtttttttccccctttggattttatttatgctggattggggaaagttgcagaatgagcccaaagtttacagtttcatattttgctgaagaaacaatctgtgttcatttgctctgttgaaaagaataattattttctacatttgtgccacttggtctgaacaattaattgttccgtgttaacagtgtagtattatgattagcaactgccaatcagtgctataattttatgcatgaggctaaaaatttagcagtgtgatgcattgtggtcttaatagcaacatttttcattttgaactagatcttcccctttggttcaatggactttatttatgcatgggcgcctattgtttgttagcagttgtggaacagttgtgtatacattaaactgtgaaaatgtacacagttcagcctcagacggtggtaatattggttttattgggagatgtgtcacctcgaaaataccctttacatctgttgggatctgaaaatgagtcacattgaattgggttccagctttataatgagaaacgttattcctaatttttgagttagccaatttgcattccacaaattgggatcctcataacccaaatatatcaccgtatgtgagagggatttgaaagcgagtattgaaaaactcacctttgcatatttaatttccaccaaaaggagttattttggctttatgctcatgaacttagacctaactggccatgtatatgtagatgcaaattcatctagctgtggccctctttgatctctgcttgggaatggctatttttgactatgcgtggtttcttctcgtattttgtgatcaggtcagctcccagtagaaactcaaatggcatcaatattactaactcttctctgcccacttctcttttgtccactctcctagacattcccaccaactgttccagtgatttgggcaaaaatacgcagccatttcccaaaacttcacatgtgcagctatcatggctgtccctccctagacttggaggtgactctcacttaatttttacctgcccaacaatgttccatctaccatctaaaaggtaatataagaagaagttttgaaacccactttaggaaaaccatcttctttaaatccttcaattatctgaggcctctatatgtcaaaactatttttcagttgcaggggattgggcaaacttgttctttcttatacttgggttcaaagacccattctccagtttcatatttcccaaaccaaaatgcttgacataaagccaaatcaactgccaagcacactttattttgcataggagtatgcagcctagggaaccttggttgaaaagcagcagtctgctatgcaaaatattggaaatcactgacagtgtagcattcatattatctgtcaatgagggtatattgggaacgtgctctcgtgaataataaaaagcaacatatttttatttggccttataaattaggttgtggtaatgtaaactttgatatatagtctttttatttttctcttattaatctgccaaagatgggaacagatacaagaatttttcaaattggcttttgtaagacaattgatgattgtaatagtgtttaatcttccagaaagctttatatgttgttccacaataaaattgatatttgtttcagcaaagttttcctgacactcacaaacccacaaactgttcctcttaatgcagatattgtagaatctacaaagttcaaatccatttttgatccaaagaaagtagaggagtatttgagacatgagtgtacccagccctttttttaatcacaggcaatgcatgggtctggctggttacactttgccaagaagacttgtcttatgaaacccaaggtatattttgttatgccattttatgtccttttcttttaacattgtggaaagtggtatgttgaatcaagtgtaagctgagttttccagacaactgaagtagctacatcatgaatgttattttgttattaaagggtttttactcagtgctttgtgccaatggatgtccttttccttggagacacataactacaaaattacctcagcttggcctggttttctctcctgccctcttggggaaacatgggcctggcctgggaaaaggcaggtcatgggctggaaggtaggttttggtactaggaagaaatctctgtatctgtcagctttaaagagaactgggccaaaaatctctaacctcactctctctggactccaacacttccctgcaatcctttggtcttgagcatgtgccagcatgaaggcagactccagttcatacatgaaaggcaagaaaaagaaaatagtaaccttgaatcttctgtgggccaccaggcactcacctttccccaccttgcacactatccagtcaaggctattgcagcccatctggtggctttacatgggacattaccaaaggcttcttcctccatcctggggttgcaaaggatccaggtcccctccatccagtggggctcttccacatcagaagtccccctcccaccatcctctgcatcctgtttagctatcccatctataccttttggagatgattatttagaaaacaaagaaaggtatggaatggggtttcctattgtttgctaggttatattttagcaattctcaattctttgatctggaaaaatacaagagggaaaaggagaccccactatctccctgtgctttgctcccatctcagggggcaggggcagtgcacattgcctatgctgttgatctgtcttgggcgacaggctgaatcacagctattgccccagccaaaaacatggcccatcaatgcctactttatctctgcttgaaaatcctattcaaaaagttgtagagtttgaggtttttatccccccatatcctttgctttggtccagtttggcctttagcataagagtcagctttatctctaggaaagttttttcagattatgacaaggaacctgccacctgggaagaaaagagtccgaagactagcaatcggataggtagtcataccattaacagatacttccttgaaggtagaatattatttcctttctttacagttttgtgttacacaagtccaagtggtgccagcaaacttcttaccgtgaaatgttgtaaaacacctggcatactgaaatttctgaaacaaaaacacaagctccacattgataacttgataaataaccactaaagtttagatgcagggactgagatgatacaggcaaaatcttggtgttggtttctcttttaattcgtatcttcgatcacctaacctttctcaatccaagagcagttcagtcttttctccccaagtctaggatgccaaagagcatcataggaaaagataattagggattgaccagcatttcaattagttctcttcttcatctttgcatttctcaaaagtgttctcctggaccagagggaaagagctggtccattttttttcattctttctattcaaatttttccacccagacaatactttattaacacagatactgtagatccttccttggtcagtgaattattacaagaggagctatccttccaccaaagtgagtgaaaacaagttccagtatcttttcttccatccagttttgttctcagaatccaagtcagtcctgggtcttttctcactttagaccctggcctcagatgtgtttattcttgctatttaaaaatacctttaaatttcacatgctggcctgcagaacttgcatcctttgttctatactgttgactgcttgatggtattgaaaggtgactataatgagggaagaaaggaggaggtaaagagagaagaatttgtcccagatctgtttaaagtttcaaaatttaaaaagggacccattaaattatgggaaaatggctatagagtgtgagcctccgttgaccatatgctcaaagaccgtactctgccacctgccttccaggtagctattctagaaactcagtcctttgtggaaacccaactaccttttaaaagtctctttccagattccaaaaggacaagagatcagagagtcacatatacgcctcttgttttattttcttgctttcacgggtattattgccaagaaaatcgtagggaaaaactttaaacttttcttttcagttgatccctttgacatcacctctcatgtttaaaatcaggaaaacacacccctaaaatttgcactctcttccgttttgaaaaagaaaacccacacacaaatgcacactattaccgtctttcaccctgcgctatatttccaaagtgtattataatccagatattgccccatctcaaacatgttaagtcagactgtgctgaaagactttccagggacggtcaacagggtatatgttcagtggctgccctgaaatcctggtggggatgaggatcacgcttcatcatcaaggggatgcccatcccctgataagctcccagtccttttggaagatttctttgaatgttaattgcattttcagttttgctcatttcccaccccaatgttttgtctgcaacatcgcttacactggattctttctatttttattcctatcattaaatggtagtgctgtaaattctgcaattaatgttaaataaactgctttaattcattgaaaaaaaaaaaaaaaaaaaaa

SEQ ID NO: 726 - DNA, 3376 bp, Homo sapiens
ggcgcgggcagggagcggctggctgtcagctgagccgcgctgggcggggtcgccaggccgcgcatcagccctaggcaccccagtcccggctgccccctccgccaccgccgccgcccgccggcaggttccctggtcagcgtcccatcccggtcgggagttctctccaggcggcacgatgccgaggaaacagtgaccctgagcgaagccaagccgggcggcaggaacttctgcaatgtcccatcaacctctcagctgcctcactgaaaaggaggacagccccagtgaaagcacaggaaatggacccccccacctggcccacccaaacctggacacgtttaccccggaggagctgctgcagcagatgaaagagctcctgaccgagaaccaccagctgaaagaagccatgaagctaaataatcaagccatgaaagggagatttgaggagctttcggcctggacagagaaacagaaggaagaacgccagttttttgagatacagagcaaagaagcaaaagagcgtctaatggccttgagtcatgagaatgagaaattgaaggaagagcttggaaaactaaaagggaaatcagaaaggtcatctgaggaccccactgatgactccaggcttcccagggccgaagcggagcaggaaaaggaccagctcaggacccaggtggtgaggctacaagcagagaaggcagacctgttgggcatcgtgtctgaactgcagctcaagctgaactccagcggctcctcagaagattcctttgttgaaattaggatggctgaaggagaagcagaagggtcagtaaaagaaatcaagcatagtcctgggcccacgagaacagtctccactggcacggcattgtctaaatataggagcagatctgcagatggggccaagaattacttcgaacatgaggagttaactgtgagccagctcctgctgtgcctaagggaagggaatcagaaggtggagagacttgaagttgcactcaaggaggccaaagaaagagtttcagattttgaaaagaaaacaagtaatcgttctgagattgaaacccagacagaggggagcacagagaaagagaatgatgaagagaaaggcccggagactgttggaagcgaagtggaagcactgaacctccaggtgacatctctgtttaaggagcttcaagaggctcatacaaaactcagcgaagctgagctaatgaagaagagacttcaagaaaagtgtcaggcccttgaaaggaaaaattctgcaattccatcagagttgaatgaaaagcaagagcttgtttatactaacaaaaagttagagctacaagtggaaagcatgctatcagaaatcaaaatggaacaggctaaaacagaggatgaaaagtccaaattaactgtgctacagatgacacacaacaagcttcttcaagaacataataatgcattgaaaacaattgaggaactaacaagaaaagagtcagaaaaagtggacagggcagtgctgaaggaactgagtgaaaaactggaactggcagagaaggctctggcttccaaacagctgcaaatggatgaaatgaagcaaaccattgccaagcaggaagaggacctggaaaccatgaccatcctcagggctcagatggaagtttactgttctgattttcatgctgaaagagcagcgagagagaaaattcatgaggaaaaggagcaactggcattgcagctggcagttctgctgaaagagaatgatgctttcgaagacggaggcaggcagtccttgatggagatgcagagtcgtcatggggcgagaacaagtgactctgaccagcaggcttaccttgttcaaagaggagctgaggacagggactggcggcaacagcggaatattccgattcattcctgccccaagtgtggagaggttctgcctgacatagacacgttacagattcacgtgatggattgcatcatttaagtgttgatgtatcacctccccaaaactgttggtaaatgtcagattttttcctccaagagttgtgcttttgtgttatttgttttcactcaaatattttgcctcattattcttgttttaaaagaaagaaaacaggccgggcacagtggctcatgcctgtaatcccagcactttgggaggtcgaggtgggtggatcacttggggtcagggtttgagaccagcctggccaacatggcggaaccctgtctctaccaaaattacaaaaattagccgagcatggtggcgcatgcctgtagtcgcagctactcgcgaggttgaggcaggagaattgcttgaacccaggaagtggcagttgcagtgagccgagacgacaccactgcactccagcctgggtgacagagggagactctgtctcgaaagaaagaaagaaaaaaaggaaggaaggagaaggaaggaaggagaagaaaaggtacctgttctacgtagaacacctttggtggagttccatcaactcgcaaagtagaatccttacctactactcttctgataataattttaatattttttatgtttggttgatgcgagcagctgcactgctcatgcagttagctagcatgtgacatcatgtgacaaagttcatgtaattagatggaagaaacctcactgattaattttaagaaccttttagggatgcaggaacaatgaagtggccacagtatgtgctgtttttgaagcatttttaaaaacgaattgtagttgtttttcttcatttaaaatggatctgttggaggttatgtgtgtatgttgtagttttattgcagccacaataattttaccaaagttttcacataggcagttagcctttacttaatatcaagacaagtgaaaaaatattggcatcgatgaaaccgataacattggcctcattggatttctttacccattcacagtgtaaagaagttaccttcatgctttcattgtacctgcaggcctgtgggcttgtacagtagataattaatttctaaaaagaacagctgcctattttcttcctaggttaggttatatcttcataatcacaagaattagtgatggcaaaataaaattttgcttatgaatcttttacattgtttatatatgattaatatcatcatatatattttctgtattaagctcatttggcttcatttaagctgtatacttagtcatatatctttcattagttctatggatatgagcagatccctttactggagcccagtatgtgctgtgtgagttagaagtcattcttgctgagaaggtgaataggtagggatttgccttgttttgtaagtctacaatttgccaagagtaaataacactggaccagctgtaaaagtaaacagtgtgtttatgcattgagatactaaagcattt

SEQ ID NO: 727 - DNA, 1911 bp, Homo sapiens
gctcggcctctccccggcacgttctcagctgctcctggttcagacccagcgagggagccgcgagcgaggctcaccgtccccggcgtgcaggatccggggctgctgagcgctcgctcccgcgtgtccggcgcttggagtccccgcggcaggagaggagtcgggacactagagctccaggggcgcctgtgggctccagggcctccggcttccccagtccccttcagctaaagccccagagacgtgctcagccccaggacctctgcggaacaagatccggattgagaagccactgcaactaccgaaatgggcagcaaaaccttgccggcgccggtgcctatccacccttccctgcagctcaccaactactccttccttcaggcagtgaacggcctgcccacagtgccttcggaccatctgcccaacctgtatggtttcagcgcgttgcacgctgtgcacctgcatcagtggacgctgggctacccggccatgcacttgccgcgctcttctttctccaaagtgccgggcacggtgtccagcttggtggatgcgcgcttccagctgcccgcctttccctggttccctcatgtcattcaacccaagcccgagatcaccgctggaggcagcgttccagcgctcaagaccaagccgcgctttgattttgccaacctggccttggcagcaacgcaagaagatccggccaagctcggtcgcggggagggcccaggctcccctgcaggtgggctgggtgccctcctcgacgtgaccaagctgtctccagaaaagaagcccacaaggggacgtctgccttccaagaccaagaaggaattcgtctgcaagttctgtggccgccacttcaccaagtcctacaacctacttatccatgagcggacgcacaccgacgagcggccctacacctgtgacatctgccacaaagccttccggaggcaagaccacctgcgagaccacagatatattcactccaaagagaagcccttcaagtgtcaagagtgtgggaaaggattctgccagtccaggactctcgctgtccacaagacgctacactcacaggtgaaggagctcaaaacctccaagatcaaatgctaaatagaacctgtgggtcacaaggaccctaggcccagcggccctctcctccatagggaccagaagcctgactctggcgggcagcgggagaggcgctcgctcgggaccttccacctctccaacattgtcccctgggtccctggcgcacgcggcacttcagagccccgcccggggccgcgaccccgaccgtccctgctgctcccctaggacgcggctaaactcttggccaaaaggcggtactcacgtggcggaagggaaactgcattaaaaaaagaacgaaagctccgcggagccgcagcggcgcctctcccagaagtattactttttctattgttattttatacgttttcttttttatttttgtctttgaccatataagcttgtaactctgactgcggagagtgagtggagagaggagaggcaacgaagtccttagcactggcagctcccacctcctcctcccgcccctgcccccacccccggagcctgcaaaagtgtaatccctgtatctgcttcagcctcctgccctagggaccgcggggcagccccctcccagctcttgcagctcagctggcggccgtgggctccgggactaggagagcgggacggggacctcgggcctggggtctgcagggggcccggcctccgctgccgcgacactgcgagggagcagccagccaagagccgggcgttatattgcgattggcactttatgctgaccatcggtaacggacatttatcactggagttttttttttttttaactattaaataaacggttattttacaggcaaaaaaaaaaaaaaaaaa

SEQ ID NO: 728 - DNA, 1825 bp, Homo sapiens
cggggccgctactaaagcccaagactcccggcctggggcagcctggggagggacgcgggcggggacggagctcggcgtgcttgctgctggagggtgatggccctgcaaggctgtgggctccgacctcaccgggagtcgacagcgagaggttcgccgaagagcgaggttctgggcgagcgctgaacgccggccccaagcaccccgggtctttacacagtccgcgtccacagactctgacgaagacgtggatctgctctcgctttagctgctcgcggtcctccagatcatgtccgcgactcctgcgactccgcgcggaaaaaaaagtttgccaggcgtggactcaatgacctttccaagctgtgcgcctcgctgcctggaccgggtctgagcgcggctgcccaggttgacctttctgcgggagggctttctctacgtgctgttgtctcactgggtttttgtcggagccccacgccctccggcctctgattcctggaagaaagggttggtcccctcagcacccccagcatcccggaaaatggggagcaaggctctgccagcgcccatcccgctccacccgtcgctgcagctcaccaattactccttcctgcaggccgtgaacaccttcccggccacggtggaccacctgcagggcctgtacggtctcagcgcggtacagaccatgcacatgaaccactggacgctggggtatcccaatgtgcacgagatcacccgctccaccatcacggagatggcggcggcgcagggcctcgtggacgcgcgcttccccttcccggccctgccttttaccacccacctattccaccccaagcagggggccattgcccacgtcctcccagccctgcacaaggaccggccccgttttgactttgccaatttggcggtggctgccacgcaagaggatccgcctaagatgggagacctgagcaagctgagcccaggactgggtagccccatctcgggcctcagtaaattgactccggacagaaagccctctcgaggaaggttgccctccaaaacgaaaaaagagtttatctgcaagttttgcggcagacactttaccaaatcctacaatttgctcatccatgagaggacccacacggacgagaggccgtacacgtgtgacatctgccacaaggccttccggaggcaagatcacctgcgggatcacagatacatccattccaaagaaaaacccttcaaatgtcaggagtgtgggaaaggattttgtcagtctagaactctagcagttcacaaaactttacacatgcagacatcaagccctacagctgcgagcagtgcggcaaagtgttcaggcgaaactgtgatctgcggcggcacagcctgactcacaccccgcggcaggacttctagagaagcccaggatctgtcccgtgccgccgctgctcccctccccagacacctctccacgtctcctacccagggggtcgcatccctagcccttcactgaccccagctcttcccttgctgcagccgcacctgcagctccagggagttaactcttcttctgggggactgagaactgtagaaagccacacactactacatcccttcacaaagagtatatgctagtttcttgtagatattcacagctcattttagagctctgtacataatgttgtgggtctttgttttgttgttttgtttgctttgggatcttgttggatgcacttagatatggaaaatggaagccaaattttatctttaaagactgtattttcaaaataaaactttttcttgtttgtttcaaaaaaaaaaaaaaaaaaaaaaaaaaaaaaaaaaaaaa

SEQ ID NO: 729 - DNA, 755 bp, Homo sapiens
aactagctccaccctctaacccccactccagctgcagacgccacggagtttgtgcaggggcgcagcgctccagccatggcgcgttcgctcgtccacgacaccgtgttctactgcctgagtgtataccaggtaaaaataagccccacacctcagctgggggcagcatcaagcgcagaaggccatgttggccaaggagctccaggcctcatgggtaatatgaaccctgagggcggtgtgaaccacgagaacggcatgaaccgcgatggcggcatgatccccgagggcggcggtggaaaccaggagcctcggcagcagccgcagcccccgccggaggagccggcccaggcggccatggagggtccgcagcccgagaacatgcagccacgaactcggcgcacgaagttcacgctgttgcaggtggaggagctggaaagtgttttccgacacactcaataccctgatgtgcccacaagaagggaacttgccgaaaacttaggtgtgactgaagacaaagtgcgggtttggtttaagaataaaagggccagatgtaggcgacatcagagagaattaatgctcgccaatgaactacgtgctgacccagacgactgtgtctacatcgtcgtggactagccctagaatgccatccttcttcaggagctagtttggagatgggtttttctggtgccactgacacctgggctgcccatgccgctcaggctacccttatctcctctgcacttatgttatcaataaag

SEQ ID NO: 730 - DNA, 2702 bp, Homo sapiens
ccccctttttaaccacaaaccgaattttctttcatttaggtgatctatatatatctatatcgtatagcttatagcttatatctattttaaataacttaaagccgctaaaatttgggggggaacagctttcgccctggagcggtgcgcgatgctgtctcatgccgacctcctggacgccaggctaggtatgaaagatgccgccgagcttctgggccaccgggaggcggtgaagtgtaggctgggcgtggggggctccgaccccgggggccatccgggggacctggcgcccaactctgacccagtggagggagccactctgctgcccggggaggacatcaccacagtgggctctactccggcctcgctggcggtgagcgccaaagacccggacaagcagcccgggccccagggcggcccgaaccccagccaagccggccagcagcagggccaacagaagcagaagcgccaccggacgcgcttcacccccgcacagctcaacgagttggagaggagcttcgccaagactcactaccccgacatctttatgcgtgaggagctggcactgcgtatcgggctgaccgagtcccgagtgcaggtctggttccagaaccgacgcgccaagtggaagaagcgcaaaaagacgaccaacgtgttccgtgcgcccggcacactgctgcccacgccaggcctgcctcagttcccgtcggctgccgccgccgctgccgccgccatgggcgacagcctgtgctctttccacgccaacgacacccgctgggcggcggccgccatgcctggcgtgtcacagctgcctctgccgccggcgctgggcaggcagcaggccatggcgcagtcgctgtcccagtgcagcctggcggccggtccgccgcccaactccatgggcctgtccaacagcctggcgggttccaacggcgcggggctgcagtcgcacctctaccagcccgccttccccggcatggtgcccgcctccctccccggccccagcaacgtctccggttcgccccagctctgcagctccccggacagcagcgacgtgtggcggggcaccagcatcgcctccctccgccgcaaggcgctagagcacacagtctctatgagcttcacttaatgcagccgcgccccggcccgctccgcccccagcaccgccccgggggccgccccgaggcccttccggcgcgcacccggaccccggcgccctgccccgtcccgccccggccttcgccccgtctcgtttcgtcctcgcctctctcctccactcgctcgggctcaccccaagccccagcccgcgaggcctcccctccgcctgatttcgatcgcccgcggtcccccgtctcccggccgcccctcttcccttcccacccagctgcgccctcggctcggtctccagcgcctcagcccacccttcccgccaccctggcctccctgcttgcgctggccgtgctcgcgccctcctcctggccttctgacgggcggcgttcccacccacaccttcgacgcgacgcctacgacccccctcgcccgccgcctcccctccggtcccctctttccccacacttcgcgaccctcctcccgcgcccggcaaaaagtatccttcccgccattttacgtaccagggagtcgactcaggatctgaaatcagacaccaatggactggtttgtgggcagaaacacacacactcgcactctcgctcacgctcagacgctacacacgcgcgcgcacagacacggtgcacctaggtcacacacggacgtgttcaagggacagcacaatgttagggatttttgtcttaaaggaggacaagcattgctaccaaccgcctcatctgagggcccaactgatatgatttgatttatccttgtactctccaagctcctgtctttctttcctctcccaccacgctacccttgcccagtccacccagtcacatccgtgcagccctctcttggcttgcaagataacgcttttatttttattttatcttattttcattttcttaagcacaactgtgtgagagtgtagaagggaaggcttctcaggaggaacgtgacagtggattgggtggctggagtagactaaagcagtcatgtgacgaggaagaggtgatctgacccattttgataagtctttataaggaagaataaaataaacgtgtaagcaaaattttcttttgtaaaagcaaaagccacatctcttttctggatccttcaggactggggtttgtttgcttccttttctgtttctgtcttctcgctgctctgtgcccttggttgttttgtggtggtcctgtcgtccctcgtgcccctcggccacctgctggcagccgatgggggcactcggacatctacaaccctgcaactttgtacagagaaacacaatcagctctttctgcatgtgctggtcaaatccaaacccagagaacagaagcgctttctaagaatgaacaaatatgtgaaataggatgttttgtgtagataaagcattcttgttacatactggtcaatttgtgatatgttttaacttaatgtctgtgtttatttatggaattcggttttcttaataaatgtttgagctaatataaagcatattatttgacttttccggacaagtttatatcaagttaaatgtaaatggataaaataaaatcattttcagtatgtgaaaaaaaaaaaaaaaaaaaaaaaaa

SEQ ID NO: 731 - DNA, 2176 bp, Homo sapiens
gatcaatcttcatcaggctacatttccaatcacctaaacaaccgagcaagacaagccactccgacaaggttggctgcccggcgggtctctgtgagagatccaggtagatggtgaacggccccggcagctgagggcaggccaggcccccagacgcatcagaccctgaaggactgcgtggtgggagccctgcaccgctcctggccccgggccccctggatccgtcggggcgcctccacccagctgttagcatgatgtcttacctcaaacaacccccatacggcatgaacgggctgggcctggccgggcccgccatggacctcctgcacccatccgtgggctatccggccactccgcggaagcagcggcgggagcgcaccaccttcacgcgttcacagctggacgtgctcgaggcgctcttcgccaagactcgctaccctgacatcttcatgcgggaggaggtggcgctcaagatcaacctgccggagtctagagtccaggtctggttcaagaaccgccgcgccaaatgccgccagcagcagcagagcgggagcggaaccaagagccgcccagccaagaagaagtcctctccagtgcgggagagctcgggctccgaaagcagtggccaattcacgccgccagctgtgtccagctctgcctcgtcctctagctcggcgtccagctcttccgccaacccagcggctgcagcggctgcgggactaggtgggaacccggtggcggccgcgtcgtcgctgagtacaccagctgcctcatctatctggagcccggcctccatctcgccaggctcagcgcccgcgtccgtgtcggtgccggagccattggccgcgcctagcaacacctcgtgtatgcagcgctccgtagctgcaggcgccgccaccgcagcagcctcttatcccatgtcctacggccagggcggcagctacggccaaggctaccctacgccctcctcttcctactttggcggcgtggactgcagctcatacctagcgcccatgcactcacatcaccacccgcaccagctcagccccatggcaccctcctccatggcgggccaccatcatcaccacccacatgcgcaccacccgttgagccagtcctcaggccaccaccaccaccatcaccaccaccaccaccaaggctacggtggctctgggcttgccttcaactctgccgactgcttggattacaaggagcctggcgccgctgctgcttcctccgcctggaaactcaacttcaactcccccgactgtctggactataaggaccaagcctcatggcggttccaggtcttgtgagcccaggaatgaaagaggagaagaaacgcaactacctgcgccctccgtggtcccgatcctgttgctgctgctgcaccgcccgcctttgcctcgtcttctccaaaactgaattttcaccccccaaaaagatgtccattgcctgcactgccgcccccatttttgtgccacttgcttggggggatgtgcaaacccaccctgccccttggatggggggaccggtgcttcggcttggcctacacattctatacaggagagatgtattatttccccccttcagcccctactaaactcttaagcctccccttccagtctttctggacagctattaagcacttgcagccttcggaggctctgcgctctgatccgctgtttgagcccaacactttaatttattctttctggacactggagtcactaactggcgtgtttctgcccattggagcacccgcacactactccaaatcaaaaccactaagagttcctcccgcgcagactgctgccccttcagctgccctcgattttgctccacgcctgccggccagagcctcccggcgtttcttccgccccagcggagtgcgctggggcgcgccagggctaggcccgccggaggagcgcgtccccagccttccgcgcacagagccgcatcccgccccgccctgcgctggactggttcaagcttccgcctcggcgggaacgctgtacatagtcaggtccgttccagggaccacttaaactttttagttgctgttggttggttgaactgaacatatcttgtcttagcacccaggaaacagaactttaagatatatacagcacatatatatatatatacatatatatatacacatatataaaaaacaaaa

SEQ ID NO: 732 - DNA, 2209 bp, Homo sapiens
gagagcgggaccggcctcagctccaacacagcctccactgtgattaaaaataaaaattgctagagcagccctcactcgccacatctactttgatagctggctatttggaatttaaaggatatttgactttttctaacctcccatgaggctgtaagttccactgctccaaacccacccaccaaggactctgaacctgtccaccccgggcgcatcaagatcttccagctgggtacccccgatttgggccgactttgcacctccaaacaaccttagcatgatgtcttatcttaagcaaccgccttacgcagtcaatgggctgagtctgaccacttcgggtatggacttgctgcacccctccgtgggctacccggggccctgggcttcttgtcccgcagccaccccccggaaacagcgccgggagaggacgacgttcactcgggcgcagctagatgtgctggaagcactgtttgccaagacccggtacccagacatcttcatgcgagaggaggtggcactgaaaatcaacttgcccgagtcgagggtgcaggtatggtttaagaatcgaagagctaagtgccgccaacaacagcaacaacagcagaatggaggtcaaaacaaagtgagacctgccaaaaagaagacatctccagctcgggaagtgagttcagagagtggaacaagtggccaattcactcccccctctagcacctcagtcccgaccattgccagcagcagtgctcctgtgtctatctggagcccagcttccatctccccactgtcagatcccttgtccacctcctcttcctgcatgcagaggtcctatcccatgacctatactcaggcttcaggttatagtcaaggatatgctggctcaacttcctactttgggggcatggactgtggatcatatttgacccctatgcatcaccagcttcccggaccaggggccacactcagtcccatgggtaccaatgcagtcaccagccatctcaatcagtccccagcttctctttccacccagggatatggagcttcaagcttgggttttaactcaaccactgattgcttggattataaggaccaaactgcctcctggaagcttaacttcaatgctgactgcttggattataaagatcagacatcctcgtggaaattccaggttttgtgaagacctgtagaacctctttttgtgggtgatttttaaatatactgggctggacattccagttttagccaggcattggttaaaagagttagatgggatgatgctcagactcatctgatcaaagttccgagaggcatagaaggaaaaacgaagggccttagaggggcctacaaaccagcaacatgaaatggacaaaccaatctgcttaagatcctgtcatagttttagatcattggttatcctgatttgcaaagtgatcaaaagcattctagccatgtgcaaccaaacaccaccaaaaataaaatcaaacaaaactaagttgtgaaggaagggagggaaggtcatagccttcttaagcagaggtgttccattgttttagccaatccttggttgaatcttaggaatgaacagtgtctcaagctcattcacgtttcatgaccaactggtagttggcactgaaaaaacttttcagggctgtgtgaattgtgtgactgattgtcctagatgcactactttatttaaaaaataatgttcataaggagtcaatatgtagtttaagagacaatcagtgtgtgtcttataaatggtacatctgtggtttttaatctgtgctagacttcaaaactgtgatctcctgttattgtatgcaaccttgaactccacctctgcaggggttcttctgtgattaaataggttataattataagcaaaattcagagcaactgagtactgatctaaaaagattacctttggctggaggtgagctgcactgaaactttacgacaaaatgtctctggacaaagagagtcagagaagagaagcaaaaggacactaattcatctgtaatttactgttggtaagcctagcagtaaagagacattggtcaattgctctgaccctgatgaattattaaactgagatcattgtcgtttatgcttgcagatgttaaatggaaaagttatatatgcataaaccttttcttcctggatttggcagatatgtataattatattaaaatggttctagcacaaaaaaaaaaaaaaa

SEQ ID NO: 733 - DNA, 2896 bp, Homo sapiens
taggcggatgccgccatgcagcactacggggtgaacggctactcactgcacgccatgaactcactcagcgccatgtacaacctgcaccagcaggcagcccagcaggcccagcatgcccccgactaccggccttcagtgcatgcgcttacattggctgagcgcctggctggctgtacatttcaagacatcatcttggaggcccgttatggttcccagcaccgcaaacaacgtcgcagccgcacagcgttcacggctcagcagctcgaggccctggaaaagaccttccagaagactcactacccagatgtggtgatgcgtgagaggctggccatgtgcaccaacctgcctgaggcccgggtgcaggtgtggttcaagaaccgccgggccaagttccggaagaagcagcgtagcctgcagaaggaacagctccagaagcagaaggaggctgagggctcccatggggaaggcaaggccgaggcccccactccagatacccagctggacactgagcagcccccacgtctgcctggcagcgacccccctgctgagcttcacctgagtctgtctgagcagtcagccagtgagtcagcccccgaggatcagccggaccgtgaggaggaccccagggcaggggctgaggaccccaaagctgagaagagccctggggctgacagcaaggggctgggctgcaagaggggcagccccaaggcagattccccaggcagcctgaccatcactcctgtggccccagggggtggcctcctgggcccctcccactcctattcctcgtccccgctgagcctcttccgtctgcaggagcaattccgccagcacatggcggccaccaacaacctggtgcactactcgtccttcgaagtagggggtccggcccctgctgctgcagcggcggctgctgctgtgccctacctgggcgtcaacatggccccgctgggctcactgcactgccagtcctactaccagtccctgtcagcagccgctgctgcccaccagggtgtgtgggggtctcctctgctgcctgcacccccagcaggcctggctcctgcatcagctaccctgaacagtaaaaccacaagcatcgagaacctgcggctccgggccaagcagcacgcggcctccctgggactcgatacgctgcccaactgactgtctggcttccaacccagccaggggtcttaggtgtcccctcctagccctgtggttatccctaggtggctctcgaggagttaactccatgagcccagggatcctagggcctggggtcctgttccctgctccgcttccccataccccagcccgaggtgaagcccacacctacacaccctctgcatggccctgcctggaccccatggaggccgaatagggaggaggtgagaggctggggtgccccaagcttccctcggagaagtgagaggctctccctggctagatcctcatctcaatagcacctcctcccttttctccctatccttctgccccctagtaagtctacgtgtggaatgtgagatataaatataaatatataaagctatattttcaggctcctgcctgccccaggccccctgccccactcccatctcttcttccctgccacccctccctgcagcctccgcggctcactccagccatcccttctgtttctccttctctctccttccttcttcccttgatctccctcttcctgtctctgtcctggtccctgcccccgtctcggcccagcctctgtattctccacccttgatctttctccttgtctctcccgctgcccctggtttcttcctttggtgttggctgtgttggtatcatcagttcttgagctatattttgtttggggttgtggctggttttggttttagtaattttgcgacttcccgttgctctccttctattcccttccttctgccctgcctgcctccctgcacctgcggcctctctaggaagctgttcctttctatgcccaatagaagcaacaaggccctagctggagactctggggatctggagctgcaggcaggaggtggcactggctcccactcccacccctgcccaggctggcatctagaaggcgtcatgaattactttctcttctctcttctcaattttgaggtcctcattcccaagattgaggaggcagtagttaatctgggaaggcagtagaatggccagcattcctgcctgtaagtcttcccaagacagaggcccggtgacacagttcagccaggactgaccacagggctctagagctctctttggtgagacttccctggatggagagcagcagcaggggaagaggtgctctcagagacagcagggctggtgctcttctcccacaagctgagcctccacgttcagcagatactgtccaaggcaggggtacggctgaccaggaatgaaggttgaactctgctcctgagcacggtgcgtgcaaagcatatagcagcacataggctcaggcttctgtaggcttcctgtcccagagccaattatggaagtaagggcttccctccagctagtcactggaatggaaaagtgtgttcctgttcatagccaggaaacccagctcagcaaactccctttcaaagctgtgtgaccggctgggcatggtggctcacacctgtaatcccagcactttgggaggccaaggcaggcaatcacctgaggtcaggagttcaagaccagcctggctaacatgtgaaactaataataatacaaaaattagctgggcgtggtggcacatgcctgtaatcccagctacttgggaggctgagttgggaggattgctgcaatctgggaggtggaagttgcagtgagccgagatcatgccactgcactccagcctgggcgacggagtgagactccatctcaaaaaaaaaaaaaa

SEQ ID NO: 734 - DNA, 3007 bp, Homo sapiens
ggctcgcactttaagacttcccgagcggcggcggggacgccagtcgagccgggagacgcttacctgccgcttccccgcgccgcccggtgcacctggccgcaagggacctcgttctcagggaagacggcgacattccgcggaggtggaaccgccgcgcgccgtccgggctcggaccttccccggaacgtgggggcgccttagcgactccttccctgttgtgcccccgttcccggcgttcagcccggccccgcaaaggtgggacggctcccggcttcagttacggaagcggcccgtgtccagcgacgagggttcgaaaatgccccgcgcgttcctggtgaagaagccgtgcgtctccacgtgcaagaggaactggagcgagctccccgacgaggagcgcggcgagatctacgtgccagtcagcctgggcttctgcccaccacagccctaccgggagccggaaccctctgtggccgaacccccttcctgcccgctggctttgaacatgagccttcgagactctagctacagcatggcccccgggccctgtgtggtggcccagctgccctctgaagacatgggccacttgacagacccccagagcagagaccatggcttcctgcgcaccaagatgaaggtgacccttggggacagtcccagtggagacctgttcacctgccgtgtctgccagaaggccttcacctaccagcgcatgctgaaccgccacatgaagtgtcacaacgacgtcaagaggcacctctgcacgtactgcgggaagggcttcaatgacaccttcgacctcaagagacacgtccgaactcacactggcgtgcggccctacaagtgcagcctgtgtgacaaggccttcacgcagcgctgctctctggagtctcacctcaagaagatccatggtgtgcagcagaagtacgcgtacaaggagcggcgggccaagctgtacgtgtgtgaggagtgcggctgcacatctgagagccaggagggccacgtcctgcacctgaaggagcaccaccctgacagcccgctgctgcgcaagacctccaagaaggtggccgtggcactacagaacactgtcacttccctgctgcagggcagcccccacctgtgagtggctcgagccctgggggtgctcctggaagccccaagagcatccaggattgcctcccagctgcctggccagcccaccctcctgcaacctctcacccgaacaccagtgatcaggactggagcccccgtgccttggtctcccccctgggcacacgtgctcactcaggcccagcaatgacctctgctcatttttgcatttttgacttatgggccgaggctgttctgagcctgggaagatgtacctatgtcaagagaagggatgaggccaaggctgccttcaattagaagcagccgcccacagagacaggcactgtgtgcctggcagcaggacttcctacccagaggaggttcgagctaggatcccactgcccccgcctctcagcacagggcaggggctgcaggtccccagtggacatcagagtcaaaagcactggcaaagggtacccctgcaaacaactgtggtgggggctggcagcagaccccccacctggcagggcttctaatgctcagggttctggagggctctgtccttccggcaaggagaggcacacatgtgtgcccagccgtgtgtgtgcgtgtgcttgtgtgtgtgcactgctgtgtgtgtgtgcacgcacaggaagcctttccacatatcacctcatttctaagaaataaactacaaggtgccaagaaggttttatttccttttattttttaaagatgacaaatgtacagatgttaatatatttttggtgccaatggcgatgtttttaagagtgggatggagctggcttttctccattcccgtgcgcttctatttatcctggacatttcaaacctcctctgtgccttggctctgggcgggggctgccccaacccacccccgttctttgtacgtgctgagacagccactagaagatcttcctccagcggcgccctggacggctgctcctgcgaacagcccatggcatcttctgctcttccctcccggctctgccctgcacatcctgttgagccaagccccagtgacccggagagctggcctgatgctgagagtgtgtcctcctggggctttagggggcaggaaggtgggacgaatgacgatgcccatccactacctgaagcactaggacactcttgcagggccaggctggaagaccggcccttttcttggttgagtcaaaagccttagcacagtggcaaaaaatgggacagaatgatgaccagcacctcagaaacttccagagggaggagaggatttgatggctaccaaattgtatctgttgccttttttctgactttttcacctgaccaggctggggtttggagtggctgtggggagacccgtcctggctggctggctggctcccttgctcccttgctgcagctgggaaaggggttctgggtgtaaagaggtgtgcgtcttgtgggccaaagggaaaaacaggcaggggtcagagccagcctgccagaggcaaatgcaaaagaggtccccagaacacagccagctgggcagccccttaaagccaaaccccacctgaagcagaaccactttggcctcccctgcccaaaatgggtagtgtctacacgtccccgggctcaggctcaggcccagccctgggctgacctgagaggaaggctccttcctggactgccctctgaaatgtgtatagattgattctaaaatctcttgtttcacttgactttagagtgtctgggacgctgctgtattctgaaagtcacatagcacacagtaatgttatctggaagctctgtttttgtttacatttctgtatccctgggttgactgccaatccgaggccgtcatgaagctctgtgttgtctgttttattttataaccttcctctcaactattaaaattagagatctaaaaaaaaaaaaaaaa

(The sequence listing continues in the following parts.)
